(19) United States
(12) Patent Application Publication
(10) Pub. No.: US 2020/0392482 A1
(43) Pub. Date: Dec. 17, 2020

(54) SELF-DIVERSIFYING SYSTEMS AND METHODS OF USE THEREOF

(71) Applicants: THE BROAD INSTITUTE, INC., CAMBRIDGE, MA (US); MASSACHUSETTS INSTITUTE OF TECHNOLOGY, CAMBRIDGE, MA (US)

(72) Inventors: Feng Zhang, Cambridge, MA (US); Jonathan Leo Schmid-Burgk, Cambridge, MA (US)

(73) Assignees: THE BROAD INSTITUTE, INC., CAMBRIDGE, MA (US); MASSACHUSETTS INSTITUTE OF TECHNOLOGY, CAMBRIDGE, MA (US)

(21) Appl. No.: 16/904,529

(22) Filed: Jun. 17, 2020

Related U.S. Application Data
(60) Provisional application No. 62/862,522, filed on Jun. 17, 2019.
(60) Provisional application No. 62/912,602, filed on Oct. 8, 2019.

(51) Int. Cl. C12N 15/10; C12N 9/12; C07K 14/47

(52) U.S. Cl. CPC C12N 15/1037; C12N 9/1276; C12Y 207/07049; C07K 2319/85; C07K 2319/70; C07K 2319/80; C07K 14/4726

(57) ABSTRACT

A diversity-generating system comprising: a polynucleotide comprising: a variable region within a sequence encoding a protein or polypeptide, wherein the system is configured to generate a library of diversified molecules with an efficiency of 80% as measured by number of the diversified molecules in total number of molecules. The system may further comprise a template region; and a reverse transcriptase or functional domain thereof.

### CROSS-REFERENCE TO RELATED APPLICATIONS

[0001] This application claims the benefit of U.S. Provisional Application Nos. 62/862,522, filed Jun. 17, 2019 and 62/912,602, filed Oct. 8, 2019. The entire contents of the above-identified applications are hereby fully incorporated herein by reference.

### STATEMENT REGARDING FEDERALLY SPONSORED RESEARCH

[0002] This invention was made with government support under Grant Nos. MH110049 and HL141201 awarded by the National Institutes of Health. The government has certain rights in the invention.

### REFERENCE TO AN ELECTRONIC SEQUENCE LISTING

[0003] The contents of the electronic sequence listing (“BROD_4170US_ST25.txt”; Size is 19,900,185 bytes and it was created on Jun. 17, 2020) is herein incorporated by reference in its entirety.

### TECHNICAL FIELD

[0004] The subject matter disclosed herein is generally directed to self-diversifying elements and methods of use thereof.

### BACKGROUND

[0005] Bacteria and virus actively diversify their proteins and nucleic acids to adapt to changing environment. Such diversity mechanisms can be used to generate libraries of diversified molecules. Such molecules may be used for screening novel binding partners for antigens, pathogens, and other types of target molecules. However, there is a need for systems and methods for generating diversified molecules with high efficiency and sufficient degree of diversity.

### SUMMARY

[0006] In one aspect, the present disclosure provides a self-diversifying system comprising a polynucleotide encoding one or more open reading frames that encode a diversified molecule, the diversified molecule comprising one or more variable regions, wherein the system is configured to generate a library of diversified molecules with an efficiency of at least 80% as measured by a number of the diversified molecules in a total number of molecules in the library.

[0007] In some embodiments, the polynucleotide further comprises a template region. In some embodiments, the self-diversifying system is a diversity generating retroelement (DGR) system. In some embodiments, the self-diversifying system is a non-DGR system. In some embodiments, the system further comprises a reverse transcriptase or functional domain thereof. In some embodiments, the polynucleotide comprises a sequence selected from SEQ ID NOs: 98-1699. In some embodiments, the sequence encodes c-type lectin fold or a fragment thereof. In some embodiments, the sequence encodes a protein or polypeptide capable of binding to a protein or a nucleic acid. In some embodiments, the variable region and the template region have a sequence homology of less than 80%. In some embodiments, the polynucleotide further comprises a regulatory sequence. In some embodiments, the regulatory sequence comprises one or more ribosomal binding sites. In some embodiments, the regulatory sequence comprises an inducible promoter. In some embodiments, the diversified molecules are proteins. In some embodiments, the diversified molecules are polynucleotides. In some embodiments, the sequence encodes DIV1 or a fragment thereof. In some embodiments, the sequence encodes DIV18 or a fragment thereof. In some embodiments, the sequence encodes a protein from Table 1 or the sequence is from Table 2. In some embodiments, the diversified molecules comprise one or more binding partners of a target molecule. In some embodiments, the target molecule is a protein. In some embodiments, the target molecule is an antigen. In some embodiments, the target molecule is a polynucleotide. In some embodiments, the system generates the library of diversified molecules when introduced to cells. In some embodiments, the variable region is within an open reading frame. In some embodiments, the system comprises a vector comprising the polynucleotide. In some embodiments, the system comprises a vector comprising the polynucleotide and a nucleic acid sequence encoding the reverse transcriptase. In some embodiments, the reverse transcriptase is error prone.

[0008] In another aspect, the present disclosure provides a method of generating a library of diversified molecules, comprising introducing the system herein in cells, wherein the system generates the library of diversified molecules in the cells. In some embodiments, the method generates the library of diversified molecules with an efficiency of 80%. In some embodiments, the cells are E. coli cells. In some embodiments, expression of Mutator S and/or Exodeoxyribonuclease 10 are reduced or depleted in the cells.

[0009] In another aspect, the present disclosure provides a method of identifying a diversity-generating system comprising a). identifying loci with higher diversity in contigs larger than 1 kb in a database; b). selecting contigs comprising the identified loci in a), wherein each selected contig comprises a sequence encoding a polypeptide of least 100 amino acids; and c). expressing polynucleotides comprising at least a portion of the polypeptide-encoding sequence in the selected contigs from b) in cells, thereby confirming self-diversifying function of the polynucleotides. In some embodiments, the database is a metagenome database. In some embodiments, the contigs in a) are larger than 3 kb.

[0010] In another aspect, the present disclosure provides a method of screening binding partners of a target molecule, comprising a). obtaining of a library of diversified molecules using the system herein; b). performing one or more assays to determine interaction between the diversified molecules and the target molecule; and c). selecting a subset of the diversified molecules based on results of the one or more assays. In some embodiments, the one or more assay comprise phage display, toxin inhibition assay, toxin survival assay, bacterial surface display, bacterial two-hybrid display assay, an enzyme-linked immunosorbent assay (ELISA), immunoprecipitation assay, or a combination thereof. In some embodiments, the target molecule is an antigen.

[0011] These and other aspects, objects, features, and advantages of the example embodiments will become apparent to those having ordinary skill in the art upon consideration of the following detailed description of illustrated example embodiments.

### BRIEF DESCRIPTION OF THE DRAWINGS

[0012] An understanding of the features and advantages of the present invention will be obtained by reference to the following detailed description that sets forth illustrative embodiments, in which the principles of the invention may be utilized, and the accompanying drawings of which:

[0013] FIGS. 1A and 1B show results from identifying potential diversifying systems from metagenome database.

[0014] FIG. 2 shows selected candidate diversity-generating systems.

[0015] FIG. 3 shows diversity of reverse transcriptases in the candidate diversity-generating systems.

[0016] FIG. 4 shows results from testing the candidate diversity-generating systems.

[0017] FIG. 5 shows results from testing the selected diversity-generating system (SEQ ID NOs: 9-73).

[0018] FIGS. 6A, 6B and 6C show the DIV1 sequence and tested characteristics (SEQ ID NOs: 74-83).

[0019] FIGS. 7A and 7B show the DIV18 sequence and tested characteristics (SEQ ID NOs: 84).

[0020] FIGS. 8A and 8B show two exemplary non-DGR diversifying systems.

[0021] FIG. 9 shows an example system.

[0022] FIG. 10 show an example self-diversifying system (Hit 214).

[0023] FIG. 11 shows that Hit 214 self-diversified in E. coli (SEQ ID NO: 85).

[0024] FIG. 12 show that Hit 214 underwent dA-dependent diversification (SEQ ID NOs: 86 and 87).

[0025] FIG. 13 shows an example 1-step phage display for screening binding molecules derived from diversity generating systems disclosed herein (SEQ ID NO: 88).

[0026] FIG. 14 shows example results of 2 positive controls from a 1-step phage display screen (SEQ ID NOs: 89 and 88) (SEQ ID NOs: 90-95).

[0027] FIG. 15 shows binding assays were performed to identify peptide ligands that bound to Hit 214.

[0028] FIG. 16 shows a schematic of DRG214 and importance of two positions in hairpin loop for mutagenic homing (SEQ ID NOs: 96 and 97).

[0029] FIG. 17 shows various constructs derived from DGR214 and those components sufficient to drive self-diversification after 24 hrs.

[0030] FIG. 18 shows an example search strategy for diversity generating systems.

[0031] FIGS. 19-22 show maps of the constructs—DIV1 A, DIV1 B, DIV1 D, and DIV1 G.

[0032] The figures herein are for illustrative purposes only and are not necessarily drawn to scale.

### DETAILED DESCRIPTION OF THE EXAMPLE EMBODIMENTS

### General Definitions

[0033] Unless defined otherwise, technical and scientific terms used herein have the same meaning as commonly understood by one of ordinary skill in the art to which this disclosure pertains. Definitions of common terms and techniques in molecular biology may be found in Molecular Cloning: A Laboratory Manual, 2nd edition (1989) (Sambrook, Fritsch, and Maniatis); Molecular Cloning: A Laboratory Manual, 4th edition (2012) (Green and Sambrook); Current Protocols in Molecular Biology (1987) (F. M. Ausubel et al. eds.); the series Methods in Enzymology (Academic Press, Inc.): PCR 2: A Practical Approach (1995) (M. J. MacPherson, B. D. Hames, and G. R. Taylor eds.): Antibodies, A Laboratory Manual (1988) (Harlow and Lane, eds.): Antibodies A Laboratory Manual, 2^{nd} edition 2013 (E. A. Greenfield ed.); Animal Cell Culture (1987) (R. I. Freshney, ed.); Benjamin Lewin, Genes IX, published by Jones and Bartlet, 2008 (ISBN 0763752223); Kendrew et al. (eds.), The Encyclopedia of Molecular Biology, published by Blackwell Science Ltd., 1994 (ISBN 0632021829); Robert A. Meyers (ed.), Molecular Biology and Biotechnology: a Comprehensive Desk Reference, published by VCH Publishers, Inc., 1995 (ISBN 9780471185710); Singleton et al., Dictionary of Microbiology and Molecular Biology 2^{nd} ed., J. Wiley & Sons (New York, N.Y. 1994), March, Advanced Organic Chemistry Reactions, Mechanisms and Structure 4^{th} ed., John Wiley & Sons (New York, N.Y. 1992); and Marten H. Hofker and Jan van Deursen, Transgenic Mouse Methods and Protocols, 2^{nd} edition (2011).

[0034] As used herein, the singular forms “a”, “an”, and “the” include both singular and plural referents unless the context clearly dictates otherwise.

[0035] The term “optional” or “optionally” means that the subsequent described event, circumstance or substituent may or may not occur, and that the description includes instances where the event or circumstance occurs and instances where it does not.

[0036] The recitation of numerical ranges by endpoints includes all numbers and fractions subsumed within the respective ranges, as well as the recited endpoints.

[0037] The terms “about” or “approximately” as used herein when referring to a measurable value such as a parameter, an amount, a temporal duration, and the like, are meant to encompass variations of and from the specified value, such as variations of +/−5% from the specified value, insofar such variations are appropriate to perform in the disclosed invention. It is to be understood that the value to which the modifier “about” or “approximately” refers is itself also specifically, and preferably, disclosed.

[0038] As used herein, a “biological sample” may contain whole cells and/or live cells and/or cell debris. The biological sample may contain (or be derived from) a “bodily fluid”. The present invention encompasses embodiments wherein the bodily fluid is selected from amniotic fluid, aqueous humour, vitreous humour, bile, blood serum, breast milk, cerebrospinal fluid, cerumen (earwax), chyle, chyme, endolymph, perilymph, exudates, feces, female ejaculate, gastric acid, gastric juice, lymph, mucus (including nasal drainage and phlegm), pericardial fluid, peritoneal fluid, pleural fluid, pus, rheum, saliva, sebum (skin oil), semen, sputum, synovial fluid, sweat, tears, urine, vaginal secretion, vomit and mixtures of one or more thereof. Biological samples include cell cultures, bodily fluids, cell cultures from bodily fluids. Bodily fluids may be obtained from a mammal organism, for example by puncture, or other collecting or sampling procedures.

[0039] The terms “subject,” “individual,” and “patient” are used interchangeably herein to refer to a vertebrate, preferably a mammal, more preferably a human. Mammals include, but are not limited to, murines, simians, humans, farm animals, sport animals, and pets. Tissues, cells and their progeny of a biological entity obtained in vivo or cultured in vitro are also encompassed.

[0040] The term “exemplary” is used herein to mean serving as an example, instance, or illustration. Any aspect or design described herein as “exemplary” is not necessarily to be construed as preferred or advantageous over other aspects or designs. Rather, use of the word exemplary is intended to present concepts in a concrete fashion.

[0041] Various embodiments are described hereinafter. It should be noted that the specific embodiments are not intended as an exhaustive description or as a limitation to the broader aspects discussed herein. One aspect described in conjunction with a particular embodiment is not necessarily limited to that embodiment and can be practiced with any other embodiment(s). Reference throughout this specification to “one embodiment”, “an embodiment,” “an example embodiment,” means that a particular feature, structure or characteristic described in connection with the embodiment is included in at least one embodiment of the present invention. Thus, appearances of the phrases “in one embodiment,” “in an embodiment,” or “an example embodiment” in various places throughout this specification are not necessarily all referring to the same embodiment, but may. Furthermore, the particular features, structures or characteristics may be combined in any suitable manner, as would be apparent to a person skilled in the art from this disclosure, in one or more embodiments. Furthermore, while some embodiments described herein include some but not other features included in other embodiments, combinations of features of different embodiments are meant to be within the scope of the invention. For example, in the appended claims, any of the claimed embodiments can be used in any combination.

[0042] All publications, published patent documents, and patent applications cited herein are hereby incorporated by reference to the same extent as though each individual publication, published patent document, or patent application was specifically and individually indicated as being incorporated by reference.

### Overview

[0043] The present disclosure provides engineered self-diversifying systems. A self-diversifying system comprises a self-diversifying polynucleotide. The self-diversifying polynucleotide may encode one or more open reading frames. At least one of those open reading frames may encode a self-diversifying element. The diversifying element may be a sequence or structural feature encoded by the self-diversifying polynucleotide that leads to generation of multiple sequence variants (“diversified molecules”) from the self-diversifying polynucleotide. While the process of generating diversified molecules from a self-diversifying system may comprise processes like transcription or replication of the self-diversifying molecule, such processes are not necessarily limited to canonical replication or expression of a gene. For example, processing may refer to expression of a RNA transcript of the self-diversifying polynucleotide that may then be reverse transcribed. During the reverse transcription process, the self-diversifying element(s) may dictate a type or frequency of mutation resulting in a population of cDNAs generated. The diversified molecules may comprise such a population of cDNAs or polynucleotide or polypeptides expressed from such cDNAs. In yet other embodiments, diversified molecules may arise when such intermediate molecules, such as the aforementioned cDNAs, are re-incorporated into copies of the original self-diversifying polynucleotide. Thus, in certain example embodiments, diversified molecules may refer to a population of self-diversifying molecules that have gone through a process resulting in incorporation of variable sequences at one or more defined location in the self-diversifying polynucleotide sequence. In such contexts, the self-diversifying element may comprise multiple components, for example, a region that leads to generation of multiple sequence variants and a second component that defines where such sequence variants, once generated, are incorporated back into copies of the original self-diversifying polynucleotide. The systems described herein may comprises homologous engineered systems that incorporate self-diversifying elements arising from different naturally occurring systems or comprise naturally occurring systems that have been further engineered to increase the efficiency of self-diversification or increase the number of self-diversifying elements.

[0044] The systems herein may comprise one or more polynucleotides. As used herein, a polynucleotide may be DNA, RNA, or a hybrid thereof, including without limitation, cDNA, mRNA, genomic DNA, mitochondrial DNA, sgRNA, siRNA, shRNA, miRNA, tRNA, rRNA, snRNA, lncRNA, and synthetic (such as chemically synthesized) DNA or RNA or hybrids thereof. Nucleic acids can include natural nucleotides (such as A, T/U, C, and G), modified nucleotides, analogs of natural nucleotides, such as labeled nucleotides, or any combination thereof. In some examples, the polynucleotides may DNA. In some examples, the polynucleotides may be RNA.

[0045] The diversified molecules may be encoded by one or more open reading frames within the self-diversifying system. In certain cases, the polynucleotide may comprise one or more open reading frames or transcripts thereof. When the polynucleotide comprises multiple open reading frames, the orientations of the open reading frames may be the same.

[0046] The self-diversifying system may further comprise one or more additional open reading frames that encode accessory polynucleotides or polypeptides. An accessory polynucleotide or polypeptide may be a polynucleotide or polypeptide that when expressed is involved in processing or generating sequence variants of the diversified molecules. Example accessory polyproteins include, but are not limited to, reverse transcriptases, phage replisome organizers, histone-family DNA-binding proteins, endonuclease, exonucleases, phosphatases, or functional fragments thereof.

[0047] The self-diversifying system may further encode one or more regulatory elements such as one or more promoters and/or one or more ribosome binding sites that control expression of the one or more diversified molecules and/or one more accessory polynucleotides or polypeptides.

[0048] In some embodiments, the systems and methods allow for generation of diversified molecules with an efficiency at least about 5%, at least about 10%, at least about 20%, at least about 30%, at least about 40%, at least about 50%, at least about 60%, at least about 70%, at least about 80%, at least about 90%, at least about 95%, e.g., as measured by number of diversified molecules in the total number of molecules generated by the self-diversify system.

[0049] In certain example embodiments, the self-diversifying system may be based on one or more systems disclosed in SEQ ID NOs: 98-1699, or fragments of the sequences. That is, self-diversifying systems disclosed herein encompass both engineered variants of the example systems disclosed in SEQ ID NOs: 98-1699, or fragments of the sequences, or engineered variants comprising components combined from one or more example systems disclosed in SEQ ID NOs: 98-1699, or fragments of the sequences.

[0050] In some examples, such systems may be used for generating universal peptides or protein binders that can be quickly adapted for any given protein targets could replace antibody technology. The production of the diversified molecules may be scalable to allow for generating large repertoires of protein binders, with potential to transform biological research and peptide-based therapeutics, such as antibodies and vaccines.

### Diversity Generating Retroelement-Based Systems

[0051] In certain example embodiments, the system may comprise one or more components of a diversity generating retroelement (DGR). In certain example embodiments, the self-diversifying system may comprise one or more open reading frames encoding one or more diversified molecules. The system may further comprise one or more open reading frames encoding an accessory protein. The system may further encode one or more ribosome binding sites. The system may further encode one or more promoters. The diversified molecule and accessory protein open reading frames may be under the control of the same or different open reading frames.

### Variable Regions

[0052] The one or more diversified proteins and/or their coding polypeptide may comprise one or more variable regions or variable repeats (VR). The variable region dictates one or more locations with the diversified molecule where sequence diversity is generated. The sequence diversity may be generated within the variable region, adjacent to the variable region, or both. The polynucleotide may comprise one or more, e.g., 1, 2, 3, 4, 5, 6, 7, 8, 9, 10, or more variable regions.

[0053] The variable region may encode or may be within a coding sequence for a peptide that is capable of binding to another molecule (e.g., proteins, nucleic acids, etc.). Alternatively or additionally, the variable region may encode or may be within a coding sequence for a polynucleotide (e.g., RNA) that is capable of binding to another molecule (e.g., proteins, nucleic acids, etc.).

### Template Region

[0054] The DGR-based system may further comprise a template region or template repeat (TR). The template repeat may dictate the type and frequency of sequence variants generated within a variable region of the diversified molecules. For example, when transcribed, the template molecule (or cDNA variant thereof) may be integrated into the diversified molecule and certain nucleotides within the template region subject to mutagenesis by the incorporation of the random nucleotides across from certain nucleotides within the template molecule. For example, all adenosines (As) in the template molecule may be subject to mutagenesis by incorporation of random nucleotides opposite the A when the template molecule is integrated into the variable region. Likewise, mutagenesis may occur at T, G, or C nucleotides or at certain nucleotide motifs within the template region. This process may be referred to as mutagenic homing.

[0055] The template region may be transcribed into a RNA molecule. The RNA molecule may be reverse transcribed to a population of DNA templates. The reverse transcription may be error prone, e.g., the DNA templates may comprise one or more mutations compared to the original template region. The DNA templates may insert to or replace a sequence the variable region, thus introducing various mutations into the variable region.

[0056] The template region may have certain level of homology with the variable region. The term “homology” can refer to the number of positions with identical nucleotides or amino acids divided by the number of nucleotides or amino acids in the shorter of the two sequences wherein alignment of the two sequences can be determined in accordance with the Wilbur and Lipman algorithm (Wilbur & Lipman, Proc Natl Acad Sci USA 1983; 80:726, incorporated herein by reference). For example, the homology between the template region and the variable region may be at most 90%, at most 80%, at most 70%, at most 60%, at most 50%, at most 40%, at most 30%, or at most 20%. In certain examples, the homology between the template region and the variable region may be at most 80%.

[0057] The template region may comprise one or more adenines. In some cases, the one or more adenines are not found in the variable region. Such adenines may result in mutagenesis or diversification of corresponding positions in the variable region. In certain cases, the template region may comprise one or more insertions of nucleotides (e.g., adenines) compared to the corresponding variable region. In some examples, the template region may comprise at least 1, at least 2, at least 3, at least 4, at least 5, at least 6, at least 7, at least 8, at least 9, at least 10, at least 11, at least 12, at least 13, at least 14, at least 15, at least 16, at least 17, at least 18, at least 19, or at least 20 nucleotides inserted. The insertion of additional nucleotides may maintain the correct reading frame. As a non-limiting example, groups of three nucleotides (including one or more adenines) may be inserted in-frame into the template region to direct the insertion of a variable codon into the variable region.

[0058] In some embodiments, the diversification may be based upon non-adenine substitutions of nucleotides in the template region. For example, a nucleotide in the template region may be substituted with a non-adenine nucleotide such that the substitution is transferred to the corresponding position in variable region. As a non-limiting example, a cytosine (C) to guanine (G) substitution in a template region can be used to result in the same C to G substitution in the variable region. This may be referred to as substitution-mediated diversification.

[0059] In some embodiments, a variable region and a template region are comprised of a polynucleotide. The variable region and the template region may be operably linked. An operable linkage between a variable region and a template may refer to the ability of the template region to serve as the template for directional, site-specific mutagenesis or diversification of the sequence in the variable region. Thus in one example embodiment, a recombinant nucleic acid molecule may comprise a template region and a variable region that are physically attached in cis (in the same molecule such as polynucleotide) such that the template region serves as the template sequence to direct site-specific mutagenesis in the variable region. The separation between the template region and variable region may be of any distance so long as they remain operably linked.

[0060] In certain embodiments, the template region and variable region may not be linked on the same molecule. In such cases, however, the template region may still have the ability to direct site specific mutagenesis of the variable region. Thus the template region and variable region may be operably linked in trans, such that the sequences of each region are present on separate nucleic acid molecules.

[0061] The variable region (when on a polynucleotide) and template region may be physically and operably linked in cis or operably linked in trans. The separation between the two regions when linked in cis can range from about 100 base pairs to about 2000 base pairs, e.g., from about 100 to 300, from about 200 to about 400, from about 300 to about 500, from about 400 to about 600, from about 500 to about 700, from about 600 to about 800, from about 700 to about 900, from about 800 to about 1000, from about 900 to about 1100, from about 1000 to about 1200, from about 1100 to about 1300, from about 1200 to about 1300, from about 1200 to about 1400, from about 1300 to about 1500, from about 1400 to about 1600, from about 1500 to about 1700, from about 1600 to about 1800, from about 1700 to about 1900, or from about 1800 to about 2000 base pairs.

### Regulatory Sequences

[0062] The polynucleotide may further comprise one or more regulatory sequences. In some cases, the regulatory sequences may direct the expression of the nucleic acids in specific types. The term “operably linked” as used herein refers to linkage of a regulatory sequence to from a DNA sequence such that the regulatory sequence regulates the mediates transcription of the DNA sequence. Regulatory sequences include transcription control sequences, e.g., sequences which control the initiation, elongation and termination of transcription. In some cases, regulatory sequences include those control transcriptions. Examples of such regulatory sequences include promoters, enhancers, operators, repressor, transcription terminator sequences.

[0063] The variable region (or the gene overlapping or including the variable region sequence), the template region, and the coding sequence for reverse transcriptase may be operably linked to the same regulatory sequence (e.g., promoter). Alternatively or additionally, the variable region (or the gene overlapping or including the variable region sequence), the template region, and the coding sequence for reverse transcriptase may be operably linked to different regulatory sequences. In some cases, the variable region (or the gene overlapping or including the variable region sequence) and the template region are operably linked to the same regulatory sequence; and the encoding sequence for reverse transcriptase is operably linked to a different regulatory sequence. In some cases, the template region and the coding sequence for reverse transcriptase are operably linked to the same regulatory sequence; and the variable region (or the gene overlapping or including the variable region sequence) is operably linked to a different regulatory sequence.

### Promoters

[0064] In some examples, the regulatory sequences are promoters. The promoter may be suitable for expressing the component(s) in the systems, e.g., the variable region, the template region, and/or the reverse transcriptase in desired cells. A promoter refers to a nucleic acid sequence that directs the transcription of a operably linked sequence into mRNA. The promoter or promoter region may provide a recognition site for RNA polymerase and the other factors necessary for proper initiation of transcription when a sequence operably linked to a promoter is controlled or driven by the promoter. A promoter may include at least the Core promoter, e.g., a sequence for initiating transcription. The promoter may further at least the Proximal promoter, e.g., a proximal sequence upstream of the gene that tends to contain primary regulatory elements. The promoter may also include the Distal promoter, e.g., the distal sequence upstream of the gene that may contain additional regulatory elements. In some cases, the promoter may be a heterologous promoter, e.g., promoting expression of nucleic acids or proteins in cells that do not normally make the nucleic acids or proteins.

[0065] The promoters may be from about 50 to about 2000 base pairs (bp), from about 100 to about 1000, from about 50 to about 150, from about 100 to about 200, from about 150 to about 250, from about 200 to about 300, from about 250 to about 350, from about 300 to about 400, from about 350 to about 450, from about 400 to about 500, from about 450 to about 550, from about 500 to about 600, from about 550 to about 650, from about 600 to about 700, from about 650 to about 750, from about 700 to about 800, from about 750 to about 850, from about 800 to about 900, from about 850 to about 950, from about 900 to about 1000, from about 950 to about 1050, from about 1000 to about 1100 in length.

[0066] The promoters may include sequences that bind to regulatory proteins. In some examples, the regulatory sequences may be sequences that bind to transcription activators. In certain examples, the regulatory sequences may be sequences that bind to transcription repressors.

[0067] In some cases, the promoter may be a constitutive promoter, e.g., U6 and H1 promoters, retroviral Rous sarcoma virus (RSV) LTR promoter, cytomegalovirus (CMV) promoter, SV40 promoter, dihydrofolate reductase promoter, (3-actin promoter, phosphoglycerol kinase (PGK) promoter, ubiquitin C, U5 snRNA, U7 snRNA, tRNA promoters or EF1α promoter. In certain cases, the promoter may be a tissue-specific promoter may direct expression primarily in a desired tissue of interest, such as muscle, neuron, bone, skin, blood, specific organs (e.g., liver, pancreas), or particular cell types (e.g. lymphocytes). Examples of tissue-specific promoters include Ick, myogenin, or thy1 promoters. In some embodiments, the promoter may direct expression in a temporal-dependent manner, such as in a cell-cycle dependent or developmental stage-dependent manner, which may or may not also be tissue or cell-type specific.

[0068] In some cases, the promoters may be inducible promoters. The term “inducible promoter”, as used herein, refers to a promoter that, in the absence of an inducer (such as a chemical and/or biological agent), does not direct expression, or directs low levels of expression of an operably linked gene (including cDNA), and, in response to an inducer, its ability to direct expression is enhanced. Examples of inducible promoters include, promoters that respond to heavy metals, to thermal shocks, to hormones, promoters that respond to chemical agents, such as glucose, lactose, galactose or antibiotic (e.g., tetracycline or doxycycline). Examples of inducible promoters also include Drug-inducible promoters, for example tetracycline/doxycycline inducible promoters, tamoxifen-inducible promoters, as well as promoters that depend on a recombination event in order to be active, for example the cre-mediated recombination of loxP sites. Examples of inducible promoters further include physically-inducible promoters, e.g., particular a temperature-inducible promoter or a light-inducible promoter.

[0069] The promoter may be suitable for expressing the component(s) in the systems, In desired types of cells. In some cases, the promoters are for expressing the component(s) in prokaryotic cells. Examples of such promoters include filamentous haemagglutinin promoter (fhaP), lac promoter, tac promoter, trc promoter, phoA promoter, lacUV5 promoter, and the araBAD promoter. In some cases, the promoters are for expressing the component(s) in eukaryotic cells. Examples of such promoters include the cytomegalovirus (CMV) promoter, human elongation factor-1E promoter, human ubiquitin C (UbC) promoter, and SV40 early promoter. In some examples, the promoters are for expressing the component(s) in yeasts. Examples of such promoters include Gal 11 promoter and Gal 1 promoter. In some cases, the promoters may be used for expressing the components in a cell-free system. In such cases, the promoters may be selected based upon the source of the cellular transcription components, such as RNA polymerase, that are used.

### Ribosome Binding Sites

[0070] The polynucleotide may comprise one or more ribosome binding sites or sequences encoding one or more ribosome binding sites. A ribosome binding site may be a nucleotide sequence to which the ribosome binds upon the transcribed ribonucleic acid. For example, a ribosome binding site may be the sequence of mRNA at which assembly of the 30S and 50S subunits of the ribosome takes place to initiate translation of an encoded protein. A ribosome binding site may extend from the −20 to the +13 position with respect to the +1 position of the first nucleotide of the initiation codon. The ribosome binding site may comprise a Shine-Dalgarno (SD) sequence. The SD element may act by base pairing with an anti-SD sequence (5′-CCUCCUUA-3′) near the 3′ end of the 16S rRNA. The ribosome binding site may be a prokaryotic (e.g., E. coli) ribosome binding site.

[0071] In cases where the polynucleotide comprises a gene with multiple open reading frames, ribosome binding sites may be added in front of one or more (e.g., all) of the open reading frames. In certain cases, the orientations of the open reading frames are identical.

### Initiation of Mutagenic Homing

[0072] The polynucleotides may comprise one or more initiation of mutagenic homing (IMI-1) sequences or functional analog thereof. An IMH sequence may functions in determining the direction of the template region to variable region transfer of sequence information. An IMH sequence may also support the use of the corresponding template region IMH-like sequence at the 3′ end of the template region to prevent corruption of template region while the IMH directs variability to variable region. Furthermore, in variable region, the 5′ boundary of information transfer may be established by the extent of homology between variable region and template region.

[0073] The polynucleotides may contain an IMH sequence located at the 3′ end of the variable region and an IMH-like sequence at the end of the template region. Alternatively, the polynucleotides may contain an IMH sequence at the end of both the variable region and the template region such that the sequence of the template region may also vary to result in a highly efficient generating system.

[0074] In embodiments wherein a sequence of interest (or “desired variable region”) to be diversified is not operably linked to the necessary template region, an IMH sequence may be operably located at the 3′ of the desired variable region followed by operable linkage to an appropriate template region with its IMH-like 3′-region. A non-limiting example of such a system is seen in the case of a desired variable region which is all or part of a genomic sequence of a cell wherein insertion of an appropriate IMH and introduction of a template region containing construct with the appropriate corresponding IMH-like region, optionally with a cis linked reverse transcriptase coding sequence, is used to diversify the desired variable region. The template region may simply be a direct repeat of the desired variable region sequence to be diversified or mutagenized via the adenines present in the template region.

[0075] In certain systems may engineered to modify the placement of the IMH to direct mutagenic homing to occur at a different position than that dictate by a naturally occurring diversity element. Likewise, the position, size, or sequence composition of the diversity element may be engineered to increase or decrease the rate of mutagenic homing. In certain example embodiments, the diversity generating element is a hairpin loop. In certain example embodiments the hairpin loop is a GC-rich hairpin loop. In certain example embodiments, the DGR-based systems comprise two or more diversity generating elements.

[0076] Examples of IMH sequences include those described in Miller J F et al., US20100041033A1, which is incorporated by reference herein in its entirety.

### Reverse Transcriptases

[0077] The systems herein may further comprise a reverse transcriptase or a coding polynucleotide thereof. A reverse transcriptase refers to an enzyme capable of synthesizing DNA strand (that is, complementary DNA or cDNA) using RNA as a template. In some cases, the reverse transcriptase may have low proof-reading ability. For example, the reverse transcriptase may introduce one or more errors (i.e., nucleotides that are not complementary to the corresponding nucleotides on the template). Examples of reverse transcriptases include the transcriptases from Vibrio harveyi ML phage, Bifidobacterium longum, Bacteroides thetaiotaonicron, Treponema denticola, cyanobacteria, such as Trichodesmium erythrism, the genus Nostoc, or Nostoc punctiforme.

[0078] As used herein, reverse transcriptase may full-length reverse transcriptase or a functional fragment thereof. A functional fragment of a full-length reverse transcriptase may be a polypeptide that is shorter than the full-length reverse transcriptase but has reverse transcriptase activity. For example, a functional fragment of a full-length reverse transcriptase may have at least 50%, at least 60%, at least 70, % at least 80%, at least 90%, at least 95%, at least 99%, or at least 100% of the activity of the corresponding reverse transcriptase. The reverse transcriptase activity may be measured as amount of cDNA generated with certain amount of RNA template.

[0079] In some cases, the system may comprise a polynucleotide encoding the reverse transcriptase. In certain examples, the polynucleotide comprising the variable region and/or the template region may comprise a coding sequence for the reverse transcriptase. In some examples, the polynucleotide encoding the reverse transcriptase may be different from the polynucleotide comprising the variable region and/or the template region.

[0080] When associated via a cis or trans configuration, expression of the template region and operably linked reverse transcriptase region coding sequence may be under the control of an endogenous or heterologous promoters. When associated in trans, expression of the template region and operably linked reverse transcriptase coding sequences may be under the control of an endogenous or heterologous, regulatable promoter(s).

[0081] An example DGR system is shown in FIGS. 10 and 16 and further engineered variants thereof shown in FIG. 17.

### Non-DGR-Based Systems

[0082] In certain example embodiments, the self-diversifying system may be a non-DGR systems. A non-DGR system may comprise elements capable of generating sequence variants, but does not rely on the general structure and element of DGR systems described above. For example, a non-DGR system may comprise one or more self-diversifying elements (e.g. a variable region) but do not comprise a template region or reverse transcriptase. Example non-DGR systems are provided below.

TABLE 1

| | |
|---|---|
| Non-DGR 25 | 1 GGAGTTATTT CCGGGAACGA CAAACAACCG GAACCCTGAA AAGTAAGAAT CGCATTCAAA |
| (SEQ ID NO: 1) | 61 CTACTTCTAT ATACATGAGC AGTCCCTAAA TTCCCACTCT GCTGCAAATC AACAGCCACT |
| | 121 TGTTTCATAA ACGAAGTAAA ACTTTCCTTT TTCATTAAAA AATAATTTAA TAATTAATAT |
| | 181 TTACTAATNN CACAATTTAC TTTAGTAAAA tACGAAAATA TATATACAAA GATTTACATA |
| | 241 TATAAAATTA TAATATTAAA AACTGAAATA TTCACATTAT CTATCAAATT TATTTTTATA |
| | 301 CATTTGCGCA GTTTTTTAAA CAAATAATCA TTTTAATTAC TAAAAAACAA CAAAGTTATG |
| | 361 AACAACAATG AACCAGCTGC CGAACACTAC AGCATCAATG GATTCAAGTA TTTCTCCGAG |
| | 421 TTGGCGAAAG AATATTTTCC AGATCTGGCA AACGCCTCTT CCGCCAGCAA AAAAATGCGC |
| | 481 AAACGCATCA AAGCAGACAA GACGTTGAAC GAACAACTGG CTGCCGCGTA TTACACCTGC |
| | 541 CAAACAATCG ACATCAGTCC CGAAATGCAA CTAATCCTTT ACCGCCATTG GGGACCTCCC |
| | 601 CACATCGACC TGCCGACCAA CGTTTAATTA CGTAGTAGAA AACGAAAACA TCGACAAGGA |
| | 661 ATAAAAAGAA AATCGAACTA TATATTTTTA AATATATCAT TTATCTTTTT ATTGTTTATT |
| | 721 ATGTATTCCA CTTTGCGTTC ACCACTTTTT TCGGAAAAGA AGATAACTAT CATTTATACA |
| | 781 GCTATTTACA GAAAgAAAAA AGCGTTCCAC AAAGCGTTCG GCAAAATGAC CGTTTTTTTC |
| | 841 ATTCCAAACA GAGCCTCCGA ATCCTCCCAA CGAAGGCTCT GTTTATCTCC GGCAGAAGtT |
| | 901 CTATCAAACA CAAACAGAGC ATCCGTTTCA TCTCCTGATC GCTTCTTCGC CCCATGAAAG |
| | 961 AAAACAAAAA TACAACAACT TACGTACCAC AACTATTCTT CTTCGTCCAC ACCCGTCCAC |
| | 1021 AAACAGACAC ACCCCTTGCA AACCGCACGG GAATAGCGTA CTTTTACAGA AAATTTAAAT |
| | 1081 AACACTCAAT GAAAAATTTC AATTTTCAAG CCATGCTGAA ACATGGTTTT CTCATTATCC |
| | 1141 CTAAAGCCTT ACTACAGCAG CAGATAGAAG ACCGNCACAT GCAAGAAGGA GAAATAGAAG |
| | 1201 CTCTCCTGAA AATTCTGATG AAGGTCAATT ATTCGGATAC ACTCTACAAC GACCGTCAAA |
| | 1261 ATAAAAACTG CCTGTGTAAA AGAGGCGAAA GCCTGTTTAG TTATCGCGAC TGGAGCCACA |
| | 1321 TCTTCCACTG GTCTGTCGGA AAAGCCTTCA GGTTCATACA CGAGCTTGCC ACGCTGGGAA |
| | 1381 TTATAGAAAT CATCTCTCAC CCCAACAATT CCTCCCTGCA TATTCGTGTC GTCGAATACG |
| | 1441 ATAAATGGAT GGGAGTTCCC GATAGCGACA AGCAGAAAAA GAAAGCCGTC AACGAAAAGT |
| | 1501 TTCACCTGTT CTGGAATGAA TTCCACAGCA TCACACAGCT CCCCAAAGAG AATATCGCCA |
| | 1561 AAGCACAACG CGAATGGAAA AAGTTGGGCG ACAAGGAACA GCAACTCGCC ATCGACAGGA |
| | 1621 TAGAGGAATA TTATTTCCAC CAAACGAACA TCAATTTCCT TCTCCATGCC GCCAGCTATT |
| | 1681 TATCCAACAA AGCTTTTCTT AACGAATACT GATAATATGA ATACCGAAAA CAGAGTTTCG |
| | 1741 CCACAGGCTC CCGAAATAGA AGAAGCTATC ATCGGCGCCT GCCTGATAGA ACAGGGAGCC |
| | 1801 ATACCACTGG TAGCCGACAA GCTGCGTCCC GAAATGTTCT ACGTCCTGCG CCATCAGGTT |
| | 1861 ATCTATGCCG CCATACTGGC CATGTATCAT GCAGGAATAA AGATAGACAT CCTCACCGTA |
| | 1921 AAAGAAGAGC TTTCCCACCG TgGAAAGCTC GAAGAGGCGG GcGGacCGtt CGGcaTCaCC |
| | 1981 CaatTgAgcA gCaAgGtGGc aacCtCCgCC CatNtTGAAT ATCATGCGCA GATCGTACAC |
| | 2041 GAGAAATACC TGCGACGCGA AATGATTCTG GGGTTCAACA AACTCCTCGC CTGTTCGCTA |
| | 2101 GACGAAACGA TGGATATTGA CGACTCACTG GTAGACGCGC ATAAcCTGCT CGACCGTCTG |
| | 2161 GAAGGCGAAT TCGGCCATAA CAACCACATG CGCGACATGG ATGAACTAAT GACCGCCACC |
| | 2221 ATGGTAGAAG CCGAAGGACG TATCGCCAAC AACAAAAACG GAGTAACCGg CCTCCCTACC |
| | 2281 GGACTGGCGG ATCTGGACCG CATgACGTCC GGACTACAGA AAGGCGAGTT GGTGGTGGTC |
| | 2341 GCCGCCCGTC CCGGCGTAGG AAAAACGGCA TTCGCACTAC ACATGGCACG AAGCGCAGCA |
| | 2401 ATGGCAGGGT ATGCCGTAGC TGTCTACAGC CTCGAGATGC AAGGGGAACG ACTAGCAGAC |
| | 2461 CGATGGCTGA CAGCGGTCAG CGAAATCAGC GCCCGCCATT GGCGATCGGG AACCGTCAGC |
| | 2521 CAACAGGAAC TCGTAGAGGC ACGCACAACA GCCGCTGACC TCAAACGCCT GCCGATACAC |
| | 2581 GTAGACGACA GCACATCGGT CAACATGGAA CATATACGTT CCAGCGCGCG ACTGCTGCAA |
| | 2641 AGCCAACATG CGTGCGATGC TATTATTATC GACTACCTGC AACTCTGCGA CATGACGACC |
| | 2701 GGTCAAAACA ACCGCAACCG CGAACAGGAA GTGGCACAAG CNACCCGCAA GGCAAAATTG |
| | 2761 CTAGCCAAAG AACTGAATGT ACCAGTCGTA CTGCTTAGCC AGCTAAACCG CGAATCGGAA |
| | 2821 AACCGCCCTG CCGGCCGTCC CGAACTGGCT CATCTCCGCG AGAGCGGAGC TATTGAACAG |
| | 2881 GATGCAGACG TCGTCATGCT GCTCTACCGT CCCGCCCTTG CAAGGGTGAC GACCGACCGG |
| | 2941 GAAAGTGGTT ATCCCACCGA AGGTCTGGGA GTAGTCATCA TAGCCAAGCA ACGCAACGGA |
| | 3001 GAGACAGGAA ACGTCTATTT CAGACATAAT CCGGAAATGA CCAAGATCAC CGAATATGTC |
| | 3061 CCTCCGTTAG AGTATATGCT GAAACATGCC AAATAAGAAA CAGTTACACT AATAATATAC |
| | 3121 AATTTTATAT TACAACATAT AGCATAAATC ATTTTCTCAT TTTATTTCAT TATACATACA |
| | 3181 ANATATATAG CAAAACACTT GACTTTCCCT CTCATATTTC GTATATTTGT AATGTCGTAA |
| | 3241 GGACAGAGAA AATTTTATTA CTTAAACCTT AACTTTTTAT TGTATGAATG TATTAGTGGA |
| | 3301 GCGCTATCAG CGCAGAAAGT ATGTGAATCA ACCGGATTCA CAGATGTTGT ATTATGTACG |
| | 3361 CCAGAAATCG GGCACAGTGA GAGTGATGGA CATCAACAAG CTGGCGGATG CCATCGAAGC |
| | 3421 GAACTCCTCG CTCACTGCAG GAGACGTGAA GCATGCCATT GAGGCTTTTG TCGAGCAGTT |
| | 3481 ACGCCTATCG CTTACCCAGG GCGACAAGGT GAAGGTTGAC GGATTGGGTA CGTTTCATAT |
| | 3541 CACATTGAGC AGCGAGGGGG CAGAAAAAGA GAAAGATTGC ACGGTGCGCA GCATCCGCAA |
| | 3601 AGTAAATGTC CGTTTCGTGG CGGACAAGGC GCTTCAATTG GTAAATACGA GCCATGCCAC |
| | 3661 TACCCGAGGC GAAAATAATG TCGATTTTAT CCTGgCAGCA AAGGGCGACG GAGAAGGTGA |
| | 3721 CGATGACGGA AATAGCGGNA GCGGTGGAAA CAGCGGCGGA AGCGGAGAAG CTCCGGACCC |
| | 3781 GGCAGCTTAA TCTTTAAAAC AGCGCCGCAT GGATATTACG GAGTGATTTC TACAGTTACT |
| | 3841 CTCNATGCGG TTTCTGTTTT CTTCTACATT TATTTTTTAA TTCTCAATTT TCAATCCTCA |
| | 3901 ATTTATTAAA ATGCTTGATA AAATCATAGA GATCATTATA ACGATCCTGC CCTTTCTGGG |
| | 3961 CAGTAACCGC AAAAAGCGCA AAGTAATGGC GCAAGAAGTA |
| Non-DGR 1057 | 1 TACGCCGGGC CGTCTGGGAA ACTACATGGA TGACGAAGGC AAGGAAGAGG CAGGCCCCGC |
| (SEQ ID NO: 2) | 61 TGCCGGCGCG GCAGGAAACG CAGCGGGCGG GAACAGCCAG CCCGAGCGTA TCATCGCCCT |
| | 121 CCTTGGCGGA CGGGAGAACA TTGAATTTGT GGACGCCTGC ATGACCAGGC TCCGCGTGAC |
| | 181 AGTGAAGGAT CTCTCCAAGG TGGCTGAACT TCCGGCGTGG AAGGCAGAGG GCGCCATGGG |
| | 241 CCTTGTGAAG AAAGACAACG GCATCCAGGC AATTTACGGA CCCAAGGCGG ACGTGCTGAA |
| | 301 ATCGGATATC AAcGATATCC TGTAACAATT CAGCACCCCG GAAAAAATGA GTGAAATaTG |
| | 361 aaCGGGGAGC CTGCTCACCG GGCAGATTTT GCTCAATAcG CAGAGGAAAG AACTATGAGA |
| | 421 CTGCTTACTA TCAATATTCA CAGCCATGGA AGTGACTTTG AACCGGAACT TTATCATCAG |
| | 481 AAGATGAAGG CGCTGGCGGC ATTTATGAAG GAAGAAGAGA TCGATGCCGC GGCGATCCAG |
| | 541 GAATGCAGTG AAGAGGAGGA CAGGCCGGTG GTCTCCGGCC CCCTCCCCAT GCATTGGGTG |
| | 601 CCGGCCGGAC CGGACTCCCG CGTCCGGGAG GATAACTGTG CGCTGGTCCT GGCGGAGGAA |
| | 661 CTTCAGGGCC TGCAGCAGGA GTACTGGTGG ACCTGGACCG GAGCGAAGCT CGGGTACGGA |
| | 721 AAATACAATG AGGGTCTGGC CATCTTCAGC CGCCGCCCTG TTACAGGCGC GGACAGTTTC |
| | 781 TATATTTCCG GCGTCCGGGA CTTCTCCAAC TGGAAGACCC GGAAGGCGCT GGCGGCCTGC |
| | 841 ACCGCTGACG GGCCTGCCTT TTTGAGCGTC CACATGGGAT GGTGGAATGA TCCGGAGGAA |
| | 901 AACTTCCGGG GGCAGATGGA ACGGCTGCAG AAGGCGCTCC GCGAAAGGAA GCTTCGTCCG |
| | 961 CAGGACGGTT CTGACAGTTT CCTTATGGGA GATTTCAACA GTCCCGCAGC GATCCGCGGA |
| | 1021 GAGGGAAGGG ACATGGTCCT GGACCTCGGG TGGCGGGACA GTTATGAGGA TGCCGAAATA |
| | 1081 AAAGACAGCG GCATCACCGT TCCGGGAAAC ATCGACGGAT GGAGGGACGG TGAACATACG |
| | 1141 GGCATGCGCC TgGATTATAT CTGGACCGCA AAAAGGCACA GGGTGCTTCA GTCAAAGGTG |
| | 1201 GTCCTGAACG GGATCAGCGG GCCGGTGCTT TCCGACCATT TCGGAGTCCT GGCGGTGATC |
| | 1261 GAATGAATAA AGGAGCAGAC AGCATGAGAG AAAGTGGAAT TCTTCTTGCC ATCAGCAGCC |
| | 1321 TTCCTTCCGA ATACGGGATC GGCTGCTTCA GCAGGGAAGC ATATGAGTTT GCGGACCGCC |
| | 1381 TTTCAGAGGC GGGCCAGAGT TACTGGCAGA TCCTGCCGCT GGGGCCGGTG GGATACGGAG |
| | 1441 ATTCACCGTA CCAGTCCTTC TCCACCTTCG CGGGCAACCC TTACTACATT TCACCTGAGA |
| | 1501 CGCTGGTGGA AAAGGGATGG ATCACTGAGG CGGACTGCCG CGAAGCCGGC CTTTCTTCCG |
| | 1561 ACCCGCGCGG TGTGGATTAC GTGCTGCAGT ACCAACGCCG CTATGAGCTG CTCCGGAAGG |
| | 1621 CGTACAGAAA CAGCCGgATc GAAGAGAATG AGAAGTTCCG GGCGTTCACG GAGAAGACGG |
| | 1681 AATGGCTTCC GGACTACGCG CTGTTCATGG CTCTGAAGGA AGAGAACGGA GGAAGGCCCT |
| | 1741 GGTACGAATG GGAAGATCCG CTGAGACTCA GGGATCCGGA AGCCTTGGCC GCGGCGCGGG |
| | 1801 AACGCCTGGA GGAAGGCATC GGTTTCTGCA GTTTCCTGCA GTTTGAGTTT TaCGAAGAGT |
| | 1861 GGATGCAGCT GAAGGACTAC GTGAACCGGA AGGGAATACG GATCATCGGA GACATCCCGA |
| | 1921 TCTATGTAtC CCTGGACAGT TCAGACGTCT GGGCGGATCC GGAaCTTttC CNGCTGGAtG |
| | 1981 AAAaCCGCCG ACAGaCCGCG GCGGCGGGct GcCCgCCgga tGGcttCagc GCtGtGGGac |
| | 2041 aGctctgGGG caaCCCaCTC TATGACTGGG ACTATCACAA AAAGACCTGT TTTGCCTGGT |
| | 2101 GGCTGAAACG TCTTAAAAAC TGCTTTGATA TTTATGATGT GATGCGGATC GACCATTTCC |
| | 2161 GCGGCTTCGA TGAATATTTT TCCATTCCTG CCGGTGCGGA GGACGCAAGA GCAGGCCATT |
| | 2221 GGGAGAAGGG ACCCGGCATG GATCTGTTCC GGAAGGTCTC GGAAGCCTTc CCGGGACGGG |
| | 2281 AGATCATCGC GGAGGATCTG GGGTATGTGA CGGACAGTGT CCGGCAGCTG GTGAAGGACA |
| | 2341 GCGGCTATCC CGGGATGAAG GTCCTGGAAT TTGCCTTTGA CTCAAGAGAT TCCGGCTGTG |
| | 2401 CGGAGGATTA CCTTCCCCAC AATTACGAAA AGAACAGTGT GGTCTACACC GGCACCCATG |
| | 2461 ACAACGAGAC GGTGACCGGC TGGTTTTCCG AGGGCCTGAA GCCGGAGGAG AAGGAGGCAG |
| | 2521 TCAGAGACTA TTTCTGCGAC CATACGACTC CCGACGCCGG GATGCACATA CCCCTGATCT |
| | 2581 GCGCCGCCAT GCGAAGCGTC AGCAGACTCT GCATCATcCC CATGCAGGAC CTTCTGGGGT |
| | 2641 ACGGAAACGA GGCAAGGATG AACGCTCCTT CCACCTACGG AAACAACTGG AAATGGCGTC |
| | 2701 TTCTGAAGGA TGAATTCGGA GAGAAGGAAG TGAAGACGCT GTATGAgATC ACGAAGCGGT |
| | 2761 ACGGAAGGAT CGGAAAATGA GAAAAGAGGA NNGNNNNTNN NNNAANNGNN NNNTACCNNN |
| | 2821 NNNNAGNNCA NTNANNNNNT NNNNNNNTNN TTANNNCNNN NCANNGNAAT NATCNNNNNN |
| | 2881 NNNNNNNNNT NTNNNNNNNN NNNNNNNNNN NNNNNNNNNN NCNNNGNTGT NATNNNNNNN |
| | 2941 NtNNNNNNCN NNaNCNgNNN tNNGNTNtNN TNNNNNNNNN aNNNtNNNNc NNNagtaNNN |
| | 3001 NNNNcNcNtN NNaaNNNNNN NNNaNNNNNN tNNNNNNNNN NNNNNNNNaN NaNaNNNcNa |
| | 3061 aNNNNtNNcN tcgNNNNNNt gNNNNNNNaa tNNgNNNtNN NtNNNNNNNc NNNtNaaNNN |
| | 3121 NNtNNttcNN NNNNNNNNNN NNNNNNgNNN NNNNNgNtNa NNNNaaNNNt NtNNaaNNaN |
| | 3181 gNNNNaNNNN aNNNNNgNNa NNNNNNNNNN NNNNtNNNNN NNNNaNNNNN NNNNNaNNNN |
| | 3241 NNNNNNgNNN NNNNNaNNNN NNNNNNNNNN NNNNNNNNNN NNNNNNNNNN NNNNNNNNNN |
| | 3301 NNNNNNNNNN NNNNNNNNNN NNNNNNNNNN NNNNNNNNNN NNNNNNNNNN gNNNNaNNNN |
| | 3361 NNNNNNNNNN NNNNNtNNNN tNtNNNNtNN NNNNNNNcNN NNNNNttNtt NNNNNgcNNN |
| | 3421 NNNNNNaNNN NNNNNgNNNN NNNNNNNNNN NNNNNNNNNN NNNNNNNNNa NNNNNNNNNN |
| | 3481 NNgNNNNNNN NNNNNNagNN NcNNNNNNNN NNNNcNNNcN NNtNNNNNNa NtaNNNNNNN |
| | 3541 NNNNNNNNNN NNNNNNNNNN NNNNNNNNNN NNNNNgNNNc NNNNNNNNNt NNNaNNNNNc |
| | 3601 NNNNNNNNcN NNNNcNNcNN NNNNNcNNNN NNNNaNNaNN NcNNNNNNNN NNNNNNNNNN |
| | 3661 NNNNNNNNNN tNtNtNNNNN NNNNNNNNNN NNNNNNNNgN NNNNNNNNgN NNNNNNNNaN |
| | 3721 gNNNNNNNNN NNNNNNNNNN NNNNNNNNNN NNNNNNNNNN tNNNNNNNNN NNNNNNNNNN |
| | 3781 NNNNNNNaNa NNNNNNNNNN NNNNNNNNNN NNNNNNNNNN NNNaNNNNNN NNNNNNNNNN |
| | 3841 NNgNNNNNNN NNNNNNNNNN NNNcNNNNNN NNNNNNNNNN NNNNNNNNNN NNNNNNNNNN |
| | 3901 NNNNNNNNNN NNNNNNaNNN NNNNNNNNNN NNNNNNNNNN NNNNNNNNNN NNNNtNNNNN |
| | 3961 NNNNNNNNNN NNNNNNNNNN NNNNNNgNNN NNNNNNNNNN |

### Vectors

[0083] The systems may comprise one or more vectors for delivering the components (e.g., polynucleotides) into cells. For example, the polynucleotides in the systems may be on a vector. A vector refers to a nucleic acid molecule capable of transporting another nucleic acid to which it has been linked. A vector may be a replicon, such as a plasmid, phage, or cosmid, into which another DNA segment may be inserted so as to bring about the replication of the inserted segment. Generally, a vector is capable of replication when associated with the proper control elements. Examples of vectors include nucleic acid molecules that are single-stranded, double-stranded, or partially double-stranded; nucleic acid molecules that comprise one or more free ends, no free ends (e.g. circular); nucleic acid molecules that comprise DNA, RNA, or both; and other varieties of polynucleotides known in the art. A vector may be a plasmid, e.g., a circular double stranded DNA loop into which additional DNA segments can be inserted, such as by standard molecular cloning techniques.

[0084] Certain vectors may be capable of directing the expression of genes to which they are operatively-linked. Such vectors are referred to herein as “expression vectors.” Common expression vectors of utility in recombinant DNA techniques are often in the form of plasmids. A vector may be a recombinant expression vector that comprises a nucleic acid of the invention in a form suitable for expression of the nucleic acid in a host cell, which means that the recombinant expression vectors include one or more regulatory elements, which may be selected on the basis of the host cells to be used for expression, that is operatively-linked to the nucleic acid sequence to be expressed. As used herein, “operably linked” is intended to mean that the nucleotide sequence of interest is linked to the regulatory element(s) in a manner that allows for expression of the nucleotide sequence (e.g. in an in vitro transcription/translation system or in a host cell when the vector is introduced into the host cell).

[0085] A vector may be a viral vector, wherein virally-derived DNA or RNA sequences are present in the vector for packaging into a virus. Viral vectors also include polynucleotides carried by a virus for transfection into a host cell. Certain vectors are capable of autonomous replication in a host cell into which they are introduced (e.g. bacterial vectors having a bacterial origin of replication and episomal mammalian vectors). Other vectors (e.g., non-episomal mammalian vectors) are integrated into the genome of a host cell upon introduction into the host cell, and thereby are replicated along with the host genome.

[0086] In some embodiments, the polynucleotide herein may be a part of a vector or a pair of vectors that is/are introduced into cells for inducing diversification (e.g., site-specific mutagenesis) of the variable region and/or support replication of the molecules. Non-limiting examples of vectors include plasmids and virus based vectors, including vectors for phage display that may be used to express a diversified variable region sequence. Other non-limiting embodiments are vectors containing variable sequences that have been subjected to the methods of the instant invention and then removed from an operably linked template region, including by preventing the expression of template regions, so as to produce without further diversification quantities of the variable region-encoded protein for uses including as a diagnostic, prognostic, or therapeutic product.

### Methods of Generating Libraries of Diversified Molecules

[0087] Provided herein include methods of generating libraries of diversified molecules. In general, the methods comprise introducing one or more components of the system herein in cells, wherein diversified molecules are generated. In some embodiments, a polynucleotide comprising a variable region and a template region is introduced in cells. An RNA molecule may be transcribed from the template region. The RNA molecule may then be reverse transcribed into a population of cDNA molecules. The reverse transcription may be error prone, i.e., the cDNA molecules may comprise one or more mutations compared to the template region in the polynucleotide. Due to the homology between the template region and the variable region, the cDNA molecules may insert to and/or replace a target sequence of the variable region (e.g., the entire variable region). Thus, the mutations in the cDNA molecules may be introduced into the variable region. In some examples, the variable region is within a gene. The gene may be expressed to generate a population of nucleic acids or proteins that carry the mutations. The libraries of diversified molecules may comprise such nucleic acids or proteins with the mutations. The diversified molecules may be proteins or polypeptides. The diversified molecules may be antibodies or fragments thereof. The diversified may be antigens or fragments thereof. The diversified molecules may be nucleic acids or polynucleotides, e.g., DNA, RNA, a hybrid thereof

[0088] The systems and the methods herein may allow for generating libraries of diversified molecules with high efficiency. The efficiency refers to number of diversified molecules generated relative in the total number of molecules generated by a given self-diversifying system. In some embodiments, the efficiency of diversified molecules generation is at least at least 5%, at least 10%, at least 20%, at least 30%, at least 40%, at least 50%, at least 60%, at least 70%, at least 80%, at least 90%, or at least 95%.

[0089] A library (“population”) of diversified molecules may comprise a plurality of unique sequence variants. For example, a library of diversified molecules may comprise at least 1×10⁸, at least 2×10⁸, at least 4×10⁸, at least 6×10⁸, at least 8×10⁸, at least 1×10⁹, at least 2×10⁹, at least 4×10⁹, at least 6×10⁹, at least 8×10¹⁹, at least 1×10¹¹, at least 2×10¹¹, at least 4×10¹¹, at least 6×10¹¹, at least 8×10¹¹, at least 1×10¹², at least 2×10¹², at least 4×10¹², at least 6×10¹², at least 8×10¹², at least 1×10¹³, at least 2×10¹³ at least 4×10¹³ at least 6×10¹³ at least 8×10¹³ or at least 1×10¹⁴ different molecules.

### Diversified Molecules

[0090] Embodiments disclosed herein further encompass diversified molecules generated using the self-diversifying systems disclosed herein. In certain example embodiments, the diversified molecule is a polynucleotide-binding protein or a polypeptide-binding protein. Such proteins may be engineered to bind target polynucleotides in a sequence specific manner.

[0091] The variable region may be within an open reading frame of the gene. In some examples, the sequence may encode DIV1 or DIV18.

[0092] Examples of DIV1 and DIV18 are proteins in Table 2 below (SEQ ID NO: 3 and SEQ ID NO: 4).

TABLE 2

| | |
|---|---|
| DIV1 | MKKQSNQTVRMATPGQIKDVISAVVESIPVNNLTYEMAQYF |
| | IGRKKWLGTEMKKIFSVDNSHADLIADWQAFYCGLGIDCDL |
| | SGVIIPDDPGGFGRVIIMAQGITPQSGYDLCAKFFPCWKYT |
| | DKNLDEVVVSERTAKDVYAIRVRDRVEADEELRNRSYNDLK |
| | RQGIIGITLEEREIFELKFFKETAGKHLDIKNWTFCLGSCY |
| | DGGNVPSASWRSGEFEVDWCNPGDVFDDLCSRQAVS |
| DIV18 | MRTFEITEKEVAAAFREAESGEAKKILAALFCKEEMVKPTL |
| | DDYKTIRTYEDACKALGEPIFEDPNNLPNHIIALMKLETIS |
| | RALWGRNFQPKPDGEGSKVYWYPWFALWTKKEVEDMNPEQR |
| | GALVSANADLGAFAGFGCLAALYRSSSADAGIGFRLCQETE |
| | EKAKYFGQQFIELWAEYLKFNFTVGNRL |

[0093] Examples of DIV1 and DIV18 also include the orthologs and homologs of the proteins in Table 1. The terms “orthologue” (also referred to as “ortholog” herein) and “homologue” (also referred to as “homolog” herein) are well known in the art. By means of further guidance, a “homologue” of a protein as used herein is a protein of the same species which performs the same or a similar function as the protein it is a homologue of. Homologous proteins may but need not be structurally related, or are only partially structurally related. An “orthologue” of a protein as used herein is a protein of a different species which performs the same or a similar function as the protein it is an orthologue of. Orthologous proteins may but need not be structurally related, or are only partially structurally related. Homologs and orthologs may be identified by homology modelling (see, e.g., Greer, Science vol. 228 (1985) 1055, and Blundell et al. Eur J Biochem vol 172 (1988), 513) or “structural BLAST” (Dey F, Cliff Zhang Q, Petrey D, Honig B. Toward a “structural BLAST”: using structural relationships to infer function. Protein Sci. 2013 April; 22(4):359-66. doi: 10.1002/pro.2225.). See also Shmakov et al. (2015) for application in the field of CRISPR-Cas loci. Homologous proteins may but need not be structurally related, or are only partially structurally related.

### Binding Partners and Target Molecules

[0094] The diversified molecules may comprise binding partners of a target molecule. Target molecules may be any molecules which is of interest to a skilled person practicing the invention. Examples of target molecules include polypeptides, cell surface molecules, carbohydrates, lipids, hormones, growth or differentiation factors, cellular receptors, a ligand of a receptor, bacterial proteins or surface components, cell wall molecules, viral particles, immunity or immune tolerance factors, MHC molecules (such as Class I or II), tumor antigens found in or on tumor cells, and others as desired by a skilled practitioner and/or described herein.

[0095] The binding partners (e.g., encoded at least in part by the variable regions) may be any polypeptide which, upon expression, binds to the target molecule, such as under physiological conditions or laboratory (in vivo, in vitro, or in culture) conditions. In some cases, the binding partners may be nucleic acids. In certain examples, the binding partner may be aptamers or derivatives thereof.

[0096] Libraries of binding partners of various types may be generated using the systems and methods herein. Examples of binding partners include antibodies (e.g., antibodies (Ab) and monoclonal antibodies (MAb)), antigens, hormones, receptor proteins, ligands to receptors, amylin, THF-γ2, adrenomedullin, insulin, VEGF, PDGF, echistatin, human growth hormone, MMP, fibronectin, integrins, calmodulin, selectins, HBV proteins, HBV antigens, HBV core antigens, tryptases, proteases, mast cell protease, Src, Lyn, cyclin D, cyclin D kinase (Cdk), p16^{INK4}, SH2/SH3 domains, SH3 antagonists, ras effector domain, farnesyl transferase, p2 Mdm2, vinculin, components of complement, C3b, C4 binding protein (C4BP), receptors, urokinase receptor, tumor necrosis factor (TNF), TNFα receptor, CTLA4 MAb, interleukins, IL-1, IL-2, IL-3, IL-4, IL-5, IL-6, IL-7, IL-8, IL-9, IL-10, IL-1, IL-12, IL-13, IL-17, interferons, LIF, OSM, CNTF, GCSF, interleukin receptors, IL-1 receptor, c-MpI, erythropoietin (EPO), the EPO receptor, T cell receptor, CD4 receptor, B cell receptor, CD30-L, CD40L, CD27L, leptin, CTLA-4, PF-4, SDF-1, M-CSF, FGF, EGF. In some examples, the binding partner may be a bacteriocin (including a vibriocin, pyocin, or colicin), a bacteriophage protein (including a tail component that determines host specificity), capsid or surface membrane component, a ligand for a cell surface factor or an identified drug or diagnostic target molecule. In some examples, a binding partner may be part of a fusion protein such that it is produced as a chimeric protein comprising another polypeptide. Examples of the other polypeptide member of the fusion protein may include bacteriophage tail fibers, toxins, neurotoxins, antibodies, growth factors, chemokines, cytokines, neural growth factors.

[0097] In some cases, libraries of diversified molecules may also include barcodes (e.g., for connectomics analysis). The libraries of diversified molecules may include enzymes, antibodies, nanobodies, non-coding RNAs, barcode sequences, regulatory sequences (e.g., enhancers, promoters).

### Delivery of Diversifying Systems to Cells

[0098] The one or more components of the systems herein may be introduced to cells for expression. Examples of methods of introducing the components into cell include lipofection, nucleofection, microinjection, biolistics, virosomes, liposomes, immunoliposomes, polycation or lipid:nucleic acid conjugates, naked DNA, artificial virions, and agent-enhanced uptake of DNA. Lipofection is described in e.g., U.S. Pat. Nos. 5,049,386, 4,946,787; and 4,897,355) and lipofection reagents are sold commercially (e.g., Transfectam™ and Lipofectin™). Cationic and neutral lipids that are suitable for efficient receptor-recognition lipofection of polynucleotides include those of Felgner, WO 91/17424; WO 91/16024. Delivery can be to cells (e.g. in vitro or ex vivo administration) or target tissues (e.g. in vivo administration). Physical methods of introducing polynucleotides may also be used. Examples of such methods include injection of a solution containing the polynucleotides, bombardment by particles covered by the polynucleotides, soaking a cell, tissue sample or organism in a solution of the polynucleotides, or electroporation of cell membranes in the presence of the polynucleotides. Examples of delivery methods and vehicles include viruses, nanoparticles, exosomes, nanoclews, liposomes, lipids (e.g., LNPs), supercharged proteins, cell permeabilizing peptides, and implantable devices. The nucleic acids, proteins and other molecules, as well as cells described herein may be delivered to cells, tissues, organs, or subjects using methods described in paragraphs [00117] to [00278] of Feng Zhang et al., (WO2016106236A1), which is incorporated by reference herein in its entirety.

### Host Cells

[0099] In some cases, the cells where the diversified molecules are generated are bacterial cells. The cells may be bacteria, archaea, yeasts, fungi, protists, plant cells and animal cells. For example, the cells may be microorganisms, e.g., bacteria, archaea, fungi, protozoans, mycoplasma, and parasitic organisms. In a particular example, the cells are E coli.

[0100] In some examples, the cells may be bacteria. The terms “bacteria” and “bacterium” refer to all prokaryotic organisms, including those within all of the phyla in the kingdom Procaryotae. It is intended that the term encompass all microorganisms considered to be bacteria including Mycoplasma, Chlamydia, Actinomyces, Streptomyces, and Rickettsia. All forms of bacteria are included within this definition including cocci, bacilli, spirochetes, spheroplasts, protoplasts, etc. Also included within this term are prokaryotic organisms which are gram negative or gram positive. In certain examples, the cells may be fungi. As used herein, the term “fungi” is used in reference to eukaryotic organisms such as the molds and yeasts, including dimorphic fungi.

[0101] In some cases, the cells are E coli. The cells may be of specific strain of E coli. In some cases, the cells are not NEB5α or stb13 bacteria.

### Genetically Modified Cells

[0102] The cells used herein may be genetically modified. The genetic modification may allow for highly efficient generation of diversified molecules. The genetic modification may include reduction or depletion of expression of one or more genes in the cells (e.g., E coli cells). In some examples, the expression of mutator S is reduced or depleted in the cells (e.g., E coli cells). In certain. In some cases, the expression of Exodeoxyribonuclease 10 is reduced or depleted in the cells (e.g., E coli cells). In some cases, the expression of both mutator S and Exodeoxyribonuclease 10 is reduced or depleted in the cells. In certain cases, the cells used herein may be wild type cells.

### Methods of Screening Binding Partners for a Target Protein

[0103] The present disclosure also provides methods for screening binding partners for a target molecule. The binding partners may be screened from one or more libraries of diversified molecules generated using the methods and systems herein. In some cases, the method of screening binding partners of a target molecule, comprising obtaining of a library of diversified molecules using the system herein, performing one or more assays to determine interaction between the diversified molecules and the target molecule; and selecting a subset of the diversified molecules based on results of the one or more assays.

[0104] One or more assays may be performed for testing the interaction between candidate binding partners and the target molecule. Examples of the assays include phage display, toxin inhibition assay, toxin survival assay, bacterial surface display, bacterial two-hybrid display assay, bacterial three-hybrid display, yeast two-hybrid assay, yeast three-hybrid assay, an enzyme-linked immunosorbent assay (ELISA), immunoprecipitation assay, or a combination thereof.

[0105] In certain examples, the assay may be phage display. Phage display may be the display of functional foreign peptides or small proteins on the surface of bacteriophage or phagemid particles. Genetically engineered phage may be used to present peptides as segments of their native surface proteins. Peptide libraries may be produced by populations of phage with different gene sequences.

[0106] With the assay(s), affinity between the candidate binding partners and the target molecule may be determined. Binding partners with desired affinity (e.g., those with highest affinity) with the target molecule may be selected.

### Methods of Identifying Diversity Generation Systems

[0107] The present disclosure also provides methods for identifying diversity-generating systems herein. In general, the methods may comprise identifying loci with higher diversity in contigs larger than 1 kb in a database, compared to average diversity in the sequences in the database.

[0108] For example, the database may be a metagenome database. As used herein, the term “metagenome” refers to genomic material obtained directly from a microbe or microbial population, instead of from culture. A metagenome database includes sequence information of metagenome.

[0109] The term “contig” is used in connection with DNA sequence analysis, and refers to reassembled contiguous stretches of DNA derived from two or more DNA fragments having contiguous nucleotide sequences. Thus, a contig may be a set of overlapping DNA fragments that provides a (partial) contiguous sequence of a genomic region of interest. A contig may also be a set of DNA fragments that, when aligned to a reference sequence, may form a contiguous nucleotide sequence. For example, the term “contig” encompasses a series of (ligated) DNA fragment(s) which are ordered in such a way as to have sequence overlap of each (ligated) DNA fragment(s) with at least one of its neighbors. The linked or coupled (ligated) DNA fragment(s), may be ordered either manually or, preferably, using appropriate computer programs such as FPC, PHRAP, CAP3 etc., and may also be grouped into separate contigs.

[0110] The contigs in the methods herein may be at least 0.5 kilobase (kb), at least 1 kb, at least 1.5 kb, at least 2 kb, at least 2.5 kb, at least 3 kb, at least 3.5 kb, or at least 4 kb in length. In some examples, the contigs may be at least 3 kb in size.

[0111] The contigs comprising the identified loci may then be selected. In some cases, the selected contigs encode a polypeptide of at least 50, at least 60, at least 70, at least 80, at least 90, at least 100, at least 120, at least 140, at least 160, at least 180, or at least 200 amino acids in length.

[0112] The methods may further comprise confirming whether the system is able to generating diversified molecules in cells. The presence of diversified molecules in the cells may be determined by sequencing. Generally, the sequencing can be performed using automated Sanger sequencing (AB13730x1 genome analyzer), pyrosequencing on a solid support (454 sequencing, Roche), sequencing-by-synthesis with reversible terminations (ILLUMINA® Genome Analyzer), sequencing-by-ligation (ABI SOLiD®) or sequencing-by-synthesis with virtual terminators (HELISCOPE®); Moleculo sequencing (see Voskoboynik et al. eLife 2013 2:e00569 and U.S. patent application Ser. No. 13/608,778, filed Sep. 10, 2012); DNA nanoball sequencing; Single molecule real time (SMRT) sequencing; Nanopore DNA sequencing; Sequencing by hybridization; Sequencing with mass spectrometry; and Microfluidic Sanger sequencing. Examples of information that can be obtained from the disclosed methods and the analysis of the results thereof, include without limitation uni- or multiplex, 3 dimensional genome mapping, genome assembly, one dimensional genome mapping, the use of single nucleotide polymorphisms to phase genome maps, for example to determine the patterns of chromosome inactivation, such as for analysis of genomic imprinting, the use of specific junctions to determine karyotypes, including but not limited to chromosome number alterations (such as unisomies, uniparental disomies, and trisomies), translocations, inversions, duplications, deletions and other chromosomal rearrangements, the use of specific junctions correlated with disease to aid in diagnosis. As would be apparent, forward and reverse sequencing primer sites that are compatible with a selected next generation sequencing platform can be added to the ends of the fragments during the amplification step. In certain embodiments, the fragments may be amplified using PCR primers that hybridize to the tags that have been added to the fragments, where the primer used for PCR have 5′ tails that are compatible with a particular sequencing platform. In certain cases, the primers used may contain a molecular barcode (an “index”) so that different pools can be pooled together before sequencing, and the sequence reads can be traced to a particular sample using the barcode sequence.

[0113] The present application also provides aspects and embodiments as set forth in the following numbered Statements:

[0114] Statement 1. A self-diversifying system, comprising a polynucleotide encoding one or more open reading frames, at least one open reading frame comprising a diversifying element, the diversifying element resulting in generation of diversified molecules from the polynucleotide, wherein the system is configured to generate a population of diversified molecules with an efficiency of at least 80% as measured by a number of diversified molecules in a population relative to the total number of molecules generated in the population.

[0115] Statement 2. The system of Statement 1, wherein the self-diversifying element comprises a template region and/or a variable region.

[0116] Statement 3. The system of Statement 1 or 2, wherein the self-diversifying system is a diversity generating retroelement (DGR) system.

[0117] Statement 4. The system of any one of the proceeding Statements, wherein the self-diversifying system is a non-DGR system.

[0118] Statement 5. The system of any one of the proceeding Statements, further comprising a reverse transcriptase or functional domain thereof.

[0119] Statement 6. The system of any one of the proceeding Statements, wherein the polynucleotide comprises a sequence selected from SEQ ID NOs. 98-1699.

[0120] Statement 7. The system of any one of the proceeding Statements, wherein the sequence encodes c-type lectin fold or a fragment thereof.

[0121] Statement 8. The system of any one of the proceeding Statements, wherein the sequence encodes a protein or polypeptide capable of binding to a protein or a nucleic acid.

[0122] Statement 9. The system of any one of the proceeding Statements, wherein the variable region and the template region have a sequence homology of less than 80%.

[0123] Statement 10. The system any one of the proceeding Statements, wherein the polynucleotide further comprises a regulatory sequence.

[0124] Statement 11. The system of Statement 10, wherein the regulatory sequence comprises one or more ribosomal binding sites.

[0125] Statement 12. The system of Statement 10 or 11, wherein the regulatory sequence comprises an inducible promoter.

[0126] Statement 13. The system of any one of the proceeding Statements, wherein the diversified molecules are proteins.

[0127] Statement 14. The system of any one of the proceeding Statements, wherein the diversified molecules are polynucleotides.

[0128] Statement 15. The system of any one of the proceeding Statements, wherein the sequence encodes DIV1 or a fragment thereof.

[0129] Statement 16. The system of any one of the proceeding Statements, wherein the sequence encodes DIV18 or a fragment thereof.

[0130] Statement 17. The system of any one of the proceeding Statements, wherein the sequence is from Table 1 or the sequence encodes a protein from Table 2.

[0131] Statement 18. The system of any one of the proceeding Statements, wherein the diversified molecules comprise one or more binding partners of a target molecule.

[0132] Statement 19. The system of Statement Error! Reference source not found., wherein the target molecule is a protein.

[0133] Statement 20. The system of any one of Statements 18-19, wherein the target molecule is an antigen.

[0134] Statement 21. The system of any one of Statements 18-20, wherein the target molecule is a polynucleotide.

[0135] Statement 22. The system of any one of the proceeding Statements, wherein the system generates the library of diversified molecules when introduced to cells.

[0136] Statement 23. The system of any one of the proceeding Statements, wherein the variable region is within an open reading frame.

[0137] Statement 24. The system of any one of the proceeding Statements, wherein the system comprises a vector comprising the polynucleotide.

[0138] Statement 25. The system of any one of the proceeding Statements, wherein the system comprises a vector comprising the polynucleotide and a nucleic acid sequence encoding the reverse transcriptase.

[0139] Statement 26. The system of any one of the proceeding Statements, wherein the reverse transcriptase is error prone.

[0140] Statement 27. A method of generating a library of diversified molecules, comprising introducing the system of any one of Statements 1 to 26 in cells, wherein the system generates the library of diversified molecules in the cells.

[0141] Statement 28. The method of Statement 27, wherein the method generates the library of diversified molecules with an efficiency of 80%.

[0142] Statement 29. The method of Statement 27 or 28, wherein the cells are E. coli cells.

[0143] Statement 30. The method of Statement 27, 28, or 29, wherein expression of Mutator S and/or Exodeoxyribonuclease 10 are reduced or depleted in the cells.

[0144] Statement 31. A method of identifying a diversity-generating system, comprising: identifying loci with higher diversity in contigs larger than 1 kb in a database; selecting contigs comprising the identified loci in a), wherein each selected contig comprises a sequence encoding a polypeptide of least 100 amino acids; and expressing polynucleotides comprising at least a portion of the polypeptide-encoding sequence in the selected contigs from b) in cells, thereby confirming self-diversifying function of the polynucleotides.

[0145] Statement 32. The method of Statement 31, wherein the database is a metagenome database.

[0146] Statement 33. The method of Statement 31 or 32, wherein the contigs in a) are larger than 3 kb.

[0147] Statement 34. A method of screening binding partners of a target molecule, comprising: obtaining a library of diversified molecules using the system of any one of Statements 1 to 26, performing one or more assays to determine interaction between the diversified molecules and the target molecule; and selecting a subset of the diversified molecules based on results of the one or more assays.

[0148] Statement 35. The method of Statement 34, wherein the one or more assay comprise phage display, toxin inhibition assay, toxin survival assay, bacterial surface display, bacterial two-hybrid display assay, an enzyme-linked immunosorbent assay (ELISA), immunoprecipitation assay, or a combination thereof.

[0149] Statement 36. The method of Statement 34 or 35, wherein the target molecule is an antigen.

### EXAMPLES

### Example 1

[0150] Bacteria actively diversify endogenous proteins to adapt changing environment. This examples demonstrate an exemplary approach to use the diversification mechanism to generate protein binders at large scale.

[0151] In general, edges of low-high-low diversity in DNA sequences in metagenome database of E coli were found. All contigs larger than 3 kb in public JGI metagenome database for edges of low—high—low diversity regions. A algorithm and a computer with (800 GB of RAM) were used for the scan. Overlapping protein-coding sequences of at least 100 amino acid residues were filtered, and approximately 200 potential hits were found. Many of the hits had reverse transcriptase coding sequences and a template regions similar sequences to known classes of diversity-generating retroelements (DGRs) (FIGS. 1A and 1B). A subset of the identified hits were selected for further analysis (FIG. 2). The reverse transcriptase in these hits showed diversity (FIG. 3)

[0152] Polynucleotides systems comprising selected hits (FIG. 2) were synthesized on DNA plasmids. On the synthesized DNA plasmids, E. coli ribosome binding sites were added in front of every open reading frames to aid expression, equalized orientation of the open reading frames. The plasmids were transformed into E. coli strain with ExoX and MutS knocked out. The expression of the systems were induced by chemicals. Paired-end deep sequencing of the potential self-diversification at the natural sites of diversity was performed to detect self-diversification. The test results were shown in FIG. 4.

[0153] Among the selected systems, one system showed efficient self-diversification. The diversity was restricted to Adenine (A)-templated positions as predicted by the metagenome sequences. The overall diversification rate at A-templated positions was approximately 1%. Co-diversification rate of the independent positions was approximately 50%. The complexity of this system may be about 1.8×10¹³ variants (same range as human antibodies/T-cell receptors). The test results were shown in FIG. 5.

[0154] The analysis revealed that the system comprise the C-type lectin fold gene and had homology to human FGE enzyme (known to bind and covalently modify specific target peptides).

[0155] The system is allowed to diversify itself. Variants with intended function (e.g., binding/enzymatic targeting activity) were pulled out and further validated. The validation may be performed using phage display, a toxin inhibition/survival, bacterial surface display, bacterial-two-hybrid screening, or other means.

[0156] The generated diversified molecules may be use as high-complexity barcoding in human cells for connectomics, diversification of non-natural target genes, evolution of e.g. enzymes, antibodies, nanobodies, non-coding RNAs, barcodes, enhancers, and/or promoters.

### Example 2

[0157] DIV1, a 27.3 kDa protein was identified to be diversified by a DGR in metagenome data from the Crystal Geyser in Utah and found to bind specific linear peptide motifs on a western blot membrane and displayed on M13 phage (FIGS. 6A-6C). DIV1 may be used to replace antibodies in diagnostic, therapeutic, and basic research applications.

[0158] Another DGR-diversified protein (DIV18) was also identified and found to bind specific peptide motifs as indicated by phage display data (FIGS. 7A-7B). This protein is smaller than DIV1 and also may be used for programmable antibody-like peptide binding. Sequences of DIV1 and DIV18 are shown in Table 2.

### Example 3

[0159] Two diversity generating systems (Non-DGR 25 and Non-DGR 1057) that are not diversity generating retroelements were also identified. The two non-DGR systems were found to self-diversify based on JGI metagenome data and contain nucleic-acid interacting proteins (FIGS. 8A-8B). Sequences of the two systems are shown in Table 1.

[0160] An example hit is shown in FIG. 9.

### Example 4

[0161] An exemplary self-diversifying system (Hit 214) is shown in FIG. 10. Hit 214 self-diversified in E. coli (FIG. 11). Hit214 underwent dA-dependent diversification, which was reprogrammable (FIG. 12). The diversified protein in Hit 214 is c-type lectin fold. It is homologous to human formylglycin-generating enzyme (FGE). Its variable region overlaps with predicted target-peptide binding site. A 1-step phage display assay was used to determine the binding of a self-diversified protein with a target molecule (FIG. 13). Two positive controls were used in the binding assay (FIG. 14). Binding assays were performed to identify peptide ligands that bound to Hit 214 (FIG. 15).

[0162] Hit 214 may be reprogramed (FIG. 16). Two positions in the hairpin loop were found to be important for mutagenic homing (FIG. 16). Hit 214 was reprogramed with three constructs of DIV1 (FIG. 17). Fusion construct D self-diversified at A-positions after 24 hours of induction (0.15% homing) (FIG. 17).

[0163] An exemplary search strategy is shown in FIG. 18.

[0164] The sequences (on pTet plasmid) of reprogramed Hit 214 with DIV1 constructs A, B, D, and G are shown below. The maps of the constructs are shown in FIG. 19 (DIV1 A), FIG. 20 (DIV1 B), FIG. 21 (DIV1 D), and FIG. 22 (DIV1 G).

TABLE 3

| | |
|---|---|
| 7984-pTet DGR214 | 1 AAGCTTGGCT GTTTTGGCGG ATGAGAGAAG ATTTTCAGCC TGATACAGAT TAAATCAGAA |
| reprogrammed-to-div1 (A) | 61 CGCAGAAGCG GTCTGATAAA ACAGAATTTG CCTGGCGGCA GTAGCGCGGT GGTCCCACCT |
| (SEQ ID NO: 5) | 121 GACCCCATGC CGAACTCAGA AGTGAAACGC CGTAGCGCCG ATGGTAGTGT GGGGTCTCCC |
| | 181 CATGCGAGAG TAGGGAACTG CCAGGCATCA AATAAAACGA AAGGCTCAGT CGAAAGACTG |
| | 241 GGCCTTTCGT TTTATCTGTT GTTTGTCGGT GAACGCTCTC CTGAGTAGGA CAAATCCGCC |
| | 301 GGGAGCGGAT TTGAACGTTG CGAAGCAACG GCCCGGAGGG TGGCGGGCAG GACGCCCGCC |
| | 361 ATAAACTGCC AGGCATCAAA TTAAGCAGAA GGCCATCCTG ACGGATGGCC TTTTTGCGTT |
| | 421 TCTACAAACT CTTTTGTTTA TTTTTCTAAA TACATTCAAA TATGTATCCG CTCATGAGAC |
| | 481 AATAACCCTG ATAAATGCTT CAATAATATT GAAAAAGGAA GAGTATGAGT ATTCAACATT |
| | 541 TCCGTGTCGC CCTTATTCCC TTTTTTGCGG CATTTTGCCT TCCTGTTTTT GCTCACCCAG |
| | 601 AAACGCTGGT GAAAGTAAAA GATGCTGAAG ATCAGTTGGG TGCACGAGTG GGTTACATCG |
| | 661 AACTGGATCT CAACAGCGGT AAGATCCTTG AGAGTTTTCG CCCCGAAGAA CGTTTTCCAA |
| | 721 TGATGAGCAC TTTTAAAGTT CTGCTATGTG GCGCGGTATT ATCCCGTGTT GACGCCGGGC |
| | 781 AAGAGCAACT CGGTCGCCGC ATACACTATT CTCAGAATGA CTTGGTTGAG TACTCACCAG |
| | 841 TCACAGAAAA GCATCTTACG GATGGCATGA CAGTAAGAGA ATTATGCAGT GCTGCCATAA |
| | 901 CCATGAGTGA TAACACTGCG GCCAACTTAC TTCTGACAAC GATCGGAGGA CCGAAGGAGC |
| | 961 TAACCGCTTT TTTGCACAAC ATGGGGGATC ATGTAACTCG CCTTGATCGT TGGGAACCGG |
| | 1021 AGCTGAATGA AGCCATACCA AACGACGAGC GTGACACCAC GATGCCTGCA GCAATGGCAA |
| | 1081 CAACGTTGCG CAAACTATTA ACTGGCGAAC TACTTACTCT AGCTTCCCGG CAACAATTAA |
| | 1141 TAGACTGGAT GGAGGCGGAT AAAGTTGCAG GACCACTTCT GCGCTCGGCC CTTCCGGCTG |
| | 1201 GCTGGTTTAT TGCTGATAAA TCTGGAGCCG GTGAGCGTGG GTCTCGCGGT ATCATTGCAG |
| | 1261 CACTGGGGCC AGATGGTAAG CCCTCCCGTA TCGTAGTTAT CTACACGACG GGGAGTCAGG |
| | 1321 CAACTATGGA TGAACGAAAT AGACAGATCG CTGAGATAGG TGCCTCACTG ATTAAGCATT |
| | 1381 GGTAACTGTC AGACCAAGTT TACTCATATA TACTTTAGAT TGATTTACGC GCCCTGTAGC |
| | 1441 GGCGCATTAA GCGCGGCGGG TGTGGTGGTT ACGCGCAGCG TGACCGCTAC ACTTGCCAGC |
| | 1501 GCCCTAGCGC CCGCTCCTTT CGCTTTCTTC CCTTCCTTTC TCGCCACGTT CGCCGGCTTT |
| | 1561 CCCCGTCAAG CTCTAAATCG GGGGCTCCCT TTAGGGTTCC GATTTAGTGC TTTACGGCAC |
| | 1621 CTCGACCCCA AAAAACTTGA TTTGGGTGAT GGTTCACGTA GTGGGCCATC GCCCTGATAG |
| | 1681 ACGGTTTTTC GCCCTTTGAC GTTGGAGTCC ACGTTCTTTA ATAGTGGACT CTTGTTCCAA |
| | 1741 ACTTGAACAA CACTCAACCC TATCTCGGGC TATTCTTTTG ATTTATAAGG GATTTTGCCG |
| | 1801 ATTTCGGCCT ATTGGTTAAA AAATGAGCTG ATTTAACAAA AATTTAACGC GAATTTTAAC |
| | 1861 AAAATATTAA CGTTTACAAT TTAAAAGGAT CTAGGTGAAG ATCCTTTTTG ATAATCTCAT |
| | 1921 GACCAAAATC CCTTAACGTG AGTTTTCGTT CCACTGAGCG TCAGACCCCG TAGAAAAGAT |
| | 1981 CAAAGGATCT TCTTGAGATC CTTTTTTTCT GCGCGTAATC TGCTGCTTGC AAACAAAAAA |
| | 2041 ACCACCGCTA CCAGCGGTGG TTTGTTTGCC GGATCAAGAG CTACCAACTC TTTTTCCGAA |
| | 2101 GGTAACTGGC TTCAGCAGAG CGCAGATACC AAATACTGTC CTTCTAGTGT AGCCGTAGTT |
| | 2161 AGGCCACCAC TTCAAGAACT CTGTAGCACC GCCTACATAC CTCGCTCTGC TAATCCTGTT |
| | 2221 ACCAGTGGCT GCTGCCAGTG GCGATAAGTC GTGTCTTACC GGGTTGGACT CAAGACGATA |
| | 2281 GTTACCGGAT AAGGCGCAGC GGTCGGGCTG AACGGGGGGT TCGTGCACAC AGCCCAGCTT |
| | 2341 GGAGCGAACG ACCTACACCG AACTGAGATA CCTACAGCGT GAGCTATGAG AAAGCGCCAC |
| | 2401 GCTTCCCGAA GGGAGAAAGG CGGACAGGTA TCCGGTAAGC GGCAGGGTCG GAACAGGAGA |
| | 2461 GCGCACGAGG GAGCTTCCAG GGGGAAACGC CTGGTATCTT TATAGTCCTG TCGGGTTTCG |
| | 2521 CCACCTCTGA CTTGAGCGTC GATTTTTGTG ATGCTCGTCA GGGGGGCGGA GCCTATGGAA |
| | 2581 AAACGCCAGC AACGCGGCCT TTTTACGGTT CCTGGCCTTT TGCTGGCCTT TTGCTCACAT |
| | 2641 GTTCTTTCCT GCGTTATCCC CTGATTCTGT GGATAACCGT ATTACCGCCT TTGAGTGAGC |
| | 2701 TGATACCGCT CGCCGCAGCC GAACGACCGA GCGCAGCGAG TCAGTGAGCG AGGAAGCGGA |
| | 2761 AGAGCGCCTG ATGCGGTATT TTCTCCTTAC GCATCTGTGC GGTATTTCAC ACCGCATACG |
| | 2821 TACGGGCGCG CCTTAAGACC CACTTTCACA TTTAAGTTGT TTTTCTAATC CGCATATGAT |
| | 2881 CAATTCAAGG CCGAATAAGA AGGCTGGCTC TGCACCTTGG TGATCAAATA ATTCGATAGC |
| | 2941 TTGTCGTAAT AATGGCGGCA TACTATCAGT AGTAGGTGTT TCCCTTTCTT CTTTAGCGAC |
| | 3001 TTGATGCTCT TGATCTTCCA ATACGCAACC TAAAGTAAAA TGCCCCACAG CGCTGAGTGC |
| | 3061 ATATAATGCA TTCTCTAGTG AAAAACCTTG TTGGCATAAA AAGGCTAATT GATTTTCGAG |
| | 3121 AGTTTCATAC TGTTTTTCTG TAGGCCGTGT ACCTAAATGT ACTTTTGCTC CATCGCGATG |
| | 3181 ACTTAGTAAA GCACATCTAA AACTTTTAGC GTTATTACGT AAAAAATCTT GCCAGCTTTC |
| | 3241 CCCTTCTAAA GGGCAAAAGT GAGTATGGTG CCTATCTAAC ATCTCAATGG CTAAGGCGTC |
| | 3301 GAGCAAAGCC CGCTTATTTT TTACATGCCA ATACAATGTA GGCTGCTCTA CACCTAGCTT |
| | 3361 CTGGGCGAGT TTACGGGTTG TTAAACCTTC GATTCCGACC TCATTAAGCA GCTCTAATGC |
| | 3421 GCTGTTAATC ACTTTACTTT TATCTAATCT AGACATCATT AATTCCTAAT TTTTGTTGAC |
| | 3481 ACTCTATCGT TGATAGAGTT ATTTTACCAC TCCCTATCAG TGATAGAGAA AAGAATTCAA |
| | 3541 AAGATCTAAA GAGGAGAAAG GATCTATGGA CTACAAAGAC GATGACGACA AGggatccAT |
| | 3601 GAAGAAACAG AGCAATCAGA CCGTTCGTAT GGCAACACCG GGTCAGATTA AAGATGTTAT |
| | 3661 TAGCGCAGTT GTTGAAAGCA TTCCGGTGAA TAATCTGACA TATGAAATGG CCCAGTATTT |
| | 3721 CATCGGTCGT AAAAAATGGC TGGGCACCGA AATGAAAAAA ATCTTTAGCG TGGATAACAG |
| | 3781 CCATGCAGAT CTGATTGCAG ATTGGCAGGC ATTTTATTGT GGTCTGGGTA TTGATTGCGA |
| | 3841 TCTGAGCGGT GTTATTATTC CGGATGATCC TGGTGGTTTT GGTCGTGTGA TTATTATGGC |
| | 3901 ACAGGGTATT ACACCGCAGA GCGGTTATGA TCTGTGTGCA AAATTCTTTC CGTGCTGGAA |
| | 3961 ATATACCGAT AAAAACCTGG ATGAAGTTGT GGTTAGCGAA CGTACCGCAA AAGATGTTTA |
| | 4021 TGCAATTCGT GTTCGTGATC GTGTTGAAGC AGATGAAGAA CTGCGTAATC GTAGCTATAA |
| | 4081 TGATCTGAAA CGTCAGGGCA TTATTGGCAT TACCCTGGAA GAACGTGAAA TCTTTGAACT |
| | 4141 GAAATTTTTC AAAGAAACCG CAGGCAAACA CCTGGATATC AAAAATTGGA CCTTTTGTCT |
| | 4201 GGGTTCGTGC TATGACGGCG GCAATGTGCC GAGCGCCTCG TGGCGCAGCG GCGAGTTCGA |
| | 4261 GGTCGACTGG TGCAATCCCG GCGATGTCTT CGACGATCTG TGTTCCCGTC AGGCAGTTAG |
| | 4321 CTAATGCCTG TTCATCTGTG TTCTGCGGCC CTGCGCGATA GCGCGGGCCG TCTCTAAAAG |
| | 4381 AGGAGAAAGG ATCTATGCAA CAGCTTCAAG TCGCGCAGCG GGTCGAGGCG ATGATCGAGT |
| | 4441 ATGGCTATAT AGCTGTACGG CATTTCCCGA AATCGGAGCG TCACGTGCTC AGCGCCGAGC |
| | 4501 TGCGCGGCTC TATGTGGCGG CTGCTGCGGC TCGTGATCGT CTGCGGCAAG CGGTATCACA |
| | 4561 AAAAGACGAC ACTCGCAGAG CTGGATACCG AACTGGAGCT GCTGCGCCGC GAAGTGCGGC |
| | 4621 TCGCAAAAGA CCTGAAGTTC CTGCCGTTCC GACAATACGA AATCTGGTCG CGTCATCTCG |
| | 4681 ACGAGATCGG TCGCATGATC GGCGGCTGGA TTAAACACGC AAAACAGGGT TAAGCGCATT |
| | 4741 TGGGTTCGTG CTATGACGAC GGCAATGTGC CGAACGCCAA TTGGAACAGC GGCAAGTTCA |
| | 4801 AGGTCAACTG GTACAATCCC gACAATGTCA ACGACAATCT GTGTTCCCGT CAGCTTGAAG |
| | 4861 ATCGTCAGAA ACAGCGCGGT CACGGTGGCG CTGTCAGCAC GACATCAAAA GGGCGCTTGA |
| | 4921 TCCTCGGCCC ATGCCGAAAC ATTAACAGGC ATCGATCGTG TAGTAGGCCT CAGCCGAGGC |
| | 4981 TCGATCGTCG CCGCTTTGGC TCGATAAAGA GGAGAAAGGA TCTATGAAGA CATACAACAA |
| | 5041 CCTGTTCCCG GAGATATACA GCTTCGACAA CCTGCATGAC GCCTACGTCC GCGCGCGCCG |
| | 5101 CGGCAAACGC CACCAGGCCG ACGTGCTGCG CTTCGAGCAA AACCTCGAGG GCGAGCTCAT |
| | 5161 ACAACTACAG AACGAACTGA TCTGGCGCGA GTACGAAACT GGCCCGTATC GGCGTTTCCA |
| | 5221 TGTGCACGAG CCGAAAAAGC GTTTGGTCGC CGCGCTGCCC TTTCGCGATC GCGTCGTACA |
| | 5281 GCACAGCCTA ATCGCCGCGA TCGAGCCCAT TTGGGAGTCG CGATTCATCG ATCAGAGCTA |
| | 5341 CGCCTGCCGT CCCGGCCGGG GCGTGCACCG CGGTGCAGAC AAAGCCCAAC AATGGCTGCG |
| | 5401 CGAGGTGCGG GCCACACACG GCCGCGTCTA CGCGCTCAAG GCCGACGTCG CAGGTTATTT |
| | 5461 CGCATCGATC GATCACGACG TTCTGCGCAC GCAGCTAGAA CGCCGAATCG CTTGCCGTCC |
| | 5521 AACGCTATAC CTGCTGCTCG GCATCATCGA AACCTGGCAT CCCGGCCTTC CCATCGGCAA |
| | 5581 CCTCACGTCG CAGCTGTGCG CCAATATCTA TTTGCACGAT TTCGACGTAT TCGCAAAACA |
| | 5641 GCACGTCGGC GCACGCCGCT ATATGAGGTA TATGGATGAC TGGCTCATCG TCGACCACGA |
| | 5701 CAAAGCGCGC CTGCACGCAC AGCGCCGCGT GCTCGAGGAC TGGCTGCACG ACAATCTGCG |
| | 5761 CCTGCAGCTC AATAACAAGA CCCAGATATT TCCCGTCAGC CCACGCCACG GCCGCGGACT |
| | 5821 CGACTTCCTC GGATATCGAA TATGGCCCAC ACATCGAAAG ATTCGCAAAA ACAGCGTCAA |
| | 5881 ACGgATGCAG AAAAAACTAC GTGCGCTCGA ACGCCGCTAC GCCGCCGGCG ATATCGACCT |
| | 5941 GGTCGACATC GAGCCCGTGA TCCAGAGCTG GGTCGCCCAC GCCTCCCACG CCAGCAGCTA |
| | 6001 TCAGATCCGC CGCGCGGTGC TGGAGCGCGC GGTTTTCAAA CGCCAATAAG CATGC |
| J985-pTet DGR214 | 1 AAGCTTGGCT GTTTTGGCGG ATGAGAGAAG ATTTTCAGCC TGATACAGAT TAAATCAGAA |
| reprogrammed-to-div1 (B) | 61 CGCAGAAGCG GTCTGATAAA ACAGAATTTG CCTGGCGGCA GTAGCGCGGT GGTCCCACCT |
| (SEQ ID NO: 6) | 121 GACCCCATGC CGAACTCAGA AGTGAAACGC CGTAGCGCCG ATGGTAGTGT GGGGTCTCCC |
| | 181 CATGCGAGAG TAGGGAACTG CCAGGCATCA AATAAAACGA AAGGCTCAGT CGAAAGACTG |
| | 241 GGCCTTTCGT TTTATCTGTT GTTTGTCGGT GAACGCTCTC CTGAGTAGGA CAAATCCGCC |
| | 301 GGGAGCGGAT TTGAACGTTG CGAAGCAACG GCCCGGAGGG TGGCGGGCAG GACGCCCGCC |
| | 361 ATAAACTGCC AGGCATCAAA TTAAGCAGAA GGCCATCCTG ACGGATGGCC TTTTTGCGTT |
| | 421 TCTACAAACT CTTTTGTTTA TTTTTCTAAA TACATTCAAA TATGTATCCG CTCATGAGAC |
| | 481 AATAACCCTG ATAAATGCTT CAATAATATT GAAAAAGGAA GAGTATGAGT ATTCAACATT |
| | 541 TCCGTGTCGC CCTTATTCCC TTTTTTGCGG CATTTTGCCT TCCTGTTTTT GCTCACCCAG |
| | 601 AAACGCTGGT GAAAGTAAAA GATGCTGAAG ATCAGTTGGG TGCACGAGTG GGTTACATCG |
| | 661 AACTGGATCT CAACAGCGGT AAGATCCTTG AGAGTTTTCG CCCCGAAGAA CGTTTTCCAA |
| | 721 TGATGAGCAC TTTTAAAGTT CTGCTATGTG GCGCGGTATT ATCCCGTGTT GACGCCGGGC |
| | 781 AAGAGCAACT CGGTCGCCGC ATACACTATT CTCAGAATGA CTTGGTTGAG TACTCACCAG |
| | 841 TCACAGAAAA GCATCTTACG GATGGCATGA CAGTAAGAGA ATTATGCAGT GCTGCCATAA |
| | 901 CCATGAGTGA TAACACTGCG GCCAACTTAC TTCTGACAAC GATCGGAGGA CCGAAGGAGC |
| | 961 TAACCGCTTT TTTGCACAAC ATGGGGGATC ATGTAACTCG CCTTGATCGT TGGGAACCGG |
| | 1021 AGCTGAATGA AGCCATACCA AACGACGAGC GTGACACCAC GATGCCTGCA GCAATGGCAA |
| | 1081 CAACGTTGCG CAAACTATTA ACTGGCGAAC TACTTACTCT AGCTTCCCGG CAACAATTAA |
| | 1141 TAGACTGGAT GGAGGCGGAT AAAGTTGCAG GACCACTTCT GCGCTCGGCC CTTCCGGCTG |
| | 1201 GCTGGTTTAT TGCTGATAAA TCTGGAGCCG GTGAGCGTGG GTCTCGCGGT ATCATTGCAG |
| | 1261 CACTGGGGCC AGATGGTAAG CCCTCCCGTA TCGTAGTTAT CTACACGACG GGGAGTCAGG |
| | 1321 CAACTATGGA TGAACGAAAT AGACAGATCG CTGAGATAGG TGCCTCACTG ATTAAGCATT |
| | 1381 GGTAACTGTC AGACCAAGTT TACTCATATA TACTTTAGAT TGATTTACGC GCCCTGTAGC |
| | 1441 GGCGCATTAA GCGCGGCGGG TGTGGTGGTT ACGCGCAGCG TGACCGCTAC ACTTGCCAGC |
| | 1501 GCCCTAGCGC CCGCTCCTTT CGCTTTCTTC CCTTCCTTTC TCGCCACGTT CGCCGGCTTT |
| | 1561 CCCCGTCAAG CTCTAAATCG GGGGCTCCCT TTAGGGTTCC GATTTAGTGC TTTACGGCAC |
| | 1621 CTCGACCCCA AAAAACTTGA TTTGGGTGAT GGTTCACGTA GTGGGCCATC GCCCTGATAG |
| | 1681 ACGGTTTTTC GCCCTTTGAC GTTGGAGTCC ACGTTCTTTA ATAGTGGACT CTTGTTCCAA |
| | 1741 ACTTGAACAA CACTCAACCC TATCTCGGGC TATTCTTTTG ATTTATAAGG GATTTTGCCG |
| | 1801 ATTTCGGCCT ATTGGTTAAA AAATGAGCTG ATTTAACAAA AATTTAACGC GAATTTTAAC |
| | 1861 AAAATATTAA CGTTTACAAT TTAAAAGGAT CTAGGTGAAG ATCCTTTTTG ATAATCTCAT |
| | 1921 GACCAAAATC CCTTAACGTG AGTTTTCGTT CCACTGAGCG TCAGACCCCG TAGAAAAGAT |
| | 1981 CAAAGGATCT TCTTGAGATC CTTTTTTTCT GCGCGTAATC TGCTGCTTGC AAACAAAAAA |
| | 2041 ACCACCGCTA CCAGCGGTGG TTTGTTTGCC GGATCAAGAG CTACCAACTC TTTTTCCGAA |
| | 2101 GGTAACTGGC TTCAGCAGAG CGCAGATACC AAATACTGTC CTTCTAGTGT AGCCGTAGTT |
| | 2161 AGGCCACCAC TTCAAGAACT CTGTAGCACC GCCTACATAC CTCGCTCTGC TAATCCTGTT |
| | 2221 ACCAGTGGCT GCTGCCAGTG GCGATAAGTC GTGTCTTACC GGGTTGGACT CAAGACGATA |
| | 2281 GTTACCGGAT AAGGCGCAGC GGTCGGGCTG AACGGGGGGT TCGTGCACAC AGCCCAGCTT |
| | 2341 GGAGCGAACG ACCTACACCG AACTGAGATA CCTACAGCGT GAGCTATGAG AAAGCGCCAC |
| | 2401 GCTTCCCGAA GGGAGAAAGG CGGACAGGTA TCCGGTAAGC GGCAGGGTCG GAACAGGAGA |
| | 2461 GCGCACGAGG GAGCTTCCAG GGGGAAACGC CTGGTATCTT TATAGTCCTG TCGGGTTTCG |
| | 2521 CCACCTCTGA CTTGAGCGTC GATTTTTGTG ATGCTCGTCA GGGGGGCGGA GCCTATGGAA |
| | 2581 AAACGCCAGC AACGCGGCCT TTTTACGGTT CCTGGCCTTT TGCTGGCCTT TTGCTCACAT |
| | 2641 GTTCTTTCCT GCGTTATCCC CTGATTCTGT GGATAACCGT ATTACCGCCT TTGAGTGAGC |
| | 2701 TGATACCGCT CGCCGCAGCC GAACGACCGA GCGCAGCGAG TCAGTGAGCG AGGAAGCGGA |
| | 2761 AGAGCGCCTG ATGCGGTATT TTCTCCTTAC GCATCTGTGC GGTATTTCAC ACCGCATACG |
| | 2821 TACGGGCGCG CCTTAAGACC CACTTTCACA TTTAAGTTGT TTTTCTAATC CGCATATGAT |
| | 2881 CAATTCAAGG CCGAATAAGA AGGCTGGCTC TGCACCTTGG TGATCAAATA ATTCGATAGC |
| | 2941 TTGTCGTAAT AATGGCGGCA TACTATCAGT AGTAGGTGTT TCCCTTTCTT CTTTAGCGAC |
| | 3001 TTGATGCTCT TGATCTTCCA ATACGCAACC TAAAGTAAAA TGCCCCACAG CGCTGAGTGC |
| | 3061 ATATAATGCA TTCTCTAGTG AAAAACCTTG TTGGCATAAA AAGGCTAATT GATTTTCGAG |
| | 3121 AGTTTCATAC TGTTTTTCTG TAGGCCGTGT ACCTAAATGT ACTTTTGCTC CATCGCGATG |
| | 3181 ACTTAGTAAA GCACATCTAA AACTTTTAGC GTTATTACGT AAAAAATCTT GCCAGCTTTC |
| | 3241 CCCTTCTAAA GGGCAAAAGT GAGTATGGTG CCTATCTAAC ATCTCAATGG CTAAGGCGTC |
| | 3301 GAGCAAAGCC CGCTTATTTT TTACATGCCA ATACAATGTA GGCTGCTCTA CACCTAGCTT |
| | 3361 CTGGGCGAGT TTACGGGTTG TTAAACCTTC GATTCCGACC TCATTAAGCA GCTCTAATGC |
| | 3421 GCTGTTAATC ACTTTACTTT TATCTAATCT AGACATCATT AATTCCTAAT TTTTGTTGAC |
| | 3481 ACTCTATCGT TGATAGAGTT ATTTTACCAC TCCCTATCAG TGATAGAGAA AAGAATTCAA |
| | 3541 AAGATCTAAA GAGGAGAAAG GATCTATGGA CTACAAAGAC GATGACGACA AGggatccAT |
| | 3601 GAAGAAACAG AGCAATCAGA CCGTTCGTAT GGCAACACCG GGTCAGATTA AAGATGTTAT |
| | 3661 TAGCGCAGTT GTTGAAAGCA TTCCGGTGAA TAATCTGACA TATGAAATGG CCCAGTATTT |
| | 3721 CATCGGTCGT AAAAAATGGC TGGGCACCGA AATGAAAAAA ATCTTTAGCG TGGATAACAG |
| | 3781 CCATGCAGAT CTGATTGCAG ATTGGCAGGC ATTTTATTGT GGTCTGGGTA TTGATTGCGA |
| | 3841 TCTGAGCGGT GTTATTATTC CGGATGATCC TGGTGGTTTT GGTCGTGTGA TTATTATGGC |
| | 3901 ACAGGGTATT ACACCGCAGA GCGGTTATGA TCTGTGTGCA AAATTCTTTC CGTGCTGGAA |
| | 3961 ATATACCGAT AAAAACCTGG ATGAAGTTGT GGTTAGCGAA CGTACCGCAA AAGATGTTTA |
| | 4021 TGCAATTCGT GTTCGTGATC GTGTTGAAGC AGATGAAGAA CTGCGTAATC GTAGCTATAA |
| | 4081 TGATCTGAAA CGTCAGGGCA TTATTGGCAT TACCCTGGAA GAACGTGAAA TCTTTGAACT |
| | 4141 GAAATTTTTC AAAGAAACCG CAGGCAAACA CCTGGATATC AAAAATTGGA CCTTTTGTCT |
| | 4201 GGGTTCGTGC TATGACGGCG GCAATGTGCC GAGCGCCTCG TGGCGCAGCG GCGAGTTCGA |
| | 4261 GGTCGACTGG TGCAATCCCG GCGATGTCTT CGACGATCTG TGTTCCCGTC AGGCAGTTAG |
| | 4321 CTAATGCCTG TTCATCTGTG TTCTGCGGCC CTGCGCGATA GCGCGGGCCG TCTCTAAAAG |
| | 4381 AGGAGAAAGG ATCTATGCAA CAGCTTCAAG TCGCGCAGCG GGTCGAGGCG ATGATCGAGT |
| | 4441 ATGGCTATAT AGCTGTACGG CATTTCCCGA AATCGGAGCG TCACGTGCTC AGCGCCGAGC |
| | 4501 TGCGCGGCTC TATGTGGCGG CTGCTGCGGC TCGTGATCGT CTGCGGCAAG CGGTATCACA |
| | 4561 AAAAGACGAC ACTCGCAGAG CTGGATACCG AACTGGAGCT GCTGCGCCGC GAAGTGCGGC |
| | 4621 TCGCAAAAGA CCTGAAGTTC CTGCCGTTCC GACAATACGA AATCTGGTCG CGTCATCTCG |
| | 4681 ACGAGATCGG TCGCATGATC GGCGGCTGGA TTAAACACGC AAAACAGGGT TAAGCGCATT |
| | 4741 TGGGTTCGTG CTATGACGAC GGCAATGTGC CGAACGCCAA TTGGAACAGC GGCAAGTTCA |
| | 4801 AGGTCAACTG GTACAATCCC gACAATGTCA ACGACAATCT GTGTTCCCGT CAGTCGGTTG |
| | 4861 CCGGCCTGCT CTTGAAGATC GTCAGAAACA GCGCGGTCAC GGTGGCGCTG TCAGCACGAC |
| | 4921 ATCAAAAGGG CGCTTGATCC TCGGCCCATG CCGAAACATT AACAGGCATC GATCGTGTAG |
| | 4981 TAGGCCTCAG CCGAGGCTCG ATCGTCGCCG CTTTGGCTCG ATAAAGAGGA GAAAGGATCT |
| | 5041 ATGAAGACAT ACAACAACCT GTTCCCGGAG ATATACAGCT TCGACAACCT GCATGACGCC |
| | 5101 TACGTCCGCG CGCGCCGCGG CAAACGCCAC CAGGCCGACG TGCTGCGCTT CGAGCAAAAC |
| | 5161 CTCGAGGGCG AGCTCATACA ACTACAGAAC GAACTGATCT GGCGCGAGTA CGAAACTGGC |
| | 5221 CCGTATCGGC GTTTCCATGT GCACGAGCCG AAAAAGCGTT TGGTCGCCGC GCTGCCCTTT |
| | 5281 CGCGATCGCG TCGTACAGCA CAGCCTAATC GCCGCGATCG AGCCCATTTG GGAGTCGCGA |
| | 5341 TTCATCGATC AGAGCTACGC CTGCCGTCCC GGCCGGGGCG TGCACCGCGG TGCAGACAAA |
| | 5401 GCCCAACAAT GGCTGCGCGA GGTGCGGGCC ACACACGGCC GCGTCTACGC GCTCAAGGCC |
| | 5461 GACGTCGCAG GTTATTTCGC ATCGATCGAT CACGACGTTC TGCGCACGCA GCTAGAACGC |
| | 5521 CGAATCGCTT GCCGTCCAAC GCTATACCTG CTGCTCGGCA TCATCGAAAC CTGGCATCCC |
| | 5581 GGCCTTCCCA TCGGCAACCT CACGTCGCAG CTGTGCGCCA ATATCTATTT GCACGATTTC |
| | 5641 GACGTATTCG CAAAACAGCA CGTCGGCGCA CGCCGCTATA TGAGGTATAT GGATGACTGG |
| | 5701 CTCATCGTCG ACCACGACAA AGCGCGCCTG CACGCACAGC GCCGCGTGCT CGAGGACTGG |
| | 5761 CTGCACGACA ATCTGCGCCT GCAGCTCAAT AACAAGACCC AGATATTTCC CGTCAGCCCA |
| | 5821 CGCCACGGCC GCGGACTCGA CTTCCTCGGA TATCGAATAT GGCCCACACA TCGAAAGATT |
| | 5881 CGCAAAAACA GCGTCAAACG gATGCAGAAA AAACTACGTG CGCTCGAACG CCGCTACGCC |
| | 5941 GCCGGCGATA TCGACCTGGT CGACATCGAG CCCGTGATCC AGAGCTGGGT CGCCCACGCC |
| | 6001 TCCCACGCCA GCAGCTATCA GATCCGCCGC GCGGTGCTGG AGCGCGCGGT TTTCAAACGC |
| | 6061 CAATAAGCAT GC |
| J987-pTet DGR214 | 1 AAGCTTGGCT GTTTTGGCGG ATGAGAGAAG ATTTTCAGCC TGATACAGAT TAAATCAGAA |
| reprogrammed-to-div1 (D) | 61 CGCAGAAGCG GTCTGATAAA ACAGAATTTG CCTGGCGGCA GTAGCGCGGT GGTCCCACCT |
| (SEQ ID NO: 7) | 121 GACCCCATGC CGAACTCAGA AGTGAAACGC CGTAGCGCCG ATGGTAGTGT GGGGTCTCCC |
| | 181 CATGCGAGAG TAGGGAACTG CCAGGCATCA AATAAAACGA AAGGCTCAGT CGAAAGACTG |
| | 241 GGCCTTTCGT TTTATCTGTT GTTTGTCGGT GAACGCTCTC CTGAGTAGGA CAAATCCGCC |
| | 301 GGGAGCGGAT TTGAACGTTG CGAAGCAACG GCCCGGAGGG TGGCGGGCAG GACGCCCGCC |
| | 361 ATAAACTGCC AGGCATCAAA TTAAGCAGAA GGCCATCCTG ACGGATGGCC TTTTTGCGTT |
| | 421 TCTACAAACT CTTTTGTTTA TTTTTCTAAA TACATTCAAA TATGTATCCG CTCATGAGAC |
| | 481 AATAACCCTG ATAAATGCTT CAATAATATT GAAAAAGGAA GAGTATGAGT ATTCAACATT |
| | 541 TCCGTGTCGC CCTTATTCCC TTTTTTGCGG CATTTTGCCT TCCTGTTTTT GCTCACCCAG |
| | 601 AAACGCTGGT GAAAGTAAAA GATGCTGAAG ATCAGTTGGG TGCACGAGTG GGTTACATCG |
| | 661 AACTGGATCT CAACAGCGGT AAGATCCTTG AGAGTTTTCG CCCCGAAGAA CGTTTTCCAA |
| | 721 TGATGAGCAC TTTTAAAGTT CTGCTATGTG GCGCGGTATT ATCCCGTGTT GACGCCGGGC |
| | 781 AAGAGCAACT CGGTCGCCGC ATACACTATT CTCAGAATGA CTTGGTTGAG TACTCACCAG |
| | 841 TCACAGAAAA GCATCTTACG GATGGCATGA CAGTAAGAGA ATTATGCAGT GCTGCCATAA |
| | 901 CCATGAGTGA TAACACTGCG GCCAACTTAC TTCTGACAAC GATCGGAGGA CCGAAGGAGC |
| | 961 TAACCGCTTT TTTGCACAAC ATGGGGGATC ATGTAACTCG CCTTGATCGT TGGGAACCGG |
| | 1021 AGCTGAATGA AGCCATACCA AACGACGAGC GTGACACCAC GATGCCTGCA GCAATGGCAA |
| | 1081 CAACGTTGCG CAAACTATTA ACTGGCGAAC TACTTACTCT AGCTTCCCGG CAACAATTAA |
| | 1141 TAGACTGGAT GGAGGCGGAT AAAGTTGCAG GACCACTTCT GCGCTCGGCC CTTCCGGCTG |
| | 1201 GCTGGTTTAT TGCTGATAAA TCTGGAGCCG GTGAGCGTGG GTCTCGCGGT ATCATTGCAG |
| | 1261 CACTGGGGCC AGATGGTAAG CCCTCCCGTA TCGTAGTTAT CTACACGACG GGGAGTCAGG |
| | 1321 CAACTATGGA TGAACGAAAT AGACAGATCG CTGAGATAGG TGCCTCACTG ATTAAGCATT |
| | 1381 GGTAACTGTC AGACCAAGTT TACTCATATA TACTTTAGAT TGATTTACGC GCCCTGTAGC |
| | 1441 GGCGCATTAA GCGCGGCGGG TGTGGTGGTT ACGCGCAGCG TGACCGCTAC ACTTGCCAGC |
| | 1501 GCCCTAGCGC CCGCTCCTTT CGCTTTCTTC CCTTCCTTTC TCGCCACGTT CGCCGGCTTT |
| | 1561 CCCCGTCAAG CTCTAAATCG GGGGCTCCCT TTAGGGTTCC GATTTAGTGC TTTACGGCAC |
| | 1621 CTCGACCCCA AAAAACTTGA TTTGGGTGAT GGTTCACGTA GTGGGCCATC GCCCTGATAG |
| | 1681 ACGGTTTTTC GCCCTTTGAC GTTGGAGTCC ACGTTCTTTA ATAGTGGACT CTTGTTCCAA |
| | 1741 ACTTGAACAA CACTCAACCC TATCTCGGGC TATTCTTTTG ATTTATAAGG GATTTTGCCG |
| | 1801 ATTTCGGCCT ATTGGTTAAA AAATGAGCTG ATTTAACAAA AATTTAACGC GAATTTTAAC |
| | 1861 AAAATATTAA CGTTTACAAT TTAAAAGGAT CTAGGTGAAG ATCCTTTTTG ATAATCTCAT |
| | 1921 GACCAAAATC CCTTAACGTG AGTTTTCGTT CCACTGAGCG TCAGACCCCG TAGAAAAGAT |
| | 1981 CAAAGGATCT TCTTGAGATC CTTTTTTTCT GCGCGTAATC TGCTGCTTGC AAACAAAAAA |
| | 2041 ACCACCGCTA CCAGCGGTGG TTTGTTTGCC GGATCAAGAG CTACCAACTC TTTTTCCGAA |
| | 2101 GGTAACTGGC TTCAGCAGAG CGCAGATACC AAATACTGTC CTTCTAGTGT AGCCGTAGTT |
| | 2161 AGGCCACCAC TTCAAGAACT CTGTAGCACC GCCTACATAC CTCGCTCTGC TAATCCTGTT |
| | 2221 ACCAGTGGCT GCTGCCAGTG GCGATAAGTC GTGTCTTACC GGGTTGGACT CAAGACGATA |
| | 2281 GTTACCGGAT AAGGCGCAGC GGTCGGGCTG AACGGGGGGT TCGTGCACAC AGCCCAGCTT |
| | 2341 GGAGCGAACG ACCTACACCG AACTGAGATA CCTACAGCGT GAGCTATGAG AAAGCGCCAC |
| | 2401 GCTTCCCGAA GGGAGAAAGG CGGACAGGTA TCCGGTAAGC GGCAGGGTCG GAACAGGAGA |
| | 2461 GCGCACGAGG GAGCTTCCAG GGGGAAACGC CTGGTATCTT TATAGTCCTG TCGGGTTTCG |
| | 2521 CCACCTCTGA CTTGAGCGTC GATTTTTGTG ATGCTCGTCA GGGGGGCGGA GCCTATGGAA |
| | 2581 AAACGCCAGC AACGCGGCCT TTTTACGGTT CCTGGCCTTT TGCTGGCCTT TTGCTCACAT |
| | 2641 GTTCTTTCCT GCGTTATCCC CTGATTCTGT GGATAACCGT ATTACCGCCT TTGAGTGAGC |
| | 2701 TGATACCGCT CGCCGCAGCC GAACGACCGA GCGCAGCGAG TCAGTGAGCG AGGAAGCGGA |
| | 2761 AGAGCGCCTG ATGCGGTATT TTCTCCTTAC GCATCTGTGC GGTATTTCAC ACCGCATACG |
| | 2821 TACGGGCGCG CCTTAAGACC CACTTTCACA TTTAAGTTGT TTTTCTAATC CGCATATGAT |
| | 2881 CAATTCAAGG CCGAATAAGA AGGCTGGCTC TGCACCTTGG TGATCAAATA ATTCGATAGC |
| | 2941 TTGTCGTAAT AATGGCGGCA TACTATCAGT AGTAGGTGTT TCCCTTTCTT CTTTAGCGAC |
| | 3001 TTGATGCTCT TGATCTTCCA ATACGCAACC TAAAGTAAAA TGCCCCACAG CGCTGAGTGC |
| | 3061 ATATAATGCA TTCTCTAGTG AAAAACCTTG TTGGCATAAA AAGGCTAATT GATTTTCGAG |
| | 3121 AGTTTCATAC TGTTTTTCTG TAGGCCGTGT ACCTAAATGT ACTTTTGCTC CATCGCGATG |
| | 3181 ACTTAGTAAA GCACATCTAA AACTTTTAGC GTTATTACGT AAAAAATCTT GCCAGCTTTC |
| | 3241 CCCTTCTAAA GGGCAAAAGT GAGTATGGTG CCTATCTAAC ATCTCAATGG CTAAGGCGTC |
| | 3301 GAGCAAAGCC CGCTTATTTT TTACATGCCA ATACAATGTA GGCTGCTCTA CACCTAGCTT |
| | 3361 CTGGGCGAGT TTACGGGTTG TTAAACCTTC GATTCCGACC TCATTAAGCA GCTCTAATGC |
| | 3421 GCTGTTAATC ACTTTACTTT TATCTAATCT AGACATCATT AATTCCTAAT TTTTGTTGAC |
| | 3481 ACTCTATCGT TGATAGAGTT ATTTTACCAC TCCCTATCAG TGATAGAGAA AAGAATTCAA |
| | 3541 AAGATCTAAA GAGGAGAAAG GATCTATGGA CTACAAAGAC GATGACGACA AGggatccAT |
| | 3601 GAAGAAACAG AGCAATCAGA CCGTTCGTAT GGCAACACCG GGTCAGATTA AAGATGTTAT |
| | 3661 TAGCGCAGTT GTTGAAAGCA TTCCGGTGAA TAATCTGACA TATGAAATGG CCCAGTATTT |
| | 3721 CATCGGTCGT AAAAAATGGC TGGGCACCGA AATGAAAAAA ATCTTTAGCG TGGATAACAG |
| | 3781 CCATGCAGAT CTGATTGCAG ATTGGCAGGC ATTTTATTGT GGTCTGGGTA TTGATTGCGA |
| | 3841 TCTGAGCGGT GTTATTATTC CGGATGATCC TGGTGGTTTT GGTCGTGTGA TTATTATGGC |
| | 3901 ACAGGGTATT ACACCGCAGA GCGGTTATGA TCTGTGTGCA AAATTCTTTC CGTGCTGGAA |
| | 3961 ATATACCGAT AAAAACCTGG ATGAAGTTGT GGTTAGCGAA CGTACCGCAA AAGATGTTTA |
| | 4021 TGCAATTCGT GTTCGTGATC GTGTTGAAGC AGATGAAGAA CTGCGTAATC GTAGCTATAA |
| | 4081 TGATCTGAAA CGTCAGGGCA TTATTGGCAT TACCCTGGAA GAACGTGAAA TCTTTGAACT |
| | 4141 GAAATTTTTC AAAGAAACCG CAGGCAAACA CCTGGATATC AAAAATTGGA CCTTTTGTCT |
| | 4201 GGGTTCGTGC TATGACGACG GCAATGTGCC GAACGCCAAT TGGAACAGCG GCAAGTTCAA |
| | 4261 GGTCAACTGG TACAATCCCg ACAATGTCAA CGACAATCTG TGTTCCCGTC AGGCGGTTTC |
| | 4321 CTAGTCGGTT GCCGGCCTGC TTTTGTTGCC TGATGCCTGT TCATCTGTGT TCTGCGGCCC |
| | 4381 TGCGCGATAG CGCGGGCCGT CTCTAAAAGA GGAGAAAGGA TCTATGCAAC AGCTTCAAGT |
| | 4441 CGCGCAGCGG GTCGAGGCGA TGATCGAGTA TGGCTATATA GCTGTACGGC ATTTCCCGAA |
| | 4501 ATCGGAGCGT CACGTGCTCA GCGCCGAGCT GCGCGGCTCT ATGTGGCGGC TGCTGCGGCT |
| | 4561 CGTGATCGTC TGCGGCAAGC GGTATCACAA AAAGACGACA CTCGCAGAGC TGGATACCGA |
| | 4621 ACTGGAGCTG CTGCGCCGCG AAGTGCGGCT CGCAAAAGAC CTGAAGTTCC TGCCGTTCCG |
| | 4681 ACAATACGAA ATCTGGTCGC GTCATCTCGA CGAGATCGGT CGCATGATCG GCGGCTGGAT |
| | 4741 TAAACACGCA AAACAGGGTT AAGCGCATTT GGGTTCGTGC TATGACGACG GCAATGTGCC |
| | 4801 GAACGCCAAT TGGAACAGCG GCAAGTTCAA GGTCAACTGG TACAATCCCg ACAATGTCAA |
| | 4861 CGACAATCTG TGTTCCCGTC AGGCGGTTTC CTAGTCGGTT GCCGGCCTGC TCTTGAAGAT |
| | 4921 CGTCAGAAAC AGCGCGGTCA CGGTGGCGCT GTCAGCACGA CATCAAAAGG GCGCTTGATC |
| | 4981 CTCGGCCCAT GCCGAAACAT TAACAGGCAT CGATCGTGTA GTAGGCCTCA GCCGAGGCTC |
| | 5041 GATCGTCGCC GCTTTGGCTC GATAAAGAGG AGAAAGGATC TATGAAGACA TACAACAACC |
| | 5101 TGTTCCCGGA GATATACAGC TTCGACAACC TGCATGACGC CTACGTCCGC GCGCGCCGCG |
| | 5161 GCAAACGCCA CCAGGCCGAC GTGCTGCGCT TCGAGCAAAA CCTCGAGGGC GAGCTCATAC |
| | 5221 AACTACAGAA CGAACTGATC TGGCGCGAGT ACGAAACTGG CCCGTATCGG CGTTTCCATG |
| | 5281 TGCACGAGCC GAAAAAGCGT TTGGTCGCCG CGCTGCCCTT TCGCGATCGC GTCGTACAGC |
| | 5341 ACAGCCTAAT CGCCGCGATC GAGCCCATTT GGGAGTCGCG ATTCATCGAT CAGAGCTACG |
| | 5401 CCTGCCGTCC CGGCCGGGGC GTGCACCGCG GTGCAGACAA AGCCCAACAA TGGCTGCGCG |
| | 5461 AGGTGCGGGC CACACACGGC CGCGTCTACG CGCTCAAGGC CGACGTCGCA GGTTATTTCG |
| | 5521 CATCGATCGA TCACGACGTT CTGCGCACGC AGCTAGAACG CCGAATCGCT TGCCGTCCAA |
| | 5581 CGCTATACCT GCTGCTCGGC ATCATCGAAA CCTGGCATCC CGGCCTTCCC ATCGGCAACC |
| | 5641 TCACGTCGCA GCTGTGCGCC AATATCTATT TGCACGATTT CGACGTATTC GCAAAACAGC |
| | 5701 ACGTCGGCGC ACGCCGCTAT ATGAGGTATA TGGATGACTG GCTCATCGTC GACCACGACA |
| | 5761 AAGCGCGCCT GCACGCACAG CGCCGCGTGC TCGAGGACTG GCTGCACGAC AATCTGCGCC |
| | 5821 TGCAGCTCAA TAACAAGACC CAGATATTTC CCGTCAGCCC ACGCCACGGC CGCGGACTCG |
| | 5881 ACTTCCTCGG ATATCGAATA TGGCCCACAC ATCGAAAGAT TCGCAAAAAC AGCGTCAAAC |
| | 5941 GgATGCAGAA AAAACTACGT GCGCTCGAAC GCCGCTACGC CGCCGGCGAT ATCGACCTGG |
| | 6001 TCGACATCGA GCCCGTGATC CAGAGCTGGG TCGCCCACGC CTCCCACGCC AGCAGCTATC |
| | 6061 AGATCCGCCG CGCGGTGCTG GAGCGCGCGG TTTTCAAACG CCAATAAGCA TGC |
| J990-pTet DGR214 | 1 AAGCTTGGCT GTTTTGGCGG ATGAGAGAAG ATTTTCAGCC TGATACAGAT TAAATCAGAA |
| reprogrammed-to-div1 (G) | 61 CGCAGAAGCG GTCTGATAAA ACAGAATTTG CCTGGCGGCA GTAGCGCGGT GGTCCCACCT |
| (SEQ ID NO: 8) | 121 GACCCCATGC CGAACTCAGA AGTGAAACGC CGTAGCGCCG ATGGTAGTGT GGGGTCTCCC |
| | 181 CATGCGAGAG TAGGGAACTG CCAGGCATCA AATAAAACGA AAGGCTCAGT CGAAAGACTG |
| | 241 GGCCTTTCGT TTTATCTGTT GTTTGTCGGT GAACGCTCTC CTGAGTAGGA CAAATCCGCC |
| | 301 GGGAGCGGAT TTGAACGTTG CGAAGCAACG GCCCGGAGGG TGGCGGGCAG GACGCCCGCC |
| | 361 ATAAACTGCC AGGCATCAAA TTAAGCAGAA GGCCATCCTG ACGGATGGCC TTTTTGCGTT |
| | 421 TCTACAAACT CTTTTGTTTA TTTTTCTAAA TACATTCAAA TATGTATCCG CTCATGAGAC |
| | 481 AATAACCCTG ATAAATGCTT CAATAATATT GAAAAAGGAA GAGTATGAGT ATTCAACATT |
| | 541 TCCGTGTCGC CCTTATTCCC TTTTTTGCGG CATTTTGCCT TCCTGTTTTT GCTCACCCAG |
| | 601 AAACGCTGGT GAAAGTAAAA GATGCTGAAG ATCAGTTGGG TGCACGAGTG GGTTACATCG |
| | 661 AACTGGATCT CAACAGCGGT AAGATCCTTG AGAGTTTTCG CCCCGAAGAA CGTTTTCCAA |
| | 721 TGATGAGCAC TTTTAAAGTT CTGCTATGTG GCGCGGTATT ATCCCGTGTT GACGCCGGGC |
| | 781 AAGAGCAACT CGGTCGCCGC ATACACTATT CTCAGAATGA CTTGGTTGAG TACTCACCAG |
| | 841 TCACAGAAAA GCATCTTACG GATGGCATGA CAGTAAGAGA ATTATGCAGT GCTGCCATAA |
| | 901 CCATGAGTGA TAACACTGCG GCCAACTTAC TTCTGACAAC GATCGGAGGA CCGAAGGAGC |
| | 961 TAACCGCTTT TTTGCACAAC ATGGGGGATC ATGTAACTCG CCTTGATCGT TGGGAACCGG |
| | 1021 AGCTGAATGA AGCCATACCA AACGACGAGC GTGACACCAC GATGCCTGCA GCAATGGCAA |
| | 1081 CAACGTTGCG CAAACTATTA ACTGGCGAAC TACTTACTCT AGCTTCCCGG CAACAATTAA |
| | 1141 TAGACTGGAT GGAGGCGGAT AAAGTTGCAG GACCACTTCT GCGCTCGGCC CTTCCGGCTG |
| | 1201 GCTGGTTTAT TGCTGATAAA TCTGGAGCCG GTGAGCGTGG GTCTCGCGGT ATCATTGCAG |
| | 1261 CACTGGGGCC AGATGGTAAG CCCTCCCGTA TCGTAGTTAT CTACACGACG GGGAGTCAGG |
| | 1321 CAACTATGGA TGAACGAAAT AGACAGATCG CTGAGATAGG TGCCTCACTG ATTAAGCATT |
| | 1381 GGTAACTGTC AGACCAAGTT TACTCATATA TACTTTAGAT TGATTTACGC GCCCTGTAGC |
| | 1441 GGCGCATTAA GCGCGGCGGG TGTGGTGGTT ACGCGCAGCG TGACCGCTAC ACTTGCCAGC |
| | 1501 GCCCTAGCGC CCGCTCCTTT CGCTTTCTTC CCTTCCTTTC TCGCCACGTT CGCCGGCTTT |
| | 1561 CCCCGTCAAG CTCTAAATCG GGGGCTCCCT TTAGGGTTCC GATTTAGTGC TTTACGGCAC |
| | 1621 CTCGACCCCA AAAAACTTGA TTTGGGTGAT GGTTCACGTA GTGGGCCATC GCCCTGATAG |
| | 1681 ACGGTTTTTC GCCCTTTGAC GTTGGAGTCC ACGTTCTTTA ATAGTGGACT CTTGTTCCAA |
| | 1741 ACTTGAACAA CACTCAACCC TATCTCGGGC TATTCTTTTG ATTTATAAGG GATTTTGCCG |
| | 1801 ATTTCGGCCT ATTGGTTAAA AAATGAGCTG ATTTAACAAA AATTTAACGC GAATTTTAAC |
| | 1861 AAAATATTAA CGTTTACAAT TTAAAAGGAT CTAGGTGAAG ATCCTTTTTG ATAATCTCAT |
| | 1921 GACCAAAATC CCTTAACGTG AGTTTTCGTT CCACTGAGCG TCAGACCCCG TAGAAAAGAT |
| | 1981 CAAAGGATCT TCTTGAGATC CTTTTTTTCT GCGCGTAATC TGCTGCTTGC AAACAAAAAA |
| | 2041 ACCACCGCTA CCAGCGGTGG TTTGTTTGCC GGATCAAGAG CTACCAACTC TTTTTCCGAA |
| | 2101 GGTAACTGGC TTCAGCAGAG CGCAGATACC AAATACTGTC CTTCTAGTGT AGCCGTAGTT |
| | 2161 AGGCCACCAC TTCAAGAACT CTGTAGCACC GCCTACATAC CTCGCTCTGC TAATCCTGTT |
| | 2221 ACCAGTGGCT GCTGCCAGTG GCGATAAGTC GTGTCTTACC GGGTTGGACT CAAGACGATA |
| | 2281 GTTACCGGAT AAGGCGCAGC GGTCGGGCTG AACGGGGGGT TCGTGCACAC AGCCCAGCTT |
| | 2341 GGAGCGAACG ACCTACACCG AACTGAGATA CCTACAGCGT GAGCTATGAG AAAGCGCCAC |
| | 2401 GCTTCCCGAA GGGAGAAAGG CGGACAGGTA TCCGGTAAGC GGCAGGGTCG GAACAGGAGA |
| | 2461 GCGCACGAGG GAGCTTCCAG GGGGAAACGC CTGGTATCTT TATAGTCCTG TCGGGTTTCG |
| | 2521 CCACCTCTGA CTTGAGCGTC GATTTTTGTG ATGCTCGTCA GGGGGGCGGA GCCTATGGAA |
| | 2581 AAACGCCAGC AACGCGGCCT TTTTACGGTT CCTGGCCTTT TGCTGGCCTT TTGCTCACAT |
| | 2641 GTTCTTTCCT GCGTTATCCC CTGATTCTGT GGATAACCGT ATTACCGCCT TTGAGTGAGC |
| | 2701 TGATACCGCT CGCCGCAGCC GAACGACCGA GCGCAGCGAG TCAGTGAGCG AGGAAGCGGA |
| | 2761 AGAGCGCCTG ATGCGGTATT TTCTCCTTAC GCATCTGTGC GGTATTTCAC ACCGCATACG |
| | 2821 TACGGGCGCG CCTTAAGACC CACTTTCACA TTTAAGTTGT TTTTCTAATC CGCATATGAT |
| | 2881 CAATTCAAGG CCGAATAAGA AGGCTGGCTC TGCACCTTGG TGATCAAATA ATTCGATAGC |
| | 2941 TTGTCGTAAT AATGGCGGCA TACTATCAGT AGTAGGTGTT TCCCTTTCTT CTTTAGCGAC |
| | 3001 TTGATGCTCT TGATCTTCCA ATACGCAACC TAAAGTAAAA TGCCCCACAG CGCTGAGTGC |
| | 3061 ATATAATGCA TTCTCTAGTG AAAAACCTTG TTGGCATAAA AAGGCTAATT GATTTTCGAG |
| | 3121 AGTTTCATAC TGTTTTTCTG TAGGCCGTGT ACCTAAATGT ACTTTTGCTC CATCGCGATG |
| | 3181 ACTTAGTAAA GCACATCTAA AACTTTTAGC GTTATTACGT AAAAAATCTT GCCAGCTTTC |
| | 3241 CCCTTCTAAA GGGCAAAAGT GAGTATGGTG CCTATCTAAC ATCTCAATGG CTAAGGCGTC |
| | 3301 GAGCAAAGCC CGCTTATTTT TTACATGCCA ATACAATGTA GGCTGCTCTA CACCTAGCTT |
| | 3361 CTGGGCGAGT TTACGGGTTG TTAAACCTTC GATTCCGACC TCATTAAGCA GCTCTAATGC |
| | 3421 GCTGTTAATC ACTTTACTTT TATCTAATCT AGACATCATT AATTCCTAAT TTTTGTTGAC |
| | 3481 ACTCTATCGT TGATAGAGTT ATTTTACCAC TCCCTATCAG TGATAGAGAA AAGAATTCAA |
| | 3541 AAGATCTAAA GAGGAGAAAG GATCTATGGA CTACAAAGAC GATGACGACA AGggatccAT |
| | 3601 GAAGAAACAG AGCAATCAGA CCGTTCGTAT GGCAACACCG GGTCAGATTA AAGATGTTAT |
| | 3661 TAGCGCAGTT GTTGAAAGCA TTCCGGTGAA TAATCTGACA TATGAAATGG CCCAGTATTT |
| | 3721 CATCGGTCGT AAAAAATGGC TGGGCACCGA AATGAAAAAA ATCTTTAGCG TGGATAACAG |
| | 3781 CCATGCAGAT CTGATTGCAG ATTGGCAGGC ATTTTATTGT GGTCTGGGTA TTGATTGCGA |
| | 3841 TCTGAGCGGT GTTATTATTC CGGATGATCC TGGTGGTTTT GGTCGTGTGA TTATTATGGC |
| | 3901 ACAGGGTATT ACACCGCAGA GCGGTTATGA TCTGTGTGCA AAATTCTTTC CGTGCTGGAA |
| | 3961 ATATACCGAT AAAAACCTGG ATGAAGTTGT GGTTAGCGAA CGTACCGCAA AAGATGTTTA |
| | 4021 TGCAATTCGT GTTCGTGATC GTGTTGAAGC AGATGAAGAA CTGCGTAATC GTAGCTATAA |
| | 4081 TGATCTGAAA CGTCAGGGCA TTATTGGCAT TACCCTGGAA GAACGTGAAA TCTTTGAACT |
| | 4141 GAAATTTTTC AAAGAAACCG CAGGCAAACA CCTGGATATC AAAAATTGGA CCTTTTGTCT |
| | 4201 GGGTTCGTGC TATGACGGCG GCAATGTGCC GAGCGCCTCG TGGCGCAGCG GCGAGTTCGA |
| | 4261 GGTCGACTGG TGCAATCCCG GCGATGTCTT CGACGATCTG TGTTCCCGTC AGGCTTTTGT |
| | 4321 TGCCTGATGC CTGTTCATCT GTGTTCTGCG GCCCTGCGCG ATAGCGCGGG CCGTCTCTAA |
| | 4381 AAGAGGAGAA AGGATCTATG CAACAGCTTC AAGTCGCGCA GCGGGTCGAG GCGATGATCG |
| | 4441 AGTATGGCTA TATAGCTGTA CGGCATTTCC CGAAATCGGA GCGTCACGTG CTCAGCGCCG |
| | 4501 AGCTGCGCGG CTCTATGTGG CGGCTGCTGC GGCTCGTGAT CGTCTGCGGC AAGCGGTATC |
| | 4561 ACAAAAAGAC GACACTCGCA GAGCTGGATA CCGAACTGGA GCTGCTGCGC CGCGAAGTGC |
| | 4621 GGCTCGCAAA AGACCTGAAG TTCCTGCCGT TCCGACAATA CGAAATCTGG TCGCGTCATC |
| | 4681 TCGACGAGAT CGGTCGCATG ATCGGCGGCT GGATTAAACA CGCAAAACAG GGTTAAGCGC |
| | 4741 ATTTGGGTTC GTGCTATGAC GACGGCAATG TGCCGAACGC CAATTGGAAC AGCGGCAAGT |
| | 4801 TCAAGGTCAA CTGGTACAAT CCCgACAATG TCAACGACAA TCTGTGTTCC CGTCAGGCTC |
| | 4861 TTGAAGATCG TCAGAAACAG CGCGGTCACG GTGGCGCTGT CAGCACGACA TCAAAAGGGC |
| | 4921 GCTTGATCCT CGGCCCATGC CGAAACATTA ACAGGCATCG ATCGTGTAGT AGGCCTCAGC |
| | 4981 CGAGGCTCGA TCGTCGCCGC TTTGGCTCGA TAAAGAGGAG AAAGGATCTA TGAAGACATA |
| | 5041 CAACAACCTG TTCCCGGAGA TATACAGCTT CGACAACCTG CATGACGCCT ACGTCCGCGC |
| | 5101 GCGCCGCGGC AAACGCCACC AGGCCGACGT GCTGCGCTTC GAGCAAAACC TCGAGGGCGA |
| | 5161 GCTCATACAA CTACAGAACG AACTGATCTG GCGCGAGTAC GAAACTGGCC CGTATCGGCG |
| | 5221 TTTCCATGTG CACGAGCCGA AAAAGCGTTT GGTCGCCGCG CTGCCCTTTC GCGATCGCGT |
| | 5281 CGTACAGCAC AGCCTAATCG CCGCGATCGA GCCCATTTGG GAGTCGCGAT TCATCGATCA |
| | 5341 GAGCTACGCC TGCCGTCCCG GCCGGGGCGT GCACCGCGGT GCAGACAAAG CCCAACAATG |
| | 5401 GCTGCGCGAG GTGCGGGCCA CACACGGCCG CGTCTACGCG CTCAAGGCCG ACGTCGCAGG |
| | 5461 TTATTTCGCA TCGATCGATC ACGACGTTCT GCGCACGCAG CTAGAACGCC GAATCGCTTG |
| | 5521 CCGTCCAACG CTATACCTGC TGCTCGGCAT CATCGAAACC TGGCATCCCG GCCTTCCCAT |
| | 5581 CGGCAACCTC ACGTCGCAGC TGTGCGCCAA TATCTATTTG CACGATTTCG ACGTATTCGC |
| | 5641 AAAACAGCAC GTCGGCGCAC GCCGCTATAT GAGGTATATG GATGACTGGC TCATCGTCGA |
| | 5701 CCACGACAAA GCGCGCCTGC ACGCACAGCG CCGCGTGCTC GAGGACTGGC TGCACGACAA |
| | 5761 TCTGCGCCTG CAGCTCAATA ACAAGACCCA GATATTTCCC GTCAGCCCAC GCCACGGCCG |
| | 5821 CGGACTCGAC TTCCTCGGAT ATCGAATATG GCCCACACAT CGAAAGATTC GCAAAAACAG |
| | 5881 CGTCAAACGg ATGCAGAAAA AACTACGTGC GCTCGAACGC CGCTACGCCG CCGGCGATAT |
| | 5941 CGACCTGGTC GACATCGAGC CCGTGATCCA GAGCTGGGTC GCCCACGCCT CCCACGCCAG |
| | 6001 CAGCTATCAG ATCCGCCGCG CGGTGCTGGA GCGCGCGGTT TTCAAACGCC AATAAGCATG |
| | 6061 C |

### Example 5

[0165] A method/algorithm for identifying self-diversifying systems:

[0166] Parameters:

D=distance of two constant flanking 32-mers, typically 192 or 160 bases
T=minimum number of diverse instances for a hash to be retained, typically 6
R=number of scanning rounds, typically 3

[0167] Method/Algorithm:

[0168] 1. A large amount of memory (e.g. 512 GB) was allocated to an array of 16 bit-integers (named A).

[0169] 2. The source sequence database was parsed base-by-base in both sense and reverse-complement orientation
[0170] At every source position, a hash H1 was calculated of the input 32-mer sequence at that position concatenated by the input 32-mer sequence that was D bases downstream of the first 32-mer
[0171] Hash H1 was reduced to the available number of index bits of A by a modulo or other function
[0172] A second hash H2 was calculated from an 8-mer sequence positioned D/2 downstream of the first 32-mer, or at a defined position between the two 32-mers that were used to calculate H1
[0173] Hash H2 was reduced to 4 bits by a modulo or other function
[0174] The element at address H1 in array A was altered by an OR operation with the value 2\hat{ }H2

[0175] 3. All elements of array A, in which at least T bits were positive, were copied to a separate table A2

[0176] 4. Steps 1-3 here were repeated for a total of R rounds, wherein only source sequences were considered whose hash H1 had been retained in the previous round. In every round, a different hash function was used to calculate the new H1 for aggregating in array A

[0177] 5. After the last round was completed, the source sequence database was parsed base-by-base again in both sense and reverse-complement orientation, aggregating sequence logos for each retained hash value separately

[0178] 6. Sequence logos were stored, optionally filtered for redundant sequences, optionally filtered for a minimum length of highly conserved sequence, and optionally filtered for an arbitrary diversity score calculated from each logo.

[0179] Various modifications and variations of the described methods, pharmaceutical compositions, and kits of the invention will be apparent to those skilled in the art without departing from the scope and spirit of the invention. Although the invention has been described in connection with specific embodiments, it will be understood that it is capable of further modifications and that the invention as claimed should not be unduly limited to such specific embodiments. Indeed, various modifications of the described modes for carrying out the invention that are obvious to those skilled in the art are intended to be within the scope of the invention. This application is intended to cover any variations, uses, or adaptations of the invention following, in general, the principles of the invention and including such departures from the present disclosure come within known customary practice within the art to which the invention pertains and may be applied to the essential features herein before set forth.

What is claimed is:

1. A self-diversifying system, comprising a polynucleotide encoding one or more open reading frames, at least one open reading frame comprising a diversifying element, the diversifying element resulting in generation of diversified molecules from the polynucleotide, wherein the system is configured to generate a population of diversified molecules with an efficiency of at least 80% as measured by a number of diversified molecules in a population relative to the total number of molecules generated in the population.

2. The system of claim 1, wherein the self-diversifying element comprises a template region and/or a variable region.

3. The system of claim 1, wherein the self-diversifying system is a diversity generating retroelement (DGR) system.

4. The system of claim 1, wherein the self-diversifying system is a non-DGR system.

5. The system of claim 1, further comprising a reverse transcriptase or functional domain thereof.

6. The system of claim 1, wherein the polynucleotide comprises a sequence selected from SEQ ID NOs. 98-1699.

7. The system of claim 1, wherein the sequence encodes c-type lectin fold or a fragment thereof.

8. The system of claim 1, wherein the sequence encodes a protein or polypeptide capable of binding to a protein or a nucleic acid.

9. The system of claim 1, wherein the variable region and the template region have a sequence homology of less than 80%.

10. The system of claim 1, wherein the polynucleotide further comprises a regulatory sequence.

11. The system of claim 10, wherein the regulatory sequence comprises one or more ribosomal binding sites.

12. The system of claim 10, wherein the regulatory sequence comprises an inducible promoter.

13. The system of claim 1, wherein the diversified molecules are proteins.

14. The system of claim 1, wherein the diversified molecules are polynucleotides.

15. The system of claim 1, wherein the sequence encodes DIV1 or a fragment thereof.

16. The system of claim 1, wherein the sequence encodes DIV18 or a fragment thereof.

17. The system of claim 1, wherein the sequence is from Table 1 or the sequence encodes a protein from Table 2.

18. The system of claim 1, wherein the diversified molecules comprise one or more binding partners of a target molecule.

19. The system of claim 18, wherein the target molecule is a protein.

20. The system of claim 18, wherein the target molecule is an antigen.

21. The system of claim 18, wherein the target molecule is a polynucleotide.

22. The system of claim 1, wherein the system generates the library of diversified molecules when introduced to cells.

23. The system of claim 1, wherein the variable region is within an open reading frame.

24. The system of claim 1, wherein the system comprises a vector comprising the polynucleotide.

25. The system of claim 2, wherein the system comprises a vector comprising the polynucleotide and a nucleic acid sequence encoding the reverse transcriptase.

26. The system of claim 2, wherein the reverse transcriptase is error prone.

27. A method of generating a library of diversified molecules, comprising introducing the system of claim 1 in cells, wherein the system generates the library of diversified molecules in the cells.

28. The method of claim 27, wherein the method generates the library of diversified molecules with an efficiency of 80%.

29. The method of claim 27, wherein the cells are E. coli cells.

30. The method of claim 27, wherein expression of Mutator S and/or Exodeoxyribonuclease 10 are reduced or depleted in the cells.

31. A method of identifying a diversity-generating system, comprising:
a. identifying loci with higher diversity in contigs larger than 1 kb in a database;
b. selecting contigs comprising the identified loci in a), wherein each selected contig comprises a sequence encoding a polypeptide of least 100 amino acids; and
c. expressing polynucleotides comprising at least a portion of the polypeptide-encoding sequence in the selected contigs from b) in cells, thereby confirming self-diversifying function of the polynucleotides.

32. The method of claim 31, wherein the database is a metagenome database.

33. The method of claim 31, wherein the contigs in a) are larger than 3 kb.

34. A method of screening binding partners of a target molecule, comprising:
a. obtaining a library of diversified molecules using the system of claim 1,
b. performing one or more assays to determine interaction between the diversified molecules and the target molecule; and
c. selecting a subset of the diversified molecules based on results of the one or more assays.

35. The method of claim 34, wherein the one or more assay comprise phage display, toxin inhibition assay, toxin survival assay, bacterial surface display, bacterial two-hybrid display assay, an enzyme-linked immunosorbent assay (ELISA), immunoprecipitation assay, or a combination thereof.

36. The method of claim 34, wherein the target molecule is an antigen.

The application's sequence listing, which the Patent Office published only in electronic form, follows.

SEQUENCE LISTING (1699 sequences)

SEQ ID NO: 1 - DNA, 4000 bp, Escherica coli
  misc_feature (189)..(190): n is a, c, g, or t
  misc_feature (1175)..(1175): n is a, c, g, or t
  misc_feature (2014)..(2014): n is a, c, g, or t
  misc_feature (2742)..(2742): n is a, c, g, or t
  misc_feature (3182)..(3182): n is a, c, g, or t
  misc_feature (3739)..(3739): n is a, c, g, or t
  misc_feature (3844)..(3844): n is a, c, g, or t
ggagttatttccgggaacgacaaacaaccggaaccctgaaaagtaagaatcgcattcaaactacttctatatacatgagcagtccctaaattcccactctgctgcaaatcaacagccacttgtttcataaacgaagtaaaactttcctttttcattaaaaaataatttaataattaatatttactaatnncacaatttactttagtaaaatacgaaaatatatatacaaagatttacatatataaaattataatattaaaaactgaaatattcacattatctatcaaatttatttttatacatttgcgcagttttttaaacaaataatcattttaattactaaaaaacaacaaagttatgaacaacaatgaaccagctgccgaacactacagcatcaatggattcaagtatttctccgagttggcgaaagaatattttccagatctggcaaacgcctcttccgccagcaaaaaaatgcgcaaacgcatcaaagcagacaagacgttgaacgaacaactggctgccgcgtattacacctgccaaacaatcgacatcagtcccgaaatgcaactaatcctttaccgccattggggacctccccacatcgacctgccgaccaacgtttaattacgtagtagaaaacgaaaacatcgacaaggaataaaaagaaaatcgaactatatatttttaaatatatcatttatctttttattgtttattatgtattccactttgcgttcaccacttttttcggaaaagaagataactatcatttatacagctatttacagaaagaaaaaagcgttccacaaagcgttcggcaaaatgaccgtttttttcattccaaacagagcctccgaatcctcccaacgaaggctctgtttatctccggcagaagttctatcaaacacaaacagagcatccgtttcatctcctgatcgcttcttcgccccatgaaagaaaacaaaaatacaacaacttacgtaccacaactattcttcttcgtccacacccgtccacaaacagacacaccccttgcaaaccgcacgggaatagcgtacttttacagaaaatttaaataacactcaatgaaaaatttcaattttcaagccatgctgaaacatggttttctcattatccctaaagccttactacagcagcagatagaagaccgncacatgcaagaaggagaaatagaagctctcctgaaaattctgatgaaggtcaattattcggatacactctacaacgaccgtcaaaataaaaactgcctgtgtaaaagaggcgaaagcctgtttagttatcgcgactggagccacatcttccactggtctgtcggaaaagccttcaggttcatacacgagcttgccacgctgggaattatagaaatcatctctcaccccaacaattcctccctgcatattcgtgtcgtcgaatacgataaatggatgggagttcccgatagcgacaagcagaaaaagaaagccgtcaacgaaaagtttcacctgttctggaatgaattccacagcatcacacagctccccaaagagaatatcgccaaagcacaacgcgaatggaaaaagttgggcgacaaggaacagcaactcgccatcgacaggatagaggaatattatttccaccaaacgaacatcaatttccttctccatgccgccagctatttatccaacaaagcttttcttaacgaatactgataatatgaataccgaaaacagagtttcgccacaggctcccgaaatagaagaagctatcatcggcgcctgcctgatagaacagggagccataccactggtagccgacaagctgcgtcccgaaatgttctacgtcctgcgccatcaggttatctatgccgccatactggccatgtatcatgcaggaataaagatagacatcctcaccgtaaaagaagagctttcccaccgtggaaagctcgaagaggcgggcggaccgttcggcatcacccaattgagcagcaaggtggcaacctccgcccatnttgaatatcatgcgcagatcgtacacgagaaatacctgcgacgcgaaatgattctggggttcaacaaactcctcgcctgttcgctagacgaaacgatggatattgacgactcactggtagacgcgcataacctgctcgaccgtctggaaggcgaattcggccataacaaccacatgcgcgacatggatgaactaatgaccgccaccatggtagaagccgaaggacgtatcgccaacaacaaaaacggagtaaccggcctccctaccggactggcggatctggaccgcatgacgtccggactacagaaaggcgagttggtggtggtcgccgcccgtcccggcgtaggaaaaacggcattcgcactacacatggcacgaagcgcagcaatggcagggtatgccgtagctgtctacagcctcgagatgcaaggggaacgactagcagaccgatggctgacagcggtcagcgaaatcagcgcccgccattggcgatcgggaaccgtcagccaacaggaactcgtagaggcacgcacaacagccgctgacctcaaacgcctgccgatacacgtagacgacagcacatcggtcaacatggaacatatacgttccagcgcgcgactgctgcaaagccaacatgcgtgcgatgctattattatcgactacctgcaactctgcgacatgacgaccggtcaaaacaaccgcaaccgcgaacaggaagtggcacaagcnacccgcaaggcaaaattgctagccaaagaactgaatgtaccagtcgtactgcttagccagctaaaccgcgaatcggaaaaccgccctgccggccgtcccgaactggctcatctccgcgagagcggagctattgaacaggatgcagacgtcgtcatgctgctctaccgtcccgcccttgcaagggtgacgaccgaccgggaaagtggttatcccaccgaaggtctgggagtagtcatcatagccaagcaacgcaacggagagacaggaaacgtctatttcagacataatccggaaatgaccaagatcaccgaatatgtccctccgttagagtatatgctgaaacatgccaaataagaaacagttacactaataatatacaattttatattacaacatatagcataaatcattttctcattttatttcattatacatacaanatatatagcaaaacacttgactttccctctcatatttcgtatatttgtaatgtcgtaaggacagagaaaattttattacttaaaccttaactttttattgtatgaatgtattagtggagcgctatcagcgcagaaagtatgtgaatcaaccggattcacagatgttgtattatgtacgccagaaatcgggcacagtgagagtgatggacatcaacaagctggcggatgccatcgaagcgaactcctcgctcactgcaggagacgtgaagcatgccattgaggcttttgtcgagcagttacgcctatcgcttacccagggcgacaaggtgaaggttgacggattgggtacgtttcatatcacattgagcagcgagggggcagaaaaagagaaagattgcacggtgcgcagcatccgcaaagtaaatgtccgtttcgtggcggacaaggcgcttcaattggtaaatacgagccatgccactacccgaggcgaaaataatgtcgattttatcctggcagcaaagggcgacggagaaggtgacgatgacggaaatagcggnagcggtggaaacagcggcggaagcggagaagctccggacccggcagcttaatctttaaaacagcgccgcatggatattacggagtgatttctacagttactctcnatgcggtttctgttttcttctacatttattttttaattctcaattttcaatcctcaatttattaaaatgcttgataaaatcatagagatcattataacgatcctgccctttctgggcagtaaccgcaaaaagcgcaaagtaatggcgcaagaagta

SEQ ID NO: 2 - DNA, 4000 bp, Escherica coli
  misc_feature (1972)..(1972): n is a, c, g, or t
  misc_feature (2790)..(4000): any "n"  = A, C, T, or G
tacgccgggccgtctgggaaactacatggatgacgaaggcaaggaagaggcaggccccgctgccggcgcggcaggaaacgcagcgggcgggaacagccagcccgagcgtatcatcgccctccttggcggacgggagaacattgaatttgtggacgcctgcatgaccaggctccgcgtgacagtgaaggatctctccaaggtggctgaacttccggcgtggaaggcagagggcgccatgggccttgtgaagaaagacaacggcatccaggcaatttacggacccaaggcggacgtgctgaaatcggatatcaacgatatcctgtaacaattcagcaccccggaaaaaatgagtgaaatatgaacggggagcctgctcaccgggcagattttgctcaatacgcagaggaaagaactatgagactgcttactatcaatattcacagccatggaagtgactttgaaccggaactttatcatcagaagatgaaggcgctggcggcatttatgaaggaagaagagatcgatgccgcggcgatccaggaatgcagtgaagaggaggacaggccggtggtctccggccccctccccatgcattgggtgccggccggaccggactcccgcgtccgggaggataactgtgcgctggtcctggcggaggaacttcagggcctgcagcaggagtactggtggacctggaccggagcgaagctcgggtacggaaaatacaatgagggtctggccatcttcagccgccgccctgttacaggcgcggacagtttctatatttccggcgtccgggacttctccaactggaagacccggaaggcgctggcggcctgcaccgctgacgggcctgcctttttgagcgtccacatgggatggtggaatgatccggaggaaaacttccgggggcagatggaacggctgcagaaggcgctccgcgaaaggaagcttcgtccgcaggacggttctgacagtttccttatgggagatttcaacagtcccgcagcgatccgcggagagggaagggacatggtcctggacctcgggtggcgggacagttatgaggatgccgaaataaaagacagcggcatcaccgttccgggaaacatcgacggatggagggacggtgaacatacgggcatgcgcctggattatatctggaccgcaaaaaggcacagggtgcttcagtcaaaggtggtcctgaacgggatcagcgggccggtgctttccgaccatttcggagtcctggcggtgatcgaatgaataaaggagcagacagcatgagagaaagtggaattcttcttgccatcagcagccttccttccgaatacgggatcggctgcttcagcagggaagcatatgagtttgcggaccgcctttcagaggcgggccagagttactggcagatcctgccgctggggccggtgggatacggagattcaccgtaccagtccttctccaccttcgcgggcaacccttactacatttcacctgagacgctggtggaaaagggatggatcactgaggcggactgccgcgaagccggcctttcttccgacccgcgcggtgtggattacgtgctgcagtaccaacgccgctatgagctgctccggaaggcgtacagaaacagccggatcgaagagaatgagaagttccgggcgttcacggagaagacggaatggcttccggactacgcgctgttcatggctctgaaggaagagaacggaggaaggccctggtacgaatgggaagatccgctgagactcagggatccggaagccttggccgcggcgcgggaacgcctggaggaaggcatcggtttctgcagtttcctgcagtttgagttttacgaagagtggatgcagctgaaggactacgtgaaccggaagggaatacggatcatcggagacatcccgatctatgtatccctggacagttcagacgtctgggcggatccggaacttttccngctggatgaaaaccgccgacagaccgcggcggcgggctgcccgccggatggcttcagcgctgtgggacagctctggggcaacccactctatgactgggactatcacaaaaagacctgttttgcctggtggctgaaacgtcttaaaaactgctttgatatttatgatgtgatgcggatcgaccatttccgcggcttcgatgaatatttttccattcctgccggtgcggaggacgcaagagcaggccattgggagaagggacccggcatggatctgttccggaaggtctcggaagccttcccgggacgggagatcatcgcggaggatctggggtatgtgacggacagtgtccggcagctggtgaaggacagcggctatcccgggatgaaggtcctggaatttgcctttgactcaagagattccggctgtgcggaggattaccttccccacaattacgaaaagaacagtgtggtctacaccggcacccatgacaacgagacggtgaccggctggttttccgagggcctgaagccggaggagaaggaggcagtcagagactatttctgcgaccatacgactcccgacgccgggatgcacatacccctgatctgcgccgccatgcgaagcgtcagcagactctgcatcatccccatgcaggaccttctggggtacggaaacgaggcaaggatgaacgctccttccacctacggaaacaactggaaatggcgtcttctgaaggatgaattcggagagaaggaagtgaagacgctgtatgagatcacgaagcggtacggaaggatcggaaaatgagaaaagagganngnnnntnnnnnaanngnnnnntaccnnnnnnnagnncantnannnnntnnnnnnntnnttannncnnnncanngnaatnatcnnnnnnnnnnnnnnntntnnnnnnnnnnnnnnnnnnnnnnnnnnnnncnnngntgtnatnnnnnnnntnnnnnncnnnancngnnntnngntntnntnnnnnnnnnannntnnnncnnnagtannnnnnncncntnnnaannnnnnnnnannnnnntnnnnnnnnnnnnnnnnnannanannncnaannnntnncntcgnnnnnntgnnnnnnnaatnngnnntnnntnnnnnnncnnntnaannnnntnnttcnnnnnnnnnnnnnnnnnngnnnnnnnngntnannnnaannntntnnaannangnnnnannnnannnnngnnannnnnnnnnnnnnntnnnnnnnnnannnnnnnnnnannnnnnnnnngnnnnnnnnannnnnnnnnnnnnnnnnnnnnnnnnnnnnnnnnnnnnnnnnnnnnnnnnnnnnnnnnnnnnnnnnnnnnnnnnnnnnnnnnnnnnnnnnnnnnngnnnnannnnnnnnnnnnnnnnnnntnnnntntnnnntnnnnnnnnncnnnnnnnttnttnnnnngcnnnnnnnnnannnnnnnngnnnnnnnnnnnnnnnnnnnnnnnnnnnnnnnnnannnnnnnnnnnngnnnnnnnnnnnnnagnnncnnnnnnnnnnnncnnncnnntnnnnnnantannnnnnnnnnnnnnnnnnnnnnnnnnnnnnnnnnnnnnnnnngnnncnnnnnnnnntnnnannnnncnnnnnnnncnnnnncnncnnnnnnncnnnnnnnnannannncnnnnnnnnnnnnnnnnnnnnnnnnnnnntntntnnnnnnnnnnnnnnnnnnnnnnngnnnnnnnnngnnnnnnnnnangnnnnnnnnnnnnnnnnnnnnnnnnnnnnnnnnnnnnnnntnnnnnnnnnnnnnnnnnnnnnnnnnnanannnnnnnnnnnnnnnnnnnnnnnnnnnnnnnnnannnnnnnnnnnnnnnnnngnnnnnnnnnnnnnnnnnnnncnnnnnnnnnnnnnnnnnnnnnnnnnnnnnnnnnnnnnnnnnnnnnnnnnnnnannnnnnnnnnnnnnnnnnnnnnnnnnnnnnnnnnnnntnnnnnnnnnnnnnnnnnnnnnnnnnnnnnnngnnnnnnnnnnnnn

SEQ ID NO: 3 - protein, 241 aa, Artificial Sequence
  Synthetic
MKKQSNQTVRMATPGQIKDVISAVVESIPVNNLTYEMAQYFIGRKKWLGTEMKKIFSVDNSHADLIADWQAFYCGLGIDCDLSGVIIPDDPGGFGRVIIMAQGITPQSGYDLCAKFFPCWKYTDKNLDEVVVSERTAKDVYAIRVRDRVEADEELRNRSYNDLKRQGIIGITLEEREIFELKFFKETAGKHLDIKNWTFCLGSCYDGGNVPSASWRSGEFEVDWCNPGDVFDDLCSRQAVS

SEQ ID NO: 4 - protein, 192 aa, Artificial Sequence
  Synthetic
MRTFEITEKEVAAAFREAESGEAKKILAALFCKEEMVKPTLDDYKTIRTYEDACKALGEPIFEDPNNLPNHIIALMKLETISRALWGRNFQPKPDGEGSKVYWYPWFALWTKKEVEDMNPEQRGALVSANADLGAFAGFGCLAALYRSSSADAGIGFRLCQETEEKAKYFGQQFIELWAEYLKFNFTVGNRL

SEQ ID NO: 5 - DNA, 6055 bp, Escherica coli
aagcttggctgttttggcggatgagagaagattttcagcctgatacagattaaatcagaacgcagaagcggtctgataaaacagaatttgcctggcggcagtagcgcggtggtcccacctgaccccatgccgaactcagaagtgaaacgccgtagcgccgatggtagtgtggggtctccccatgcgagagtagggaactgccaggcatcaaataaaacgaaaggctcagtcgaaagactgggcctttcgttttatctgttgtttgtcggtgaacgctctcctgagtaggacaaatccgccgggagcggatttgaacgttgcgaagcaacggcccggagggtggcgggcaggacgcccgccataaactgccaggcatcaaattaagcagaaggccatcctgacggatggcctttttgcgtttctacaaactcttttgtttatttttctaaatacattcaaatatgtatccgctcatgagacaataaccctgataaatgcttcaataatattgaaaaaggaagagtatgagtattcaacatttccgtgtcgcccttattcccttttttgcggcattttgccttcctgtttttgctcacccagaaacgctggtgaaagtaaaagatgctgaagatcagttgggtgcacgagtgggttacatcgaactggatctcaacagcggtaagatccttgagagttttcgccccgaagaacgttttccaatgatgagcacttttaaagttctgctatgtggcgcggtattatcccgtgttgacgccgggcaagagcaactcggtcgccgcatacactattctcagaatgacttggttgagtactcaccagtcacagaaaagcatcttacggatggcatgacagtaagagaattatgcagtgctgccataaccatgagtgataacactgcggccaacttacttctgacaacgatcggaggaccgaaggagctaaccgcttttttgcacaacatgggggatcatgtaactcgccttgatcgttgggaaccggagctgaatgaagccataccaaacgacgagcgtgacaccacgatgcctgcagcaatggcaacaacgttgcgcaaactattaactggcgaactacttactctagcttcccggcaacaattaatagactggatggaggcggataaagttgcaggaccacttctgcgctcggcccttccggctggctggtttattgctgataaatctggagccggtgagcgtgggtctcgcggtatcattgcagcactggggccagatggtaagccctcccgtatcgtagttatctacacgacggggagtcaggcaactatggatgaacgaaatagacagatcgctgagataggtgcctcactgattaagcattggtaactgtcagaccaagtttactcatatatactttagattgatttacgcgccctgtagcggcgcattaagcgcggcgggtgtggtggttacgcgcagcgtgaccgctacacttgccagcgccctagcgcccgctcctttcgctttcttcccttcctttctcgccacgttcgccggctttccccgtcaagctctaaatcgggggctccctttagggttccgatttagtgctttacggcacctcgaccccaaaaaacttgatttgggtgatggttcacgtagtgggccatcgccctgatagacggtttttcgccctttgacgttggagtccacgttctttaatagtggactcttgttccaaacttgaacaacactcaaccctatctcgggctattcttttgatttataagggattttgccgatttcggcctattggttaaaaaatgagctgatttaacaaaaatttaacgcgaattttaacaaaatattaacgtttacaatttaaaaggatctaggtgaagatcctttttgataatctcatgaccaaaatcccttaacgtgagttttcgttccactgagcgtcagaccccgtagaaaagatcaaaggatcttcttgagatcctttttttctgcgcgtaatctgctgcttgcaaacaaaaaaaccaccgctaccagcggtggtttgtttgccggatcaagagctaccaactctttttccgaaggtaactggcttcagcagagcgcagataccaaatactgtccttctagtgtagccgtagttaggccaccacttcaagaactctgtagcaccgcctacatacctcgctctgctaatcctgttaccagtggctgctgccagtggcgataagtcgtgtcttaccgggttggactcaagacgatagttaccggataaggcgcagcggtcgggctgaacggggggttcgtgcacacagcccagcttggagcgaacgacctacaccgaactgagatacctacagcgtgagctatgagaaagcgccacgcttcccgaagggagaaaggcggacaggtatccggtaagcggcagggtcggaacaggagagcgcacgagggagcttccagggggaaacgcctggtatctttatagtcctgtcgggtttcgccacctctgacttgagcgtcgatttttgtgatgctcgtcaggggggcggagcctatggaaaaacgccagcaacgcggcctttttacggttcctggccttttgctggccttttgctcacatgttctttcctgcgttatcccctgattctgtggataaccgtattaccgcctttgagtgagctgataccgctcgccgcagccgaacgaccgagcgcagcgagtcagtgagcgaggaagcggaagagcgcctgatgcggtattttctccttacgcatctgtgcggtatttcacaccgcatacgtacgggcgcgccttaagacccactttcacatttaagttgtttttctaatccgcatatgatcaattcaaggccgaataagaaggctggctctgcaccttggtgatcaaataattcgatagcttgtcgtaataatggcggcatactatcagtagtaggtgtttccctttcttctttagcgacttgatgctcttgatcttccaatacgcaacctaaagtaaaatgccccacagcgctgagtgcatataatgcattctctagtgaaaaaccttgttggcataaaaaggctaattgattttcgagagtttcatactgtttttctgtaggccgtgtacctaaatgtacttttgctccatcgcgatgacttagtaaagcacatctaaaacttttagcgttattacgtaaaaaatcttgccagctttccccttctaaagggcaaaagtgagtatggtgcctatctaacatctcaatggctaaggcgtcgagcaaagcccgcttattttttacatgccaatacaatgtaggctgctctacacctagcttctgggcgagtttacgggttgttaaaccttcgattccgacctcattaagcagctctaatgcgctgttaatcactttacttttatctaatctagacatcattaattcctaatttttgttgacactctatcgttgatagagttattttaccactccctatcagtgatagagaaaagaattcaaaagatctaaagaggagaaaggatctatggactacaaagacgatgacgacaagggatccatgaagaaacagagcaatcagaccgttcgtatggcaacaccgggtcagattaaagatgttattagcgcagttgttgaaagcattccggtgaataatctgacatatgaaatggcccagtatttcatcggtcgtaaaaaatggctgggcaccgaaatgaaaaaaatctttagcgtggataacagccatgcagatctgattgcagattggcaggcattttattgtggtctgggtattgattgcgatctgagcggtgttattattccggatgatcctggtggttttggtcgtgtgattattatggcacagggtattacaccgcagagcggttatgatctgtgtgcaaaattctttccgtgctggaaatataccgataaaaacctggatgaagttgtggttagcgaacgtaccgcaaaagatgtttatgcaattcgtgttcgtgatcgtgttgaagcagatgaagaactgcgtaatcgtagctataatgatctgaaacgtcagggcattattggcattaccctggaagaacgtgaaatctttgaactgaaatttttcaaagaaaccgcaggcaaacacctggatatcaaaaattggaccttttgtctgggttcgtgctatgacggcggcaatgtgccgagcgcctcgtggcgcagcggcgagttcgaggtcgactggtgcaatcccggcgatgtcttcgacgatctgtgttcccgtcaggcagttagctaatgcctgttcatctgtgttctgcggccctgcgcgatagcgcgggccgtctctaaaagaggagaaaggatctatgcaacagcttcaagtcgcgcagcgggtcgaggcgatgatcgagtatggctatatagctgtacggcatttcccgaaatcggagcgtcacgtgctcagcgccgagctgcgcggctctatgtggcggctgctgcggctcgtgatcgtctgcggcaagcggtatcacaaaaagacgacactcgcagagctggataccgaactggagctgctgcgccgcgaagtgcggctcgcaaaagacctgaagttcctgccgttccgacaatacgaaatctggtcgcgtcatctcgacgagatcggtcgcatgatcggcggctggattaaacacgcaaaacagggttaagcgcatttgggttcgtgctatgacgacggcaatgtgccgaacgccaattggaacagcggcaagttcaaggtcaactggtacaatcccgacaatgtcaacgacaatctgtgttcccgtcagcttgaagatcgtcagaaacagcgcggtcacggtggcgctgtcagcacgacatcaaaagggcgcttgatcctcggcccatgccgaaacattaacaggcatcgatcgtgtagtaggcctcagccgaggctcgatcgtcgccgctttggctcgataaagaggagaaaggatctatgaagacatacaacaacctgttcccggagatatacagcttcgacaacctgcatgacgcctacgtccgcgcgcgccgcggcaaacgccaccaggccgacgtgctgcgcttcgagcaaaacctcgagggcgagctcatacaactacagaacgaactgatctggcgcgagtacgaaactggcccgtatcggcgtttccatgtgcacgagccgaaaaagcgtttggtcgccgcgctgccctttcgcgatcgcgtcgtacagcacagcctaatcgccgcgatcgagcccatttgggagtcgcgattcatcgatcagagctacgcctgccgtcccggccggggcgtgcaccgcggtgcagacaaagcccaacaatggctgcgcgaggtgcgggccacacacggccgcgtctacgcgctcaaggccgacgtcgcaggttatttcgcatcgatcgatcacgacgttctgcgcacgcagctagaacgccgaatcgcttgccgtccaacgctatacctgctgctcggcatcatcgaaacctggcatcccggccttcccatcggcaacctcacgtcgcagctgtgcgccaatatctatttgcacgatttcgacgtattcgcaaaacagcacgtcggcgcacgccgctatatgaggtatatggatgactggctcatcgtcgaccacgacaaagcgcgcctgcacgcacagcgccgcgtgctcgaggactggctgcacgacaatctgcgcctgcagctcaataacaagacccagatatttcccgtcagcccacgccacggccgcggactcgacttcctcggatatcgaatatggcccacacatcgaaagattcgcaaaaacagcgtcaaacggatgcagaaaaaactacgtgcgctcgaacgccgctacgccgccggcgatatcgacctggtcgacatcgagcccgtgatccagagctgggtcgcccacgcctcccacgccagcagctatcagatccgccgcgcggtgctggagcgcgcggttttcaaacgccaataagcatgc

SEQ ID NO: 6 - DNA, 6072 bp, Escherica coli
aagcttggctgttttggcggatgagagaagattttcagcctgatacagattaaatcagaacgcagaagcggtctgataaaacagaatttgcctggcggcagtagcgcggtggtcccacctgaccccatgccgaactcagaagtgaaacgccgtagcgccgatggtagtgtggggtctccccatgcgagagtagggaactgccaggcatcaaataaaacgaaaggctcagtcgaaagactgggcctttcgttttatctgttgtttgtcggtgaacgctctcctgagtaggacaaatccgccgggagcggatttgaacgttgcgaagcaacggcccggagggtggcgggcaggacgcccgccataaactgccaggcatcaaattaagcagaaggccatcctgacggatggcctttttgcgtttctacaaactcttttgtttatttttctaaatacattcaaatatgtatccgctcatgagacaataaccctgataaatgcttcaataatattgaaaaaggaagagtatgagtattcaacatttccgtgtcgcccttattcccttttttgcggcattttgccttcctgtttttgctcacccagaaacgctggtgaaagtaaaagatgctgaagatcagttgggtgcacgagtgggttacatcgaactggatctcaacagcggtaagatccttgagagttttcgccccgaagaacgttttccaatgatgagcacttttaaagttctgctatgtggcgcggtattatcccgtgttgacgccgggcaagagcaactcggtcgccgcatacactattctcagaatgacttggttgagtactcaccagtcacagaaaagcatcttacggatggcatgacagtaagagaattatgcagtgctgccataaccatgagtgataacactgcggccaacttacttctgacaacgatcggaggaccgaaggagctaaccgcttttttgcacaacatgggggatcatgtaactcgccttgatcgttgggaaccggagctgaatgaagccataccaaacgacgagcgtgacaccacgatgcctgcagcaatggcaacaacgttgcgcaaactattaactggcgaactacttactctagcttcccggcaacaattaatagactggatggaggcggataaagttgcaggaccacttctgcgctcggcccttccggctggctggtttattgctgataaatctggagccggtgagcgtgggtctcgcggtatcattgcagcactggggccagatggtaagccctcccgtatcgtagttatctacacgacggggagtcaggcaactatggatgaacgaaatagacagatcgctgagataggtgcctcactgattaagcattggtaactgtcagaccaagtttactcatatatactttagattgatttacgcgccctgtagcggcgcattaagcgcggcgggtgtggtggttacgcgcagcgtgaccgctacacttgccagcgccctagcgcccgctcctttcgctttcttcccttcctttctcgccacgttcgccggctttccccgtcaagctctaaatcgggggctccctttagggttccgatttagtgctttacggcacctcgaccccaaaaaacttgatttgggtgatggttcacgtagtgggccatcgccctgatagacggtttttcgccctttgacgttggagtccacgttctttaatagtggactcttgttccaaacttgaacaacactcaaccctatctcgggctattcttttgatttataagggattttgccgatttcggcctattggttaaaaaatgagctgatttaacaaaaatttaacgcgaattttaacaaaatattaacgtttacaatttaaaaggatctaggtgaagatcctttttgataatctcatgaccaaaatcccttaacgtgagttttcgttccactgagcgtcagaccccgtagaaaagatcaaaggatcttcttgagatcctttttttctgcgcgtaatctgctgcttgcaaacaaaaaaaccaccgctaccagcggtggtttgtttgccggatcaagagctaccaactctttttccgaaggtaactggcttcagcagagcgcagataccaaatactgtccttctagtgtagccgtagttaggccaccacttcaagaactctgtagcaccgcctacatacctcgctctgctaatcctgttaccagtggctgctgccagtggcgataagtcgtgtcttaccgggttggactcaagacgatagttaccggataaggcgcagcggtcgggctgaacggggggttcgtgcacacagcccagcttggagcgaacgacctacaccgaactgagatacctacagcgtgagctatgagaaagcgccacgcttcccgaagggagaaaggcggacaggtatccggtaagcggcagggtcggaacaggagagcgcacgagggagcttccagggggaaacgcctggtatctttatagtcctgtcgggtttcgccacctctgacttgagcgtcgatttttgtgatgctcgtcaggggggcggagcctatggaaaaacgccagcaacgcggcctttttacggttcctggccttttgctggccttttgctcacatgttctttcctgcgttatcccctgattctgtggataaccgtattaccgcctttgagtgagctgataccgctcgccgcagccgaacgaccgagcgcagcgagtcagtgagcgaggaagcggaagagcgcctgatgcggtattttctccttacgcatctgtgcggtatttcacaccgcatacgtacgggcgcgccttaagacccactttcacatttaagttgtttttctaatccgcatatgatcaattcaaggccgaataagaaggctggctctgcaccttggtgatcaaataattcgatagcttgtcgtaataatggcggcatactatcagtagtaggtgtttccctttcttctttagcgacttgatgctcttgatcttccaatacgcaacctaaagtaaaatgccccacagcgctgagtgcatataatgcattctctagtgaaaaaccttgttggcataaaaaggctaattgattttcgagagtttcatactgtttttctgtaggccgtgtacctaaatgtacttttgctccatcgcgatgacttagtaaagcacatctaaaacttttagcgttattacgtaaaaaatcttgccagctttccccttctaaagggcaaaagtgagtatggtgcctatctaacatctcaatggctaaggcgtcgagcaaagcccgcttattttttacatgccaatacaatgtaggctgctctacacctagcttctgggcgagtttacgggttgttaaaccttcgattccgacctcattaagcagctctaatgcgctgttaatcactttacttttatctaatctagacatcattaattcctaatttttgttgacactctatcgttgatagagttattttaccactccctatcagtgatagagaaaagaattcaaaagatctaaagaggagaaaggatctatggactacaaagacgatgacgacaagggatccatgaagaaacagagcaatcagaccgttcgtatggcaacaccgggtcagattaaagatgttattagcgcagttgttgaaagcattccggtgaataatctgacatatgaaatggcccagtatttcatcggtcgtaaaaaatggctgggcaccgaaatgaaaaaaatctttagcgtggataacagccatgcagatctgattgcagattggcaggcattttattgtggtctgggtattgattgcgatctgagcggtgttattattccggatgatcctggtggttttggtcgtgtgattattatggcacagggtattacaccgcagagcggttatgatctgtgtgcaaaattctttccgtgctggaaatataccgataaaaacctggatgaagttgtggttagcgaacgtaccgcaaaagatgtttatgcaattcgtgttcgtgatcgtgttgaagcagatgaagaactgcgtaatcgtagctataatgatctgaaacgtcagggcattattggcattaccctggaagaacgtgaaatctttgaactgaaatttttcaaagaaaccgcaggcaaacacctggatatcaaaaattggaccttttgtctgggttcgtgctatgacggcggcaatgtgccgagcgcctcgtggcgcagcggcgagttcgaggtcgactggtgcaatcccggcgatgtcttcgacgatctgtgttcccgtcaggcagttagctaatgcctgttcatctgtgttctgcggccctgcgcgatagcgcgggccgtctctaaaagaggagaaaggatctatgcaacagcttcaagtcgcgcagcgggtcgaggcgatgatcgagtatggctatatagctgtacggcatttcccgaaatcggagcgtcacgtgctcagcgccgagctgcgcggctctatgtggcggctgctgcggctcgtgatcgtctgcggcaagcggtatcacaaaaagacgacactcgcagagctggataccgaactggagctgctgcgccgcgaagtgcggctcgcaaaagacctgaagttcctgccgttccgacaatacgaaatctggtcgcgtcatctcgacgagatcggtcgcatgatcggcggctggattaaacacgcaaaacagggttaagcgcatttgggttcgtgctatgacgacggcaatgtgccgaacgccaattggaacagcggcaagttcaaggtcaactggtacaatcccgacaatgtcaacgacaatctgtgttcccgtcagtcggttgccggcctgctcttgaagatcgtcagaaacagcgcggtcacggtggcgctgtcagcacgacatcaaaagggcgcttgatcctcggcccatgccgaaacattaacaggcatcgatcgtgtagtaggcctcagccgaggctcgatcgtcgccgctttggctcgataaagaggagaaaggatctatgaagacatacaacaacctgttcccggagatatacagcttcgacaacctgcatgacgcctacgtccgcgcgcgccgcggcaaacgccaccaggccgacgtgctgcgcttcgagcaaaacctcgagggcgagctcatacaactacagaacgaactgatctggcgcgagtacgaaactggcccgtatcggcgtttccatgtgcacgagccgaaaaagcgtttggtcgccgcgctgccctttcgcgatcgcgtcgtacagcacagcctaatcgccgcgatcgagcccatttgggagtcgcgattcatcgatcagagctacgcctgccgtcccggccggggcgtgcaccgcggtgcagacaaagcccaacaatggctgcgcgaggtgcgggccacacacggccgcgtctacgcgctcaaggccgacgtcgcaggttatttcgcatcgatcgatcacgacgttctgcgcacgcagctagaacgccgaatcgcttgccgtccaacgctatacctgctgctcggcatcatcgaaacctggcatcccggccttcccatcggcaacctcacgtcgcagctgtgcgccaatatctatttgcacgatttcgacgtattcgcaaaacagcacgtcggcgcacgccgctatatgaggtatatggatgactggctcatcgtcgaccacgacaaagcgcgcctgcacgcacagcgccgcgtgctcgaggactggctgcacgacaatctgcgcctgcagctcaataacaagacccagatatttcccgtcagcccacgccacggccgcggactcgacttcctcggatatcgaatatggcccacacatcgaaagattcgcaaaaacagcgtcaaacggatgcagaaaaaactacgtgcgctcgaacgccgctacgccgccggcgatatcgacctggtcgacatcgagcccgtgatccagagctgggtcgcccacgcctcccacgccagcagctatcagatccgccgcgcggtgctggagcgcgcggttttcaaacgccaataagcatgc

SEQ ID NO: 7 - DNA, 6113 bp, Escherica coli
aagcttggctgttttggcggatgagagaagattttcagcctgatacagattaaatcagaacgcagaagcggtctgataaaacagaatttgcctggcggcagtagcgcggtggtcccacctgaccccatgccgaactcagaagtgaaacgccgtagcgccgatggtagtgtggggtctccccatgcgagagtagggaactgccaggcatcaaataaaacgaaaggctcagtcgaaagactgggcctttcgttttatctgttgtttgtcggtgaacgctctcctgagtaggacaaatccgccgggagcggatttgaacgttgcgaagcaacggcccggagggtggcgggcaggacgcccgccataaactgccaggcatcaaattaagcagaaggccatcctgacggatggcctttttgcgtttctacaaactcttttgtttatttttctaaatacattcaaatatgtatccgctcatgagacaataaccctgataaatgcttcaataatattgaaaaaggaagagtatgagtattcaacatttccgtgtcgcccttattcccttttttgcggcattttgccttcctgtttttgctcacccagaaacgctggtgaaagtaaaagatgctgaagatcagttgggtgcacgagtgggttacatcgaactggatctcaacagcggtaagatccttgagagttttcgccccgaagaacgttttccaatgatgagcacttttaaagttctgctatgtggcgcggtattatcccgtgttgacgccgggcaagagcaactcggtcgccgcatacactattctcagaatgacttggttgagtactcaccagtcacagaaaagcatcttacggatggcatgacagtaagagaattatgcagtgctgccataaccatgagtgataacactgcggccaacttacttctgacaacgatcggaggaccgaaggagctaaccgcttttttgcacaacatgggggatcatgtaactcgccttgatcgttgggaaccggagctgaatgaagccataccaaacgacgagcgtgacaccacgatgcctgcagcaatggcaacaacgttgcgcaaactattaactggcgaactacttactctagcttcccggcaacaattaatagactggatggaggcggataaagttgcaggaccacttctgcgctcggcccttccggctggctggtttattgctgataaatctggagccggtgagcgtgggtctcgcggtatcattgcagcactggggccagatggtaagccctcccgtatcgtagttatctacacgacggggagtcaggcaactatggatgaacgaaatagacagatcgctgagataggtgcctcactgattaagcattggtaactgtcagaccaagtttactcatatatactttagattgatttacgcgccctgtagcggcgcattaagcgcggcgggtgtggtggttacgcgcagcgtgaccgctacacttgccagcgccctagcgcccgctcctttcgctttcttcccttcctttctcgccacgttcgccggctttccccgtcaagctctaaatcgggggctccctttagggttccgatttagtgctttacggcacctcgaccccaaaaaacttgatttgggtgatggttcacgtagtgggccatcgccctgatagacggtttttcgccctttgacgttggagtccacgttctttaatagtggactcttgttccaaacttgaacaacactcaaccctatctcgggctattcttttgatttataagggattttgccgatttcggcctattggttaaaaaatgagctgatttaacaaaaatttaacgcgaattttaacaaaatattaacgtttacaatttaaaaggatctaggtgaagatcctttttgataatctcatgaccaaaatcccttaacgtgagttttcgttccactgagcgtcagaccccgtagaaaagatcaaaggatcttcttgagatcctttttttctgcgcgtaatctgctgcttgcaaacaaaaaaaccaccgctaccagcggtggtttgtttgccggatcaagagctaccaactctttttccgaaggtaactggcttcagcagagcgcagataccaaatactgtccttctagtgtagccgtagttaggccaccacttcaagaactctgtagcaccgcctacatacctcgctctgctaatcctgttaccagtggctgctgccagtggcgataagtcgtgtcttaccgggttggactcaagacgatagttaccggataaggcgcagcggtcgggctgaacggggggttcgtgcacacagcccagcttggagcgaacgacctacaccgaactgagatacctacagcgtgagctatgagaaagcgccacgcttcccgaagggagaaaggcggacaggtatccggtaagcggcagggtcggaacaggagagcgcacgagggagcttccagggggaaacgcctggtatctttatagtcctgtcgggtttcgccacctctgacttgagcgtcgatttttgtgatgctcgtcaggggggcggagcctatggaaaaacgccagcaacgcggcctttttacggttcctggccttttgctggccttttgctcacatgttctttcctgcgttatcccctgattctgtggataaccgtattaccgcctttgagtgagctgataccgctcgccgcagccgaacgaccgagcgcagcgagtcagtgagcgaggaagcggaagagcgcctgatgcggtattttctccttacgcatctgtgcggtatttcacaccgcatacgtacgggcgcgccttaagacccactttcacatttaagttgtttttctaatccgcatatgatcaattcaaggccgaataagaaggctggctctgcaccttggtgatcaaataattcgatagcttgtcgtaataatggcggcatactatcagtagtaggtgtttccctttcttctttagcgacttgatgctcttgatcttccaatacgcaacctaaagtaaaatgccccacagcgctgagtgcatataatgcattctctagtgaaaaaccttgttggcataaaaaggctaattgattttcgagagtttcatactgtttttctgtaggccgtgtacctaaatgtacttttgctccatcgcgatgacttagtaaagcacatctaaaacttttagcgttattacgtaaaaaatcttgccagctttccccttctaaagggcaaaagtgagtatggtgcctatctaacatctcaatggctaaggcgtcgagcaaagcccgcttattttttacatgccaatacaatgtaggctgctctacacctagcttctgggcgagtttacgggttgttaaaccttcgattccgacctcattaagcagctctaatgcgctgttaatcactttacttttatctaatctagacatcattaattcctaatttttgttgacactctatcgttgatagagttattttaccactccctatcagtgatagagaaaagaattcaaaagatctaaagaggagaaaggatctatggactacaaagacgatgacgacaagggatccatgaagaaacagagcaatcagaccgttcgtatggcaacaccgggtcagattaaagatgttattagcgcagttgttgaaagcattccggtgaataatctgacatatgaaatggcccagtatttcatcggtcgtaaaaaatggctgggcaccgaaatgaaaaaaatctttagcgtggataacagccatgcagatctgattgcagattggcaggcattttattgtggtctgggtattgattgcgatctgagcggtgttattattccggatgatcctggtggttttggtcgtgtgattattatggcacagggtattacaccgcagagcggttatgatctgtgtgcaaaattctttccgtgctggaaatataccgataaaaacctggatgaagttgtggttagcgaacgtaccgcaaaagatgtttatgcaattcgtgttcgtgatcgtgttgaagcagatgaagaactgcgtaatcgtagctataatgatctgaaacgtcagggcattattggcattaccctggaagaacgtgaaatctttgaactgaaatttttcaaagaaaccgcaggcaaacacctggatatcaaaaattggaccttttgtctgggttcgtgctatgacgacggcaatgtgccgaacgccaattggaacagcggcaagttcaaggtcaactggtacaatcccgacaatgtcaacgacaatctgtgttcccgtcaggcggtttcctagtcggttgccggcctgcttttgttgcctgatgcctgttcatctgtgttctgcggccctgcgcgatagcgcgggccgtctctaaaagaggagaaaggatctatgcaacagcttcaagtcgcgcagcgggtcgaggcgatgatcgagtatggctatatagctgtacggcatttcccgaaatcggagcgtcacgtgctcagcgccgagctgcgcggctctatgtggcggctgctgcggctcgtgatcgtctgcggcaagcggtatcacaaaaagacgacactcgcagagctggataccgaactggagctgctgcgccgcgaagtgcggctcgcaaaagacctgaagttcctgccgttccgacaatacgaaatctggtcgcgtcatctcgacgagatcggtcgcatgatcggcggctggattaaacacgcaaaacagggttaagcgcatttgggttcgtgctatgacgacggcaatgtgccgaacgccaattggaacagcggcaagttcaaggtcaactggtacaatcccgacaatgtcaacgacaatctgtgttcccgtcaggcggtttcctagtcggttgccggcctgctcttgaagatcgtcagaaacagcgcggtcacggtggcgctgtcagcacgacatcaaaagggcgcttgatcctcggcccatgccgaaacattaacaggcatcgatcgtgtagtaggcctcagccgaggctcgatcgtcgccgctttggctcgataaagaggagaaaggatctatgaagacatacaacaacctgttcccggagatatacagcttcgacaacctgcatgacgcctacgtccgcgcgcgccgcggcaaacgccaccaggccgacgtgctgcgcttcgagcaaaacctcgagggcgagctcatacaactacagaacgaactgatctggcgcgagtacgaaactggcccgtatcggcgtttccatgtgcacgagccgaaaaagcgtttggtcgccgcgctgccctttcgcgatcgcgtcgtacagcacagcctaatcgccgcgatcgagcccatttgggagtcgcgattcatcgatcagagctacgcctgccgtcccggccggggcgtgcaccgcggtgcagacaaagcccaacaatggctgcgcgaggtgcgggccacacacggccgcgtctacgcgctcaaggccgacgtcgcaggttatttcgcatcgatcgatcacgacgttctgcgcacgcagctagaacgccgaatcgcttgccgtccaacgctatacctgctgctcggcatcatcgaaacctggcatcccggccttcccatcggcaacctcacgtcgcagctgtgcgccaatatctatttgcacgatttcgacgtattcgcaaaacagcacgtcggcgcacgccgctatatgaggtatatggatgactggctcatcgtcgaccacgacaaagcgcgcctgcacgcacagcgccgcgtgctcgaggactggctgcacgacaatctgcgcctgcagctcaataacaagacccagatatttcccgtcagcccacgccacggccgcggactcgacttcctcggatatcgaatatggcccacacatcgaaagattcgcaaaaacagcgtcaaacggatgcagaaaaaactacgtgcgctcgaacgccgctacgccgccggcgatatcgacctggtcgacatcgagcccgtgatccagagctgggtcgcccacgcctcccacgccagcagctatcagatccgccgcgcggtgctggagcgcgcggttttcaaacgccaataagcatgc

SEQ ID NO: 8 - DNA, 6061 bp, Escherica coli
aagcttggctgttttggcggatgagagaagattttcagcctgatacagattaaatcagaacgcagaagcggtctgataaaacagaatttgcctggcggcagtagcgcggtggtcccacctgaccccatgccgaactcagaagtgaaacgccgtagcgccgatggtagtgtggggtctccccatgcgagagtagggaactgccaggcatcaaataaaacgaaaggctcagtcgaaagactgggcctttcgttttatctgttgtttgtcggtgaacgctctcctgagtaggacaaatccgccgggagcggatttgaacgttgcgaagcaacggcccggagggtggcgggcaggacgcccgccataaactgccaggcatcaaattaagcagaaggccatcctgacggatggcctttttgcgtttctacaaactcttttgtttatttttctaaatacattcaaatatgtatccgctcatgagacaataaccctgataaatgcttcaataatattgaaaaaggaagagtatgagtattcaacatttccgtgtcgcccttattcccttttttgcggcattttgccttcctgtttttgctcacccagaaacgctggtgaaagtaaaagatgctgaagatcagttgggtgcacgagtgggttacatcgaactggatctcaacagcggtaagatccttgagagttttcgccccgaagaacgttttccaatgatgagcacttttaaagttctgctatgtggcgcggtattatcccgtgttgacgccgggcaagagcaactcggtcgccgcatacactattctcagaatgacttggttgagtactcaccagtcacagaaaagcatcttacggatggcatgacagtaagagaattatgcagtgctgccataaccatgagtgataacactgcggccaacttacttctgacaacgatcggaggaccgaaggagctaaccgcttttttgcacaacatgggggatcatgtaactcgccttgatcgttgggaaccggagctgaatgaagccataccaaacgacgagcgtgacaccacgatgcctgcagcaatggcaacaacgttgcgcaaactattaactggcgaactacttactctagcttcccggcaacaattaatagactggatggaggcggataaagttgcaggaccacttctgcgctcggcccttccggctggctggtttattgctgataaatctggagccggtgagcgtgggtctcgcggtatcattgcagcactggggccagatggtaagccctcccgtatcgtagttatctacacgacggggagtcaggcaactatggatgaacgaaatagacagatcgctgagataggtgcctcactgattaagcattggtaactgtcagaccaagtttactcatatatactttagattgatttacgcgccctgtagcggcgcattaagcgcggcgggtgtggtggttacgcgcagcgtgaccgctacacttgccagcgccctagcgcccgctcctttcgctttcttcccttcctttctcgccacgttcgccggctttccccgtcaagctctaaatcgggggctccctttagggttccgatttagtgctttacggcacctcgaccccaaaaaacttgatttgggtgatggttcacgtagtgggccatcgccctgatagacggtttttcgccctttgacgttggagtccacgttctttaatagtggactcttgttccaaacttgaacaacactcaaccctatctcgggctattcttttgatttataagggattttgccgatttcggcctattggttaaaaaatgagctgatttaacaaaaatttaacgcgaattttaacaaaatattaacgtttacaatttaaaaggatctaggtgaagatcctttttgataatctcatgaccaaaatcccttaacgtgagttttcgttccactgagcgtcagaccccgtagaaaagatcaaaggatcttcttgagatcctttttttctgcgcgtaatctgctgcttgcaaacaaaaaaaccaccgctaccagcggtggtttgtttgccggatcaagagctaccaactctttttccgaaggtaactggcttcagcagagcgcagataccaaatactgtccttctagtgtagccgtagttaggccaccacttcaagaactctgtagcaccgcctacatacctcgctctgctaatcctgttaccagtggctgctgccagtggcgataagtcgtgtcttaccgggttggactcaagacgatagttaccggataaggcgcagcggtcgggctgaacggggggttcgtgcacacagcccagcttggagcgaacgacctacaccgaactgagatacctacagcgtgagctatgagaaagcgccacgcttcccgaagggagaaaggcggacaggtatccggtaagcggcagggtcggaacaggagagcgcacgagggagcttccagggggaaacgcctggtatctttatagtcctgtcgggtttcgccacctctgacttgagcgtcgatttttgtgatgctcgtcaggggggcggagcctatggaaaaacgccagcaacgcggcctttttacggttcctggccttttgctggccttttgctcacatgttctttcctgcgttatcccctgattctgtggataaccgtattaccgcctttgagtgagctgataccgctcgccgcagccgaacgaccgagcgcagcgagtcagtgagcgaggaagcggaagagcgcctgatgcggtattttctccttacgcatctgtgcggtatttcacaccgcatacgtacgggcgcgccttaagacccactttcacatttaagttgtttttctaatccgcatatgatcaattcaaggccgaataagaaggctggctctgcaccttggtgatcaaataattcgatagcttgtcgtaataatggcggcatactatcagtagtaggtgtttccctttcttctttagcgacttgatgctcttgatcttccaatacgcaacctaaagtaaaatgccccacagcgctgagtgcatataatgcattctctagtgaaaaaccttgttggcataaaaaggctaattgattttcgagagtttcatactgtttttctgtaggccgtgtacctaaatgtacttttgctccatcgcgatgacttagtaaagcacatctaaaacttttagcgttattacgtaaaaaatcttgccagctttccccttctaaagggcaaaagtgagtatggtgcctatctaacatctcaatggctaaggcgtcgagcaaagcccgcttattttttacatgccaatacaatgtaggctgctctacacctagcttctgggcgagtttacgggttgttaaaccttcgattccgacctcattaagcagctctaatgcgctgttaatcactttacttttatctaatctagacatcattaattcctaatttttgttgacactctatcgttgatagagttattttaccactccctatcagtgatagagaaaagaattcaaaagatctaaagaggagaaaggatctatggactacaaagacgatgacgacaagggatccatgaagaaacagagcaatcagaccgttcgtatggcaacaccgggtcagattaaagatgttattagcgcagttgttgaaagcattccggtgaataatctgacatatgaaatggcccagtatttcatcggtcgtaaaaaatggctgggcaccgaaatgaaaaaaatctttagcgtggataacagccatgcagatctgattgcagattggcaggcattttattgtggtctgggtattgattgcgatctgagcggtgttattattccggatgatcctggtggttttggtcgtgtgattattatggcacagggtattacaccgcagagcggttatgatctgtgtgcaaaattctttccgtgctggaaatataccgataaaaacctggatgaagttgtggttagcgaacgtaccgcaaaagatgtttatgcaattcgtgttcgtgatcgtgttgaagcagatgaagaactgcgtaatcgtagctataatgatctgaaacgtcagggcattattggcattaccctggaagaacgtgaaatctttgaactgaaatttttcaaagaaaccgcaggcaaacacctggatatcaaaaattggaccttttgtctgggttcgtgctatgacggcggcaatgtgccgagcgcctcgtggcgcagcggcgagttcgaggtcgactggtgcaatcccggcgatgtcttcgacgatctgtgttcccgtcaggcttttgttgcctgatgcctgttcatctgtgttctgcggccctgcgcgatagcgcgggccgtctctaaaagaggagaaaggatctatgcaacagcttcaagtcgcgcagcgggtcgaggcgatgatcgagtatggctatatagctgtacggcatttcccgaaatcggagcgtcacgtgctcagcgccgagctgcgcggctctatgtggcggctgctgcggctcgtgatcgtctgcggcaagcggtatcacaaaaagacgacactcgcagagctggataccgaactggagctgctgcgccgcgaagtgcggctcgcaaaagacctgaagttcctgccgttccgacaatacgaaatctggtcgcgtcatctcgacgagatcggtcgcatgatcggcggctggattaaacacgcaaaacagggttaagcgcatttgggttcgtgctatgacgacggcaatgtgccgaacgccaattggaacagcggcaagttcaaggtcaactggtacaatcccgacaatgtcaacgacaatctgtgttcccgtcaggctcttgaagatcgtcagaaacagcgcggtcacggtggcgctgtcagcacgacatcaaaagggcgcttgatcctcggcccatgccgaaacattaacaggcatcgatcgtgtagtaggcctcagccgaggctcgatcgtcgccgctttggctcgataaagaggagaaaggatctatgaagacatacaacaacctgttcccggagatatacagcttcgacaacctgcatgacgcctacgtccgcgcgcgccgcggcaaacgccaccaggccgacgtgctgcgcttcgagcaaaacctcgagggcgagctcatacaactacagaacgaactgatctggcgcgagtacgaaactggcccgtatcggcgtttccatgtgcacgagccgaaaaagcgtttggtcgccgcgctgccctttcgcgatcgcgtcgtacagcacagcctaatcgccgcgatcgagcccatttgggagtcgcgattcatcgatcagagctacgcctgccgtcccggccggggcgtgcaccgcggtgcagacaaagcccaacaatggctgcgcgaggtgcgggccacacacggccgcgtctacgcgctcaaggccgacgtcgcaggttatttcgcatcgatcgatcacgacgttctgcgcacgcagctagaacgccgaatcgcttgccgtccaacgctatacctgctgctcggcatcatcgaaacctggcatcccggccttcccatcggcaacctcacgtcgcagctgtgcgccaatatctatttgcacgatttcgacgtattcgcaaaacagcacgtcggcgcacgccgctatatgaggtatatggatgactggctcatcgtcgaccacgacaaagcgcgcctgcacgcacagcgccgcgtgctcgaggactggctgcacgacaatctgcgcctgcagctcaataacaagacccagatatttcccgtcagcccacgccacggccgcggactcgacttcctcggatatcgaatatggcccacacatcgaaagattcgcaaaaacagcgtcaaacggatgcagaaaaaactacgtgcgctcgaacgccgctacgccgccggcgatatcgacctggtcgacatcgagcccgtgatccagagctgggtcgcccacgcctcccacgccagcagctatcagatccgccgcgcggtgctggagcgcgcggttttcaaacgccaataagcatgc

SEQ ID NO: 9 - DNA, 109 bp, Escherica coli
gcgcctgccgatccgtggtggcaactggaacaacgcctcggatgcggggttgtcggcgttgaacttgaacaacgcccgcggcaatcgcaacagcaacatcggttgccgg

SEQ ID NO: 10 - DNA, 55 bp, Escherica coli
gcgcctgccgatccgtggtggcaactggaacaacgcctcggatgcggggttgtcg

SEQ ID NO: 11 - DNA, 11 bp, Escherica coli
gcgcctgccga

SEQ ID NO: 12 - DNA, 150 bp, Escherica coli
catttcagcacagacagcgtcgagcgcctgccgttccgtggtggctactggagcgacgcctcggatgcggggttgtcggcgttgcgcttgtacaacgcccgcggcgatcgcagcagcttcatcggttgccggcctgcttttgttgcctga

SEQ ID NO: 13 - DNA, 150 bp, Escherica coli
cgcaaaacagggttaagcgcattgcgcctgccgatccgtggtggcaactggaacaacgcctcggatgcggggttgtcggcgttgaacttgaacaacgcccgcggcaatcgcaacagcaacatcggttgccggcctgctcttgaagatcgt

SEQ ID NO: 14 - DNA, 150 bp, Escherica coli
catttcagcacagacagcgtcgagcgcctgccgatccgtggtggccgctggaacaacgcttcggatgcggggttgtcggcgttggtcttgaactacgcccgcggcactcgcctcagcaacatcggttgccggcctgcttttgttcctgat

SEQ ID NO: 15 - DNA, 150 bp, Escherica coli
catttcagcacagacagcgtcgagcgcctgccgatccgtggtggcagctggaacaacgcctcggatgcgggggtgtcggcgtggcacttgaccaacgcccgcggcagtcgccgcagcaacgtcggttgccggcctgcttttgttgcctga

SEQ ID NO: 16 - DNA, 414 bp, Escherica coli
ctgaaccccgacaacagcgacgtggacaagctgttcatccagctggtgcagacctacaaccagctgttcgaggaaaaccccatcaacgccagcggcgtggacgccaaggccatcctgtctgccagactgagcaagagcagacggctggaaaatctgatcgcccagctgcccggcgagaagaagaatggcctgttcggaaacctgattgccctgagcctgggcctgacccccaacttcaagagcaacttcgacctggccgaggatgccaaactgcagctgagcaaggacacctacgacgacgacctggacaacctgctggcccagatcggcgaccagtacgccgacctgtttctggccgccaagaacctgtccgacgccatcctgctgagcgacatcctgagagtgaacaccgag

SEQ ID NO: 17 - DNA, 150 bp, Escherica coli
catttcagcacagacagcgtcgagcgcctgccgatccgtggtggcacatggatctacgcctcggatgcggggttgtcggcgttgttcttgggcaacgcccgcggcaatcgctgcagcagcttcggttgccggcctgcttttgttgcctga

SEQ ID NO: 18 - DNA, 150 bp, Escherica coli
catttcagcacagacagcgtcgagcgcctgccgatccgtggtggcggctggggctgcgcctcggttgcgggggtgtcggcgttgtacttgggcggcgcccgcggcggtcgcggcagcagcgtcggttgccggcctgcttttgttgcctga

SEQ ID NO: 19 - DNA, 150 bp, Escherica coli
catttcagcacagaccgcgtcgagcgcctgccgatccgtggtggcggctggtgcgacgcctcggctgcggggttgtcggcgttgagcttggccaacgcccgcggcgatcgcagcagcttcatcggtttccggcctgcttttgttgcctga

SEQ ID NO: 20 - DNA, 150 bp, Escherica coli
catttcagcacagacagcgtcgagcgcctgccgatccgtggtggcttctggagcggcgcctcggatgcggggttgtcggcgttgcgcttgatccgcgcccgcggcaatcgcagcagcacgatcggttgccggcctgcttttgttgcctga

SEQ ID NO: 21 - DNA, 150 bp, Escherica coli
catttcagcacagacagcgtcgagcgcctgccgatccgtggtggcagctggatcaacgcctcggatgcggggttgtcggcgttgaacttgtactacgcccgcggcattcgccacagcaacatcggttgccggcctgcttttgttgcctga

SEQ ID NO: 22 - DNA, 150 bp, Escherica coli
catttcagcacagacagcgtcgagcgcctgccgatccgtggtggcagctggatcagcgcctcgggtgcggggttgtcggcgttgaacttgagcaacgcgcgcgacattcgcagcagcagcatcggttgccggcctgcttttgttgcctga

SEQ ID NO: 23 - DNA, 11 bp, Escherica coli
gcgcctgccgg

SEQ ID NO: 24 - DNA, 150 bp, Escherica coli; identical to SEQ ID NO: 12

SEQ ID NO: 25 - DNA, 150 bp, Escherica coli; identical to SEQ ID NO: 13

SEQ ID NO: 26 - DNA, 150 bp, Escherica coli
catttcagcacagacagcgtcgagcgcctgccggtccgtggtggctactggaccaacgcctcgggtgcgggggtgtcggcgttgaacttgtacaacgcccgcggcaatcgcagcagcagcatcggttgccggcctgcttttgttgcctga

SEQ ID NO: 27 - DNA, 150 bp, Escherica coli
catttcagcacagacagcgtcgagcgcctgccggtccgtggtggcggctggcgctacgcctcggatgcggggttgtcggcgttgcgcttgtacaacgcccgcggcgatcgcagcagcttcatcggttgccggcctgcttttgttgcctga

SEQ ID NO: 28 - DNA, 150 bp, Escherica coli
catttcagcacagacagcgtcgagcgcctgccggtccgtggtggcagctggagcaacgcctcggatgcggggttgtcggcgttgcacttgcgcggcgcccgcggctttcgcggcggcagcatcggttgccggcctgcttttgttgcctga

SEQ ID NO: 29 - DNA, 150 bp, Escherica coli
catttcagcacagacagcgtcgagcgcctgccggtccgtggtggcatctggaacagcgcctcggatgcggggttgtcggcgttgagcttgtactacgcccgcggcgctcgccgcagcagcctcgattgccggcctgcttttgttgcctga

SEQ ID NO: 30 - DNA, 150 bp, Escherica coli
catttcagcacagacagcgtcgagcgcctgccggtccgtggtggcgtctggtactacgcctcggctgcggggttgtcggcgttgtacttgcactacgcccgcggcgatcgcagcagcttcatcggttgccggcctgcttttgttgcctga

SEQ ID NO: 31 - DNA, 150 bp, Escherica coli
catttcagcacagaccgcgtcgagcgcctgccggtccggggtggcggctggtactacgcctcgggtgcggggttgtcggcgttgagcttgtccgtcgcccgcggcggtcgcagcagcaacatcggttgccggcctgcttttgttgcctga

SEQ ID NO: 32 - DNA, 150 bp, Escherica coli
catttcagcacagacagcgtcgagcgcctgccggtccgtggtggccgctggagcttcgcctcgggtgcggggttgtcggcgttgcgcttgcgctacgcccgcggctttcgcaccggcagcgtcggttgccggcctgcttttgttgcctga

SEQ ID NO: 33 - DNA, 150 bp, Escherica coli
catttcagcacagacagcgtcgagcgcctgccggtccgtggtggcggctggggcggcgcgtcgggtgcgggggtggcggcgttgggcttgggcggcgcccgcggcggtcgcggcagcggcttcggtttccggcctgcttttgttgcctga

SEQ ID NO: 34 - DNA, 11 bp, Escherica coli
gcgcctgccgc

SEQ ID NO: 35 - DNA, 150 bp, Escherica coli; identical to SEQ ID NO: 12

SEQ ID NO: 36 - DNA, 150 bp, Escherica coli; identical to SEQ ID NO: 13

SEQ ID NO: 37 - DNA, 150 bp, Escherica coli
catttcagcacagacagcgtcgagcgcctgccgctccgtggtggcggctggagcggcgcctcgggtgcggggttgtcggcgttgaacttgagcggcgcccgcggcggtcgcggcggcggcgtcggttgccggcctgcttttgttgcctga

SEQ ID NO: 38 - DNA, 150 bp, Escherica coli
catttcagcacagacagcgtcgagcgcctgccgctccgtggtggcaactggagctacgcctcgggtgcggggttgtcggcgttgaacttgttcagcgcccgcggcaatcgcggcagctacttcggttgccggcctgcttttgttgcctga

SEQ ID NO: 39 - DNA, 150 bp, Escherica coli
catttcagcacagacagcgtcgagcgcctgccgctccgtggtggcaactggaacttcgcctcggatgcggggttgtcggcgttgtacttgtactacgcccgcggcaatcgcaacggcgtcatcggttgccggcctgcttttgttgcctga

SEQ ID NO: 40 - DNA, 150 bp, Escherica coli
catttcagcacagaccgcgtcgagcgcctgccgctccgtggtggcaactggaacggcgcctcgaatgcggggttgtcggcgttgaccttgaccaacgcccgcggcaatcgcagcagcttcatcggtttccggcctgcttttgttgcctga

SEQ ID NO: 41 - DNA, 150 bp, Escherica coli
catttcagcacagacagcgtcgagcgcctgccgctccgtggtggcggctggagcaacgcctcggttgcggggttgtcggcgttgcgcttgagctgcgcccgcggcgatcgcggcagcactatcggttgccggcctgcttttgttgcctga

SEQ ID NO: 42 - DNA, 150 bp, Escherica coli
catttcagcacagacagcgtcgagcgcctgccgctccgtggtggcggctggcgcagcgcctcggttgcggggttgtcggcggtgaacttgagcaacgcccgcggcaatcgcggcagcaacgtcggttgccggcctgcttttgttgcctga

SEQ ID NO: 43 - DNA, 150 bp, Escherica coli
catttcagcacagacagcgtcgagcgcctgccgctccgtggtggcggctggtactacgcctcggatgcggggttgtcggcgttgaacttgagccacgcccgcggcgatcgcagcagcttcatcggttgccggcctgcttttgttgcctga

SEQ ID NO: 44 - DNA, 150 bp, Escherica coli
catttcagcacagacagcgtcgagcgcctgccgctccgtgctggcgactggggcaacgcctcggatgcggggttgtcggcgttgcgcttgccccacgcccgcggcgatcgcagcagcttcatcggttgccggcctgcttttgttgcctga

SEQ ID NO: 45 - DNA, 11 bp, Escherica coli
gcgcctgccga

SEQ ID NO: 46 - DNA, 111 bp, Escherica coli
gagcgcctgccgttccgtggtggctactggagcgacgcctcggatgcggggttgtcggcgttgcgcttgtacaacgcccgcggcgatcgcagcagcttcatcggttgccgg

SEQ ID NO: 47 - DNA, 111 bp, Escherica coli
ttgcgcctgccgatccgtggtggcaactggaacaacgcctcggatgcggggttgtcggcgttgaacttgaacaacgcccgcggcaatcgcaacagcaacatcggttgccgg

SEQ ID NO: 48 - DNA, 111 bp, Escherica coli
gagcgcctgccgatccgtggtggccgctggaacaacgcttcggatgcggggttgtcggcgttggtcttgaactacgcccgcggcactcgcctcagcaacatcggttgccgg

SEQ ID NO: 49 - DNA, 111 bp, Escherica coli
gagcgcctgccgatccgtggtggcagctggaacaacgcctcggatgcgggggtgtcggcgtggcacttgaccaacgcccgcggcagtcgccgcagcaacgtcggttgccgg

SEQ ID NO: 50 - DNA, 111 bp, Escherica coli
gagcgcctgccgatccgtggtggcacatggatctacgcctcggatgcggggttgtcggcgttgttcttgggcaacgcccgcggcaatcgctgcagcagcttcggttgccgg

SEQ ID NO: 51 - DNA, 111 bp, Escherica coli
gagcgcctgccgatccgtggtggcggctggggctgcgcctcggttgcgggggtgtcggcgttgtacttgggcggcgcccgcggcggtcgcggcagcagcgtcggttgccgg

SEQ ID NO: 52 - DNA, 111 bp, Escherica coli
gagcgcctgccgatccgtggtggcggctggtgcgacgcctcggctgcggggttgtcggcgttgagcttggccaacgcccgcggcgatcgcagcagcttcatcggtttccgg

SEQ ID NO: 53 - DNA, 111 bp, Escherica coli
gagcgcctgccgatccgtggtggcttctggagcggcgcctcggatgcggggttgtcggcgttgcgcttgatccgcgcccgcggcaatcgcagcagcacgatcggttgccgg

SEQ ID NO: 54 - DNA, 111 bp, Escherica coli
gagcgcctgccgatccgtggtggcagctggatcaacgcctcggatgcggggttgtcggcgttgaacttgtactacgcccgcggcattcgccacagcaacatcggttgccgg

SEQ ID NO: 55 - DNA, 111 bp, Escherica coli
gagcgcctgccgatccgtggtggcagctggatcagcgcctcgggtgcggggttgtcggcgttgaacttgagcaacgcgcgcgacattcgcagcagcagcatcggttgccgg

SEQ ID NO: 56 - DNA, 11 bp, Escherica coli
gcgcctgccgg

SEQ ID NO: 57 - DNA, 111 bp, Escherica coli; identical to SEQ ID NO: 46

SEQ ID NO: 58 - DNA, 111 bp, Escherica coli; identical to SEQ ID NO: 47

SEQ ID NO: 59 - DNA, 111 bp, Escherica coli
gagcgcctgccggtccgtggtggctactggaccaacgcctcgggtgcgggggtgtcggcgttgaacttgtacaacgcccgcggcaatcgcagcagcagcatcggttgccgg

SEQ ID NO: 60 - DNA, 111 bp, Escherica coli
gagcgcctgccggtccgtggtggcggctggcgctacgcctcggatgcggggttgtcggcgttgcgcttgtacaacgcccgcggcgatcgcagcagcttcatcggttgccgg

SEQ ID NO: 61 - DNA, 111 bp, Escherica coli
gagcgcctgccggtccgtggtggcagctggagcaacgcctcggatgcggggttgtcggcgttgcacttgcgcggcgcccgcggctttcgcggcggcagcatcggttgccgg

SEQ ID NO: 62 - DNA, 111 bp, Escherica coli
gagcgcctgccggtccgtggtggcatctggaacagcgcctcggatgcggggttgtcggcgttgagcttgtactacgcccgcggcgctcgccgcagcagcctcgattgccgg

SEQ ID NO: 63 - DNA, 111 bp, Escherica coli
gagcgcctgccggtccgtggtggcgtctggtactacgcctcggctgcggggttgtcggcgttgtacttgcactacgcccgcggcgatcgcagcagcttcatcggttgccgg

SEQ ID NO: 64 - DNA, 111 bp, Escherica coli
gagcgcctgccggtccggggtggcggctggtactacgcctcgggtgcggggttgtcggcgttgagcttgtccgtcgcccgcggcggtcgcagcagcaacatcggttgccgg

SEQ ID NO: 65 - DNA, 111 bp, Escherica coli
gagcgcctgccggtccgtggtggccgctggagcttcgcctcgggtgcggggttgtcggcgttgcgcttgcgctacgcccgcggctttcgcaccggcagcgtcggttgccgg

SEQ ID NO: 66 - DNA, 111 bp, Escherica coli
gagcgcctgccggtccgtggtggcggctggggcggcgcgtcgggtgcgggggtggcggcgttgggcttgggcggcgcccgcggcggtcgcggcagcggcttcggtttccgg

SEQ ID NO: 67 - DNA, 11 bp, Escherica coli
gcgcctgccgc

SEQ ID NO: 68 - DNA, 111 bp, Escherica coli; identical to SEQ ID NO: 46

SEQ ID NO: 69 - DNA, 111 bp, Escherica coli; identical to SEQ ID NO: 47

SEQ ID NO: 70 - DNA, 111 bp, Escherica coli
gagcgcctgccgctccgtggtggcggctggagcggcgcctcgggtgcggggttgtcggcgttgaacttgagcggcgcccgcggcggtcgcggcggcggcgtcggttgccgg

SEQ ID NO: 71 - DNA, 111 bp, Escherica coli
gagcgcctgccgctccgtggtggcaactggagctacgcctcgggtgcggggttgtcggcgttgaacttgttcagcgcccgcggcaatcgcggcagctacttcggttgccgg

SEQ ID NO: 72 - DNA, 111 bp, Escherica coli
gagcgcctgccgctccgtggtggcaactggaacttcgcctcggatgcggggttgtcggcgttgtacttgtactacgcccgcggcaatcgcaacggcgtcatcggttgccgg

SEQ ID NO: 73 - DNA, 111 bp, Escherica coli
gagcgcctgccgctccgtggtggcaactggaacggcgcctcgaatgcggggttgtcggcgttgaccttgaccaacgcccgcggcaatcgcagcagcttcatcggtttccgg

SEQ ID NO: 74 - protein, 241 aa, Escherica coli; identical to SEQ ID NO: 3

SEQ ID NO: 75 - protein, 9 aa, Escherica coli
MGGYTIWAF

SEQ ID NO: 76 - protein, 9 aa, Escherica coli
MGGYQGHRT

SEQ ID NO: 77 - protein, 9 aa, Escherica coli
MGAQYLGHR

SEQ ID NO: 78 - protein, 9 aa, Escherica coli
MGALRYHGQ

SEQ ID NO: 79 - protein, 13 aa, Escherica coli
MAVGTNYSSHRQR

SEQ ID NO: 80 - protein, 14 aa, Escherica coli
MGWPNLYPGHRSLQ

SEQ ID NO: 81 - protein, 8 aa, Escherica coli
MAQYLGHR

SEQ ID NO: 82 - protein, 9 aa, Escherica coli
MGYFRDTNR

SEQ ID NO: 83 - protein, 9 aa, Escherica coli
MGWHPDRTQ

SEQ ID NO: 84 - protein, 193 aa, Escherica coli
MRTFEITEKEVAAAFREAESGEAKKILAALFCKEEMVKPTLDDYKTIRTYEDACKALGEPIFEDPNNLPNHIIALMKLETISRALWGRNFQPKPDGEGSKVYWYPWFALWTKKEVEDMNPEQRGALVSANADLGAFAGFGCLAALYRSSSADAGIGFRLCQETEEKAKYFGQQFIELWAEYLKFNFTVGNRLK

SEQ ID NO: 85 - DNA, 115 bp, Escherica coli
gcgcctgccgatccgtggtggcaactggaacaacgcctcggatgcggggttgtcggcgttgaacttgaacaacgcccgcggcaatcgcaacagcaacatcggttgccggcctgct

SEQ ID NO: 86 - DNA, 115 bp, Escherica coli; identical to SEQ ID NO: 85

SEQ ID NO: 87 - DNA, 115 bp, Escherica coli
gcgcctgccgcatgcgtctactgaggcggactgtggcactggcattgtgacaaccatgtccttgaataggatcccagtcctggcggccgccgcggtgctcggttgccggcctgct

SEQ ID NO: 88 - protein, 8 aa, Escherica coli
DYKDDDDK

SEQ ID NO: 89 - protein, 8 aa, Escherica coli
WSHPQFEK

SEQ ID NO: 90 - protein, 7 aa, Escherica coli
NLLSHPQ

SEQ ID NO: 91 - protein, 7 aa, Escherica coli
WSHPQFE

SEQ ID NO: 92 - protein, 7 aa, Escherica coli
SLLAHPQ

SEQ ID NO: 93 - protein, 7 aa, Escherica coli
YKHDLHK

SEQ ID NO: 94 - protein, 7 aa, Escherica coli
YHHDLEK

SEQ ID NO: 95 - protein, 7 aa, Escherica coli
YQDDEDR

SEQ ID NO: 96 - DNA, 81 bp, Escherica coli
tcggttgccggcctgcttttgttgcctgatgcctgttcatctgtgttctgcggccctgcgcgatagcgcgggccgtctcta

SEQ ID NO: 97 - DNA, 35 bp, Escherica coli
tctgcggccctgcgcgcgatagcgcgggccgtctc

SEQ ID NO: 98 - DNA, 4000 bp, Escherichia coli
  misc_feature (1)..(636): n is a, c, g, or t
  misc_feature (788)..(788): n is a, c, g, or t
  misc_feature (792)..(793): n is a, c, g, or t
  misc_feature (797)..(798): n is a, c, g, or t
  misc_feature (800)..(800): n is a, c, g, or t
  misc_feature (803)..(804): n is a, c, g, or t
  misc_feature (806)..(810): n is a, c, g, or t
  misc_feature (812)..(815): n is a, c, g, or t
  misc_feature (817)..(818): n is a, c, g, or t
  misc_feature (820)..(821): n is a, c, g, or t
  misc_feature (823)..(824): n is a, c, g, or t
  misc_feature (826)..(828): n is a, c, g, or t
  misc_feature (849)..(849): n is a, c, g, or t
  misc_feature (970)..(971): n is a, c, g, or t
  misc_feature (973)..(973): n is a, c, g, or t
  misc_feature (975)..(975): n is a, c, g, or t
  misc_feature (977)..(977): n is a, c, g, or t
  misc_feature (979)..(979): n is a, c, g, or t
  misc_feature (989)..(989): n is a, c, g, or t
  misc_feature (992)..(992): n is a, c, g, or t
  misc_feature (996)..(996): n is a, c, g, or t
  misc_feature (998)..(1001): n is a, c, g, or t
  misc_feature (1004)..(1005): n is a, c, g, or t
  misc_feature (1009)..(1009): n is a, c, g, or t
  misc_feature (1011)..(1012): n is a, c, g, or t
  misc_feature (1016)..(1016): n is a, c, g, or t
  misc_feature (1018)..(1018): n is a, c, g, or t
  misc_feature (1021)..(1023): n is a, c, g, or t
  misc_feature (1026)..(1027): n is a, c, g, or t
  misc_feature (1031)..(1031): n is a, c, g, or t
  misc_feature (1041)..(1041): n is a, c, g, or t
  misc_feature (1045)..(1046): n is a, c, g, or t
  misc_feature (1051)..(1051): n is a, c, g, or t
  misc_feature (1053)..(1053): n is a, c, g, or t
  misc_feature (1058)..(1058): n is a, c, g, or t
  misc_feature (1060)..(1061): n is a, c, g, or t
  misc_feature (1068)..(1068): n is a, c, g, or t
  misc_feature (1072)..(1072): n is a, c, g, or t
  misc_feature (1076)..(1076): n is a, c, g, or t
  misc_feature (1080)..(1080): n is a, c, g, or t
  misc_feature (1082)..(1082): n is a, c, g, or t
  misc_feature (1983)..(1983): n is a, c, g, or t
  misc_feature (1992)..(1992): n is a, c, g, or t
  misc_feature (1994)..(1994): n is a, c, g, or t
  misc_feature (2004)..(2004): n is a, c, g, or t
  misc_feature (2023)..(2023): n is a, c, g, or t
  misc_feature (2038)..(2038): n is a, c, g, or t
  misc_feature (2056)..(2056): n is a, c, g, or t
nnnnnnnnnnnnnnnnnnnnnnnnnnnnnnnnnnnnnnnnnnnnnnnnnnnnnnnnnnnnnnnnnnnnnnnnnnnnnnnnnnnnnnnnnnnnnnnnnnnnnnnnnnnnnnnnnnnnnnnnnnnnnnnnnnnnnnnnnnnnnnnnnnnnnnnnnnnnnnnnnnnnnnnnnnnnnnnnnnnnnnnnnnnnnnnnnnnnnnnnnnnnnnnnnnnnnnnnnnnnnnnnnnnnnnnnnnnnnnnnnnnnnnnnnnnnnnnnnnnnnnnnnnnnnnnnnnnnnnnnnnnnnnnnnnnnnnnnnnnnnnnnnnnnnnnnnnnnnnnnnnnnnnnnnnnnnnnnnnnnnnnnnnnnnnnnnnnnnnnnnnnnnnnnnnnnnnnnnnnnnnnnnnnnnnnnnnnnnnnnnnnnnnnnnnnnnnnnnnnnnnnnnnnnnnnnnnnnnnnnnnnnnnnnnnnnnnnnnnnnnnnnnnnnnnnnnnnnnnnnnnnnnnnnnnnnnnnnnnnnnnnnnnnnnnnnnnnnnnnnnnnnnnnnnnnnnnnnnnnnnnnnnnnnnnnnnnnnnnnnnnnnnnnnnnnnnnnnnnnnnnnnnnnnnnnnnnnnnnnnnnnnnnnnnnnnnnnnnnnnnnnnnnnnnnnnnnnnaaaaaaaaaaaaaaaaaaaaaaaaaaaaaaaaaaaaaaaaaaaaaaaaaaaaaaaaaaaaaaatttaaaaaaaaaaaaaaaaaaaaaagaaaaaattcaattagaacaaaaatgaaaataaatagataaataaatacaaattaaataaatanaaannaaannanaannannnnnannnnannannannannnaaaaaaaaaaaaaaaaaaaantttaaaaaaaaaaaaaaaaaaaaaagaaaaaattcaattagaacaaaaatgaaaataaatagataaataaatacaaattaaataaatacaaattaaattataattatttctattggattannantntntntttatttatnttntatntnnnnttnntttntnntttntnttnnnttnntttnttatttaaanaatnnttaananttttntnnaaaaatntttnattntttnanaatttttttttttttttttttttaatttcattgaataatcatgataatgacaattgttattcattcataatgatattgtttttatctatttttactatttaacttatatatgagttaatgcattacatgtttaattttatttaagaaaagaaaaagaataaataacaattaattttgtgtgtcatatttatatcttaaagaatatataccggtaattattggtttttattggtttagttctatggtattttggtagtgaatcattattagtatttcaatttaaaaaactaccagaatattattggtaataaattattaaataatagtattataagtttaaaaaaaaaaaaaaacaatgataacaacaataataattaataactattaatgtttaaaaatatttattatttcttttttttatggtgtaaaggttttttaaattaatataaagtatagacaacgtatcaataaaatcacaataacctatttaaaaatacaataacaaataatattaaaatatttaattaataatcaatatttttttataattaaagtttttcagttactgatcaatattataaattatttttaaatgataaacattttatatattaatatattaatattgattaatataacctgagataactggtctcgaacctagcccaaatgtcattttttatactatagcctttcgcaaaagatgtttttcatcagaaacaatatgaatagtttttatatatgtacacgtgattttcatatgaaatatattaaatatatttttctataaacataataattatttaaataataaaaatatttttttaaaggttaacaattaataaaaagaaaaataaaaaaagtaattgttaataaaaaaaaaaaaaaaaaaaaaaaaaanttatttaantnttttattatnataatggatatattttttnaaaaaaaaaaatatntttttactcaatactatntttattaaaaaaaaaaaaaaaaaaaacatctctctatttcataataattatttattctactgaacaaaaactgtattgtattttcgaataaatgttcaaattcagaagtaaattaagtaagattatgattatactttatttatcagtattttcaattttcattcaattcaaacaaacaaacaatcaaactaccttttttatatagtctttttctgtattcaaagtattactaattgtttgttttttagttactattaccgttaaaaatataaaagcgattgttttttatttttttttttctgttaattattattaattaataaatattattatattattatatattaccaataaaataattaataataaaaattattatataaatataattaaatattgtttattattattataattattattattattagaatgaaatatagttaaatttctaattaatattattattaatattatattaaaaggtatacataacgatattaaggataaaaaatactattatagaaattgtctacctataaattaaaaattttcgtggtagatatttacctaaaaaaaatttttttttattctttacgtattacttaattgaaatttagaaatgttttttttataattaattttttttttttttgtataaaatcccacaccctacttcattttatttttctaataatgattcatctatttcatctataggtttttttttttaatattgaactaatacaattaatatatatactaatattttattcattttttattcatgtataattgtttttatgtaataaatgtatattattaatttatgcacaattgtattattattatttttttttatgtaataattgtaaatagtttgatattccaaataaagttaatagatgaaattaaattaacccttctcccttttttatatatatatattatttatttttttttaaaaaatattgattttctgtttaaagttaatagttttgtcccttaaaaaaattttttttatctttttgatgaataattttgaaacaaaagtttatttaataataaaattgttatccagattttttactttgaaatcttatattaaaaataaattaaatttaattaattattcagaaatcactatttacggtgtgccaagagcattatgtatcattataaatgaaatggaatattaatatagtcaaaaaacaataaaaacataacaaattgattcaaatatatttatttatatatttatttatatatgaatcaatttaataaatttttattagtaaaattgtttacttttttattttccataaaaaatgaaaaaataaatttaatattccgtaaataataagattccttgttttaaaaatatatgcataaaaaaataaagaaagagaaaatggggttgaataataaatacatccatttgaataataaagaaaaaaaagagataaaaataatataaatttaataataataatagtaataataataaaaaagagttcagttaaacatcaaaatatatactttggtgaactctttttaatagtttatcaaatggctgtatctttttaatatatattatatccaattagaatctagtataactgtatttttttaaataaaaaatttccccatgattctgtgttttaaagcggagtgataatacaaaaaagaaaagagaaaaaaagaatatcaaaaataattttttaatatatatgattttaaatgattgttatttatttatttatttattaaaatgtttgatcataaatgtattaatgtgttaatttttaaaacaataataatcaatattattaatgataaatggataaataataaaataagagttactatttcgtctataatttaatgctatattttttattagtatttcttttaaaaaataagaaaaataatataataaaatat

SEQ ID NO: 99 - DNA, 4000 bp, Escherichia coli
  misc_feature (1967)..(1967): n is a, c, g, or t
  misc_feature (1972)..(1973): n is a, c, g, or t
  misc_feature (1978)..(1979): n is a, c, g, or t
  misc_feature (1990)..(1991): n is a, c, g, or t
  misc_feature (2003)..(2003): n is a, c, g, or t
  misc_feature (2017)..(2018): n is a, c, g, or t
  misc_feature (2026)..(2026): n is a, c, g, or t
  misc_feature (2029)..(2029): n is a, c, g, or t
ggcggtaatggggagaaccgtgcagtaatcaaccaagaatctttggaaccaggcttggattctaatgttgggttttgaggttgagccgtagagaatttcctctaatgaaatgacgcttaaggcgatcgacgaaacagttgcactccaagtcaatacgccgtgatttggttgcaagcgagccaattcgctgatgatgttggtatcacagaggaaggtcatgaggactttcggcgaagggattggcacgatcctcacgcggaggcgtttcaaggctgtaattttcctcagcacaaagctcacgcaactctacgaaggcgctggctaaagaggctttctgggattgctgttgccaaaggagaaatgcctgaaacacatcagctttcaccactgctgcaaccaattggttttgatcgtagattagctgaggctcttcaacagccgcatggatcagttcagagaatttctgttttgcgtcctcaagtttccagggcatcgttttatgagcgagacagcattgctctaaattgtagctttacaacgatcgccccttcacactatgacgatcgccgctgacaaacgctgaaccagcgatcgctcctttcaactctattaacaatcgcccctgcatgattgactcaagggcgatcgcccctctcaacgataccgataatcgccccaggatgattggctcaagcgcgatcgcgcgcgcttggggaaacagggtcatgaggcttaaggcagatcttcaaacaaagcagtcaaatcctgatagccactcactaccctgagcacttcgatagcgtcgttgagcaaacggtaaaaaatgaggtactgcgtgtagggcaaactgcgtgagccaggataaagttcatctcgtttgcgaccaatttgaggaaactgagccatccgttgaagggtggaatcgatgccgctcagaaaccgttcggcgctggttaaactactttgaaccgcaagataatctgcaatggcttcaatatctcgactggcgaggcgtgtaagccgacaagctcgactcatatttaggaagagcgctggcgtaatcgttgacgaatcgcttcgatttcagtcacagcatccaggagttctccccgttcggcggcttcgactcccagcagcacctcacggcgcaatgcttcaaaccgcccctgataaacctgctctcgctctgctaatgcttgcagtcccgcaagaaggatttcttctaacgaggcgtatttcccactggcaatctggcgatcggcaaactgctgtaaatcctgcggcagtggcatagtcattgttgtactcgaacgtgggcactcattttttcagtttaacgtacctgtggaatcgcccctgcatgattggctcaagggcgatcgcgctgacgcaaacctccgaggttttaacaagcatggaaccgcatgaccaacctcgatctgaaacctccgaggttttggcacaaactcaatgagccggacgagtcttcggcgaacctaccaacccatccggctcggttttatgtttggaggttgttgccttcctcgctgggaaaggtctggactcttctgtgtacgcccggacaattcccattgcccagttctgacggtagaagagtgctggaaaaaccgaacacaccacccgaaaaccaacattgttgttgcggttggcgggagcattatagttgcggttggcagagcgacagttcaccggattgttgttccaggaaccgccacgtttaccgatgccgatcccaactcaggtctcgacgggcgagaagactgagtgcaatgagtatacggcatgatgggtgagaagccagttttgtgaaaataatttgatcgcgctacgcgcggaagaagagcaagaagggtaaagagcaagaagagaagagggcaagagggcaagagggtaaagggctaggagagtcctggaaaaaccgaacacaccacccgaaaaccaacatngttgnngcggnnggcgggagcannatagttgcggtnggcagagcgacagnncaccggantgnagttccaggaaccgccacgtatgacccgttgttcactatcgccattcgtcgtccaggcactttcgtccgttggagcgccctgataattctgatgccaatggtcggcgcaccattcccacacgttgccgtgcacatcgtatagcccaaaggtatttgctgagaagctgcccacatcggttgttcgcttacgatacgtgcctttaggagcatcgccataaatatagttgccatcgtagtttgccagctcaggcgtgatcgtttcaccaaaatggaagggagttgtggtgccagctctacaggcgtattcccattcggcttcgctcggcaaacgataggacttgcctgttttttgcgacagttgggtgcaaaaggcaatcgcctcctcccacgacacctgctctactggacgctgtgcccctttgaaattggagggattgctgccgacgatcgcttcgtactgcgcctgcgtcacggaatatttgcccatgaaaaacggctctatggtcacggcatgaatcggcttctcgcgaccatactcatctgcccccatctgaaaagtgccgccaggaatggcaatcatatctagcgtgaccccattgcccaggtcttcagcaaaatactcggctcgtccacggctacgattaatctcaacggttgttttaccgccaaacaagccctgttttttggcaatgaccagctttgcagtctcaaattcaaacggttgaagcggcacgcctggtcctaacttacggtttggcggcggattaactactggtagcaatcgttgactttgtgctgccagttcttgttgccgctctaaggctttttgtttctgctgttcctgttctagcttttgccgcgttgcttgttcctgctgccgtttctcctgtccctgacgtaccagttctgcttgctgtcgctcatactcagcttgtttgggggcaagaaacggtgcttcgattgcactcacgtcttcatcacgcaaactcaaaagctgttggattcgttgcaagccaaggcgatcgcgatcggtaagaggataccgcttggcgatcgcgccttcaaacaccgtgcggtagcgatcgactttggcgcgacgttgacgatagggttccagttcctcggtttcgatcgtcgtggcatcatccggcaacagcgtcagaccacgttgtaagtcgtccagataagaacgattgataaaggaaaaatcgccctcatcctcttctgccagcagcctgacttgtttgcgatattttagcgctgggtcatctttgggcgactttgccagcagaatcttgtaaccttccttcaccgggtagaactctggggtcatcgcgggtgcagcctccttcaccttgctgctggcgtaggcatgaagttcttccatcgcaataaacccatcatcgtcctggtcggctccgcccgtgcgaatgccttctaccaagtagtgagtgtaaaccgagaggtcaaagccctcttgcgccagggcgtactgcgttgagttggaggcggtgagaatggcggtgcctttgccgcccaaaaattgctctgggttgacgctgccgctatcttttgccttcacgcctttggcaaacgcaccgctgaagcaactgtcgaggatgatgaccttatactgcgatcggctttgctccagccaatcgcgtaccgatcgggcggcaacggcagtcgttggcactaaccgcccctgttctttacggctgaagcgactggcaaagtaaaactcgcccccatcatccaccacgccgtgaccagagaaatagagcaacaccagatcgtctttggcgcggttggcaaagagggtgtagatggcatcttccatcgcctgtcgggaaggattttgcagcacggtcacagcgtcagccgcaaactcacctatctctgggttggtcaacacctgctgcatggcggtcacgtcgttgacggctgatggcaacccgtctaaccctggtt

SEQ ID NO: 100 - DNA, 4000 bp, Escherichia coli
  misc_feature (256)..(256): n is a, c, g, or t
  misc_feature (811)..(811): n is a, c, g, or t
  misc_feature (1109)..(1109): n is a, c, g, or t
  misc_feature (1139)..(1139): n is a, c, g, or t
  misc_feature (1145)..(1145): n is a, c, g, or t
  misc_feature (1151)..(1151): n is a, c, g, or t
  misc_feature (1169)..(1169): n is a, c, g, or t
  misc_feature (1187)..(1187): n is a, c, g, or t
  misc_feature (1205)..(1205): n is a, c, g, or t
  misc_feature (1208)..(1208): n is a, c, g, or t
  misc_feature (1265)..(1265): n is a, c, g, or t
  misc_feature (1280)..(1280): n is a, c, g, or t
  misc_feature (1289)..(1289): n is a, c, g, or t
  misc_feature (1301)..(1301): n is a, c, g, or t
  misc_feature (1313)..(1313): n is a, c, g, or t
  misc_feature (1326)..(1326): n is a, c, g, or t
  misc_feature (1346)..(1346): n is a, c, g, or t
  misc_feature (1361)..(1361): n is a, c, g, or t
  misc_feature (1364)..(1364): n is a, c, g, or t
  misc_feature (1610)..(1610): n is a, c, g, or t
  misc_feature (1613)..(1613): n is a, c, g, or t
  misc_feature (1739)..(1739): n is a, c, g, or t
  misc_feature (1757)..(1757): n is a, c, g, or t
  misc_feature (1973)..(1973): n is a, c, g, or t
  misc_feature (1982)..(1982): n is a, c, g, or t
  misc_feature (1985)..(1985): n is a, c, g, or t
  misc_feature (1988)..(1988): n is a, c, g, or t
  misc_feature (1991)..(1991): n is a, c, g, or t
  misc_feature (2003)..(2003): n is a, c, g, or t
  misc_feature (2039)..(2039): n is a, c, g, or t
  misc_feature (2042)..(2042): n is a, c, g, or t
  misc_feature (2045)..(2045): n is a, c, g, or t
tatcaaagatattaatcgttcacgcgtcttaacagttggtacacttcctcttaaaaaagtatcttctaaaggtattacactatcaaatgatacatctttagaggatgcaatgaaggcgcttgtagaagctaaaaaggacagcgttacagttgtaaagggtgacgaaaagcttggaagcatttctatgtatgatatagttcatgcagcaactcgttcatcggaaacagctggagaagctgttacctacagataaaanaatctgaaacacagtcatgtaaggcatataaaaatttattaaatatatgccttacatacaaatatgaatatgtctgatgtaaactttagtatagaaaattcacttcgccccaatggcaatgaagttattatgggtgtagatgaggttggccgtgggccgtgggctggtccagtaactgcctgtgcagtgatacttgacccagacaatataccagtgggattaaatgactcaaagaaactaaccgcaaagcgcaggtttgtactttttgaggaaataatgaactcatcaatcgtttcttatgtacatgtagacgtagatgagattgatgaaattaatattttacaagcaacatttagggcaatggaacgttcaatatctaaacttccagtaccggatcatatattaatagacggtaataagttaccaccaaatcttccaagtcctgcgacagctattataaaaggtgacagtaagtctgcctctattgcggccgcatctattgtagcaaaagttattcgtgataagcttatggttgacctttctataaaatatccnggatatgggtgggaaaaaaatgctggatatggtacaaaaatacatcagttaggactgctaaataatggggtgaccccacaccatagacgttctttcaaacccatacacaacatgttgtattccgcttcacctcgtaagtaactgattcataaaaataaattgacgttagcctcagtttgaatcattttaaccctaacgacgcaaaaatgcgcattacgaggcagacatggtaaacagagcaaaaaaagaaggcagcattaagttgccgctaaataatattattgatggtgattgtgtngaggtaatgaattcattgccagaaaattcnattganctaatnttcgcagaccctccctanaatttacaattaaaaggngacttacatcgcccaganaantcaaaggtagatgccgttgatgatcattgggatcaattcgacagctttgcaatttangataaatttagccgngattggctnaaagcagcacgncgcgttttaaanccaaatggtgctntatgggtcattgggtcttancacaatatcttccgngtnggcacagctcttcaagatgcaggcttttggattttaaatgatgtcatttggcgtaaatcaaatccaatgcctaattttagaggtgttcgacttacaaacgctcacgaaacgatgatttgggcaggtaaaactgaaaaatccaaaccaacatttaattacgaagcgttaaaagcacttaatgatggggtacaaatgcgctcagattggcacttgccaatttgtaacggaaatgaacgcctcaaaaangangccggcgataaagctcatccaacgcaaaaacctgaatctctccttcatagggttattgttggctctacaaatgaaggtgacgtaatactcgatccattctttggatctggaacgaccggtgctgtngcaaagaaattagggcgnaacttcatcggcattgagcgtgaagaagaatatagaaaagttgcaaaaaagcgtatcaaagcaatcaaaaaatatgatgttgagagcttgaaggtatcaacatctaaacgtgcagaaccaagagttccatttggtcaagtcgttgaaagaggaatgttaaagccaggcgaccagctttattcattgaatggacgccatagtgctaaaattcacgcngatggaacnctngtngcncacgatcagcgnggttcaattcatcaagttggagcagctctagaaggngcnccnagctgtaatggctggacatattggtgttttaaaaaacgtgggcaagccattccaattgatatgttacgtaaaaaaattcgtgcagaaatgactccataaaagacttctacatctaatcattttacgaaacatagaagataactaccgtttagaactgctcgttctaaacattgccaacttaccccgcccttgtggcggggttttttatttatagaattattatttcagaaactttgatgcttctatccaaacttttcgcatcacagttggcaggtcatctgacttgaagttttcttttgttataaatttgccaactctaggtgtgcttttaacattaaatgcaatttttatagttagttctaaatggaagtgtgtaaaagtatggcgcacaggttcatttaaagtatgccaatctgcttctaacggtattaaatgatccgttggcttaatatcccaatcacttccaggccatcccaacatacctcccagcaaacctttttcggaacgtctctctagtaaaatagatttatcatttcttatggctacatatgcagtaccaacgcgtgttggtttttttagttttggggttttattaggtaaaccatctgcaatcccctttaaaagtccctcacaattgaaattccatggacaaatgctgcattttggttttcgaggcgtacatattgtagctcccaaatccatgactgcttgagcataatcaccacaacgattttctggagttaagccagaagccaatagccaaagagcttttttagaagccggcaacggttcctgaactgcataaatacgagacatgacgcgttcaatattaccatcaaggacgatagcttttttattaaatgctatgctcattattgcagcagctgtgtacggtccaatacccggtaatgataataactctttttcattgcatgggaactttccatcatattgatctttaataacccgagcacattttagtaaatttcttgctcgtgcataataacccaagccagcccaagcacccattacatcttcatccttagcattcgccatatcatgaactgtcggccataatgtaataaatttaacgaaatactctttaactgcagctactgtagtttgttgaagcatgacttcagacatccaaatataataaggattaggaatggtgcccattttgctgtttaaaggaggaatacgccatggcatctctcgagcatttgcatcataccaagatagtatctctactgccatattattttttttagtcaagacatatgccctttgcaatacattgtattttaggtttattattaaccactgatataaaccgatgtaaccactgaatataggaaatgaagcaaatggcatataagtcacgcggatttatacaaactggcggcttactgaaagcaaaaattcgagcagctactgaaactcggggctttgcagaaactagattacttacaaattggaaagatattgctgggccagcgacggcaagtatctgcaggcctgttaaagtaagttatggaaagcaaggctttggtgccacactcactcttttaacaacaggcgcgaatgcacctgttttacaaatgcaactgccaaaaatactttcaaaagtgaattcaatatatggttacaatgcaatcagtaaaattaaaataactcagacctctccaattgactttgaagatagttttgaaaatttcgaaggtagagaaaataaaaaagtcttatcagaaaaacagataattaacgttgaaacatctgtaaaaaatgtatctgatattaatctaaaggatgcgctgtcaagattgggcaaaaatataataatacgaaataataaggattaaattatgaatcgcagaaaatttacaggccttctttcaataggagcattgagtgcaagtgcaacacgaagttttgctgataatacggcaaaaaac

SEQ ID NO: 101 - DNA, 4000 bp, Escherichia coli
  misc_feature (1965)..(1965): n is a, c, g, or t
  misc_feature (1981)..(1981): n is a, c, g, or t
  misc_feature (1986)..(1987): n is a, c, g, or t
  misc_feature (1992)..(1992): n is a, c, g, or t
  misc_feature (1995)..(1996): n is a, c, g, or t
  misc_feature (2001)..(2002): n is a, c, g, or t
  misc_feature (2007)..(2008): n is a, c, g, or t
  misc_feature (2013)..(2013): n is a, c, g, or t
  misc_feature (2017)..(2017): n is a, c, g, or t
  misc_feature (2026)..(2026): n is a, c, g, or t
atgatccgcgacataatcgattcgcaggaaggtaatgtcgtattccgccatatccgtatcacaaaccgtgatttcatcgggaacggttcggaagtgctggaaatcctgcaactcggtatcgggggactggatgaaaacggtaatcaggtagagaagcccgtacttaccgggaactatctgctggatgaagtcatcgagaactcggatatagaagcgatccggaacggcttcgaaggtctgaccgtcagcaccataatcgacgcttatatcaagatcatcgactggtttaatgcggaagcgtatggcggagaaccctattatcccgaagtcacattggataatgtgggtgaaatcatggactattataatggtgaaacctatgaagaataccttcaacggtttgcggaagaaaatatggatattaacgatatagtaaacagcaaataacatgagtacaaaagaacagagcgcaaccctgctgcgtctcaataaacaggaacaggtaaaagccttgcaggcggtaggctttgccgacattacggaaaactcgcgtgccagcgagttccctaaccggataaagtgggctaccgggttgctggacatgcgggtggcatgtaaccggatttccgataattccaaatggtattttacccgtgaggagtggaactcgttgactcctgccaacaagttgaagtttatccgtcgtggtttgtgtatccgggcacattcgcagtcttttgtcattgcggcacaagagtgttatgcagctgacttgtcttccagcttctattggggcggtcttggtaaagcgattgacgggctttccgcaaagatgctgggcaaaatgtacacctgcttcaccgggaaagaagatacacgcctgatccttgatgccctgaaagggacaaattcgaacggtgtggaaggcgcacccgctgcggaagctgccgtagcctataaagccttcacactcgatggcgacggtctggaggatgatactgaatggttcttgccttcttccggacagatgatgatcatgtatcgataccgtgaccaaatcaatgaaatgctgcgtgcattttggagcagtgacagcatgttcctgacggacaaatactactggacgagcacgtactatgatacgacaaatgcatggacgtgcaatttgaataccgggcacatgaacgtacagaataaaaatacaagcctgttgcatgtaagggcaacggcagaagagtaatccattaaaacagtacatatttatgacagacaagaataatgaaagcgcattgcttttgcgcatgaataaagaagaacaggtatctgttttgcaggagatcggttttaccaacgtgaacgaaaatacgcctgccagtgacattgcaaaatatatcagatgggctggcgggctgcttgacctgtcctttgccacaatccggatcgaagacggtgtcaacgtgttctttactgctgaagaatggaattcccttagcgcaaataaccgttcaaaatacctgcgtgtaggtgtccgtatccgtgcggatcgtcgccagttcgtcatagcgaaaagcgactgcactgacgatataggcgggcgtactttcaaatggggggcatacggtacggacatccgtggcgttaagaattacgggaacggtaatcaagggctttatgaaacggcagacggaaagcaaaatactgatgctatcatagaagccactgcaggagtcaaggataattccggtgtcgtcggtgcaccagccgcagaagcagcaaagaactataaggcttgtacgcttgaactggacggacttgaagacaaaaccgagtggtatcttcccagcgaaggagaactcattaccatcgccaaatataagaccgaaatcaatgagttattatcctctgtatcaggtaatcaaaatataattacagccgactggtattggagcagcaccgaatacgacncctcgagcgcgtggtncgtgnncatgnacnncggcnncgtgnncacgnacancaagactancgcaggcagggttcgtcccgtttccgcaatagattctttatctctttaactctttatctcttagatagttacgtttaattagccccggtaggggctttttaagttttaaaattctgaaaaaatgagtgttaatagtttgacaatcattaactttgcggagcaaaagaaaaattttaaaaatatcaaaaattaacatgggaaaagcagaggacagaccagtctatcaattaatgtatcggttattaatgttgatacttgatgcaagagacaagtttccgaagaattacaggtacgaattcggtacggaacttatgatgtccgcccttcgttgttgcgagttgatccgttatgcaaattcaagccttccgcgtcgagtggaatacctgaacgaattccttgttaagtttgatacattgaaactcttattaagggtatgtcgagaccggaaactgatcaatattcagacgacagcagacatcattgagatgattacgtcgattgaaaagcaaattatagggtggcgtaatttcaccgcttcccaggaaaagacagcttccgtaaagccagagccataatcttcacggagtttatgggagagcaatctaatttatctattgggcattcccccggtgatgaaccgggaaagactaagacagtgaatgctgaatcctcgaacgcgtggtacgtgaacatgaacaacggcaacgtgaacacgaacaacaagactaacgcaggcagggttcgtcccgtttccgcaacagataaaccgatctatgacatacccttatcttccatcgtgcatgcatttgacgtctgttgcaagaataaacgcaatacagatgactgcatagagttttcgtttgaatatgacacggatttggttgccgtgtgggatgctatcagatacggtcgctacgaacctgattattcaaaatgcttcatacggaaaaagcccgttcttcgtgaaatttttgcttccgcttatgttgatcgtgtaatacaacattgggctgatctacgccttgatcctattttggaagagcgttttcaggcacagggaaatgtttcaaaaaattgccgtattggtgaaggagcactttcggctgttatctatctgaatgggatgatcatggaagtcagtgaaaattatacgaaagacgcatacattttcaagggtgatttcaaaagcttttttatgtcaatgtccaaatccctgttatgggaaatgatcgacctgtttatccgggataactataaaggcgacgatatagagtgtttattatatatattgcgcactgttatctttcaccagccacagtataaatgttataggaaatcaccgttacatttatgggatgagttgcctcatgataaaagtttgtttcatgctgatccggatcatggttttgcccccggcagtcttcatgcgcagaaattcgcaaattttatcggttcttgttttgattactatgtttccgaaatactgggaatcaagcattatgtgcgttttgtggatgatttcgcctttgtaatgcgtaataaagaagatattctaaatactgttcctttgcttgacagttacctgaaagagcagctgcttcttaaattacatcctaaaaaaatatatatacagcatcattctaagggagttttgtttgtaggggcattcattttgcccggtcgaatttatatttcaaaccgtgttgtcggtaatttatacgatgtaatcagcaaatataataaaatagcggaggaaggctttgcggaagcacacgcggacaaatttgttgccaccctgaattcctactatggattaatgaggcatttcaatacgtacaatctaagacggaaagtggcgaaacgtattaatcctgcatggtgggaatatttttatgttcagggacattgggaggtttttgtgttgaagaacgaatataattttaagaaacaattaaaaaaacaaataagaaaagg

SEQ ID NO: 102 - DNA, 4000 bp, Escherichia coli
  misc_feature (1986)..(1988): n is a, c, g, or t
aatctcttaatacttgcatgtaaacatcttgtgatttagttataaattttttttggagggtaagcgtaatagttccgatcatagctaaaagaagtataaatcctaaagcaacgaaaaggtaagcaaaagacgtaaaaaataattctcctaaataaagtgtgtttgatggtttaaaacaccaaatagaaaaatcaaaacagaaattaaatgaaagtaacgattcttgaactttagttaaagggatatcgtataaatttagtagcacgaaattaacattgaataatattaaagtttcaagtaaaaaaattagaccaaaaatgaatgctattaaaagatattgtttcgaaccttcttttaactcggataattttatattcagcattattaaaacgaataaaaaaagaaccgcaattgctccaacgtaaacaattaagaaaagaataggcaaaaattcaacgtttaatataaataacaaacaagataaattaaaaaaagttaatattaaaaaaagaacagaatagatagggtttttagaacttacgaccataaaagaacaaataagagctaaaccagaaaaaaagtgaaatataaaagagctaattgttaaaaacatcaaacgtataagttaaagaagcaagatttgaacttgcaattctaaaagaactaaatttacaatctagcgatttaaccaattcatccattctttaataggcaattaaaaggacttgaacctttatctgtaacgccacaaattactgttttaacccattaaactataaatgccttatttctttaaatttttaacgccgtaaatgcttttcgaagtcgctctaccaaaaactggagccaaatcaaatttaccgcgaaccgcaatgtttctaactccaattaaatctcgacttcttccgcatcgaattaagattgttgagtgttgttggaggttatgaccttgacctggaattttagctattaggctttgcttcgttttaactagtttaatcttacaaactcttctgtttgcagaatttggttttttaggagatatcgttaaaacttttaaacaaactgcgctttcttgaggaaaactgcttaaattattatatttcttttttgatcttttaataagttttattatacgattcatctatctaatttcgaaattggacttgaaccaataactttctaggtgtaagctagacattctgccattgaattattcgaatgtatttaaaattttattgtataagtttaaaccttgctatttaatcaaagtaaaaatctttcagaatcaactgattcaatagctattggcatagccccatgagcggaaccgcaaatttcgctgcactgaccgaaaaaaacaccatttcttaaaatatacaaacttgtttgattaagtcttccggggcaagcgtctaatttgactcctaacgaaggaacagctcaactatgtaaaacatcagctgcagttataagaactctaatgtgagtttttagaggtaatacaactctattatcaacctctaataatcttagtgttccgaattctagatcatcttctgctacaacgtaactatcaaaacggacagcacaatgctgagcctcaaaatcactatactcataacttcaaaaccattggttacctatacattttaaagttaaagcaggatcaacaatttcgtcgattgaataaagaagagcaaaagaaggaagagctactacaattaaaattaaagaaggaataactgttcaaattatttcaataattgttccgtgaacaacaaacctggaattcgaattgacgctttcggaagttttctgaaagtaatataaagttctagccataacaactagaacaaagaaaaaaataaaagtaatgaaaaacattaaatcatgatgaagattaataataccttccataacaggcgtagcagcatcttgaaaatataattgccaagacgtcgatgaatctaaaagaaaaaagtnnngcatcaaacaaaaaattttcaaaaataggatttgaacctatgactttttgattttcaatcaaacgctctaaccaactgagctacttcaacttttcagcaaggatttgaaccttgaatctttcgattaacagtcgaacgcttaaaccaattaagctattgaaatttttaccatgagctctttcgaactccacaaattaaacctaaactagcacgatttctaaagcttattcttgataaacgataacttttgaaaatagaatatcttttacctgttaaataacaggtgttttgattaataattagatttttaaagtcttttgttataattttttcttttaaaactttttttgaaaaccctgaatcaattaagagataaaatgataaacctaaaatttcattttttaaatacaaattaagctccttaaaatataattttttcatctttataaaactccattaaaacaccacaataaactaaaagtgattaaaacaaacgataacgaaatcggtaaaaaaaccttccaacatagacgcatcaactgatctatacgatacctaggaaacgaagcacgaactcaaataaaaaaaaataatataatagataacttaaaagctaaaataaaagaatctagaataaaaggttttgaaaaaatagatattcagcctccaataaatattattgttgtaagagaactcattaggatcatcgaactgtattcggctaaaaaaaataacgcaaaacccatacttgcgtattcaacattatatccgcttacaagttcgctttccgcttcgggtaaatcaaaaggagcacgattagtttcggctaaaatactaaccaaaaacataaaaaaaataggaaaaagaggaacaagaaaaaacaaaaattcttggaataaaattatactaaaaaaatttaaagaaccgacacaaacgagaacagtaaccaaaattaaaccaatagctacttcataactaaccatttgagcggcgcttcgtaaagagccgaaaaaagcgtatcgagaattgcttgatcaaccagaaaggattataccgtaaacgcccaaagaagaaacagcaaaaataaaaagtaaacttaaatcaacgtcaacataaaaaccagtaaaggaaagcggtattaacgctcagccgaataagcttaacaaaagagttaaaacaggggcaaaaacaaaactaaacgtatttgcgtttgttggaataacggtctctttaagaagaagttttaagccatcagctaaaggctgcaacaaacccaaaaaacctactacatttggaccttttcgttgctgcatcgaccccataacttttctttctgcgagcgtaagataagccacagagattaaaataggaacgataagaactaaaaaacatagtaaattttctaacaaaaacatcaaaaataaaagaattacaaaagttaaaggaatcgaacctttaatccttgaatttgaaattcaatattttaaccattaaactaaactttttgggatagtgtgagatttgaactcacgacgctttttgcgtttgaattttcaaaattcatgctttaaaccactcaaccaaccatctttttactttaagatcaaaaaaatttcaccgaaacttttgattaacgaaccttgagtcgaattagacttaaatattaatcctaagttacgagaattattatattttttcaaatttgctctaaaattaatagaggaaaataagcctaaattatttaaaggcttaacaattcgaatctctataaaaatcttactatttttatttaagaaatttaaaggaaattgttttataatgcaataacgtataaaaccttccttttttaacttttttaagaataaaaacgaaagaaatgaataatttataagaatttttttatttgtgttatttttgtaagaaagttttagtaacaattttcgtaggtgtttcattatttaaaaaatttttgcttatcgggagttgaacccaaatcaataacttcgtaaatt

SEQ ID NO: 103 - DNA, 4000 bp, Escherichia coli
  misc_feature (2973)..(2973): n is a, c, g, or t
  misc_feature (3012)..(3016): n is a, c, g, or t
  misc_feature (3022)..(3022): n is a, c, g, or t
  misc_feature (3028)..(3028): n is a, c, g, or t
  misc_feature (3030)..(3030): n is a, c, g, or t
  misc_feature (3039)..(3040): n is a, c, g, or t
  misc_feature (3042)..(3042): n is a, c, g, or t
  misc_feature (3044)..(3044): n is a, c, g, or t
  misc_feature (3046)..(3046): n is a, c, g, or t
  misc_feature (3054)..(3060): n is a, c, g, or t
  misc_feature (3062)..(3063): n is a, c, g, or t
  misc_feature (3066)..(3067): n is a, c, g, or t
  misc_feature (3071)..(3072): n is a, c, g, or t
  misc_feature (3076)..(3076): n is a, c, g, or t
  misc_feature (3078)..(3079): n is a, c, g, or t
  misc_feature (3084)..(3085): n is a, c, g, or t
  misc_feature (3091)..(3093): n is a, c, g, or t
  misc_feature (3096)..(3096): n is a, c, g, or t
  misc_feature (3100)..(3101): n is a, c, g, or t
  misc_feature (3103)..(3103): n is a, c, g, or t
  misc_feature (3108)..(3108): n is a, c, g, or t
  misc_feature (3113)..(3113): n is a, c, g, or t
  misc_feature (3116)..(3118): n is a, c, g, or t
  misc_feature (3120)..(3121): n is a, c, g, or t
  misc_feature (3123)..(3123): n is a, c, g, or t
  misc_feature (3125)..(3125): n is a, c, g, or t
  misc_feature (3127)..(3127): n is a, c, g, or t
  misc_feature (3129)..(3134): n is a, c, g, or t
  misc_feature (3137)..(3137): n is a, c, g, or t
  misc_feature (3139)..(3141): n is a, c, g, or t
  misc_feature (3146)..(3147): n is a, c, g, or t
  misc_feature (3149)..(3150): n is a, c, g, or t
  misc_feature (3152)..(3153): n is a, c, g, or t
  misc_feature (3157)..(3159): n is a, c, g, or t
  misc_feature (3161)..(3161): n is a, c, g, or t
  misc_feature (3163)..(3163): n is a, c, g, or t
  misc_feature (3167)..(3169): n is a, c, g, or t
  misc_feature (3171)..(3172): n is a, c, g, or t
  misc_feature (3176)..(3176): n is a, c, g, or t
  misc_feature (3178)..(3180): n is a, c, g, or t
  misc_feature (3185)..(3189): n is a, c, g, or t
  misc_feature (3191)..(3200): n is a, c, g, or t
  misc_feature (3202)..(3203): n is a, c, g, or t
  misc_feature (3205)..(3206): n is a, c, g, or t
  misc_feature (3208)..(3209): n is a, c, g, or t
  misc_feature (3213)..(3217): n is a, c, g, or t
  misc_feature (3220)..(3222): n is a, c, g, or t
  misc_feature (3224)..(3224): n is a, c, g, or t
  misc_feature (3226)..(3227): n is a, c, g, or t
  misc_feature (3229)..(3229): n is a, c, g, or t
  misc_feature (3233)..(3233): n is a, c, g, or t
  misc_feature (3235)..(3235): n is a, c, g, or t
  misc_feature (3238)..(3240): n is a, c, g, or t
  misc_feature (3243)..(3244): n is a, c, g, or t
  misc_feature (3246)..(3247): n is a, c, g, or t
  misc_feature (3249)..(3250): n is a, c, g, or t
  misc_feature (3252)..(3253): n is a, c, g, or t
  misc_feature (3255)..(3256): n is a, c, g, or t
  misc_feature (3261)..(3261): n is a, c, g, or t
  misc_feature (3266)..(3266): n is a, c, g, or t
  misc_feature (3268)..(3268): n is a, c, g, or t
  misc_feature (3271)..(3271): n is a, c, g, or t
  misc_feature (3274)..(3275): n is a, c, g, or t
  misc_feature (3277)..(3277): n is a, c, g, or t
  misc_feature (3280)..(3282): n is a, c, g, or t
  misc_feature (3286)..(3287): n is a, c, g, or t
  misc_feature (3289)..(3292): n is a, c, g, or t
  misc_feature (3294)..(3294): n is a, c, g, or t
  misc_feature (3296)..(3296): n is a, c, g, or t
  misc_feature (3298)..(3298): n is a, c, g, or t
  misc_feature (3302)..(3306): n is a, c, g, or t
  misc_feature (3308)..(3314): n is a, c, g, or t
  misc_feature (3318)..(3322): n is a, c, g, or t
  misc_feature (3327)..(3327): n is a, c, g, or t
  misc_feature (3329)..(3331): n is a, c, g, or t
  misc_feature (3333)..(3333): n is a, c, g, or t
  misc_feature (3335)..(3338): n is a, c, g, or t
  misc_feature (3340)..(3340): n is a, c, g, or t
  misc_feature (3342)..(3343): n is a, c, g, or t
  misc_feature (3347)..(3347): n is a, c, g, or t
  misc_feature (3350)..(3351): n is a, c, g, or t
  misc_feature (3353)..(3353): n is a, c, g, or t
  misc_feature (3355)..(3356): n is a, c, g, or t
  misc_feature (3361)..(3362): n is a, c, g, or t
  misc_feature (3364)..(3364): n is a, c, g, or t
  misc_feature (3366)..(3366): n is a, c, g, or t
  misc_feature (3368)..(3368): n is a, c, g, or t
  misc_feature (3373)..(3373): n is a, c, g, or t
  misc_feature (3375)..(3377): n is a, c, g, or t
  misc_feature (3379)..(3379): n is a, c, g, or t
  misc_feature (3382)..(3385): n is a, c, g, or t
  misc_feature (3387)..(3387): n is a, c, g, or t
  misc_feature (3390)..(3392): n is a, c, g, or t
  misc_feature (3396)..(3396): n is a, c, g, or t
  misc_feature (3400)..(3400): n is a, c, g, or t
  misc_feature (3402)..(3402): n is a, c, g, or t
  misc_feature (3406)..(3406): n is a, c, g, or t
  misc_feature (3408)..(3410): n is a, c, g, or t
  misc_feature (3413)..(3413): n is a, c, g, or t
  misc_feature (3416)..(3416): n is a, c, g, or t
  misc_feature (3419)..(3423): n is a, c, g, or t
  misc_feature (3425)..(3425): n is a, c, g, or t
  misc_feature (3428)..(3428): n is a, c, g, or t
  misc_feature (3430)..(3432): n is a, c, g, or t
  misc_feature (3435)..(3436): n is a, c, g, or t
  misc_feature (3438)..(3443): n is a, c, g, or t
  misc_feature (3445)..(3445): n is a, c, g, or t
  misc_feature (3449)..(3450): n is a, c, g, or t
  misc_feature (3452)..(3452): n is a, c, g, or t
  misc_feature (3455)..(3456): n is a, c, g, or t
  misc_feature (3458)..(3458): n is a, c, g, or t
  misc_feature (3461)..(3463): n is a, c, g, or t
  misc_feature (3466)..(3467): n is a, c, g, or t
  misc_feature (3469)..(3470): n is a, c, g, or t
  misc_feature (3472)..(3472): n is a, c, g, or t
  misc_feature (3474)..(3475): n is a, c, g, or t
  misc_feature (3477)..(3477): n is a, c, g, or t
  misc_feature (3480)..(3482): n is a, c, g, or t
  misc_feature (3485)..(3486): n is a, c, g, or t
  misc_feature (3490)..(3492): n is a, c, g, or t
  misc_feature (3494)..(3496): n is a, c, g, or t
  misc_feature (3499)..(3501): n is a, c, g, or t
  misc_feature (3503)..(3505): n is a, c, g, or t
  misc_feature (3508)..(3509): n is a, c, g, or t
  misc_feature (3511)..(3511): n is a, c, g, or t
  misc_feature (3514)..(3514): n is a, c, g, or t
  misc_feature (3516)..(3520): n is a, c, g, or t
  misc_feature (3522)..(3523): n is a, c, g, or t
  misc_feature (3529)..(3532): n is a, c, g, or t
  misc_feature (3534)..(3534): n is a, c, g, or t
  misc_feature (3536)..(3536): n is a, c, g, or t
  misc_feature (3540)..(3540): n is a, c, g, or t
  misc_feature (3542)..(3542): n is a, c, g, or t
  misc_feature (3545)..(3545): n is a, c, g, or t
  misc_feature (3547)..(3547): n is a, c, g, or t
  misc_feature (3549)..(3549): n is a, c, g, or t
  misc_feature (3553)..(3553): n is a, c, g, or t
  misc_feature (3591)..(3592): n is a, c, g, or t
  misc_feature (3595)..(3596): n is a, c, g, or t
  misc_feature (3599)..(3600): n is a, c, g, or t
  misc_feature (3603)..(3604): n is a, c, g, or t
  misc_feature (3607)..(3608): n is a, c, g, or t
  misc_feature (3611)..(3612): n is a, c, g, or t
  misc_feature (3615)..(3616): n is a, c, g, or t
  misc_feature (3619)..(3619): n is a, c, g, or t
  misc_feature (3623)..(3623): n is a, c, g, or t
  misc_feature (3627)..(3627): n is a, c, g, or t
  misc_feature (3631)..(3631): n is a, c, g, or t
  misc_feature (3633)..(3635): n is a, c, g, or t
  misc_feature (3637)..(3637): n is a, c, g, or t
  misc_feature (3639)..(3639): n is a, c, g, or t
  misc_feature (3641)..(3641): n is a, c, g, or t
  misc_feature (3643)..(3643): n is a, c, g, or t
  misc_feature (3645)..(3645): n is a, c, g, or t
  misc_feature (3647)..(3647): n is a, c, g, or t
  misc_feature (3649)..(3649): n is a, c, g, or t
  misc_feature (3651)..(3651): n is a, c, g, or t
  misc_feature (3654)..(3654): n is a, c, g, or t
  misc_feature (3657)..(3657): n is a, c, g, or t
  misc_feature (3659)..(3660): n is a, c, g, or t
  misc_feature (3662)..(3665): n is a, c, g, or t
  misc_feature (3668)..(3668): n is a, c, g, or t
  misc_feature (3671)..(3673): n is a, c, g, or t
  misc_feature (3677)..(3679): n is a, c, g, or t
  misc_feature (3683)..(3683): n is a, c, g, or t
  misc_feature (3685)..(3685): n is a, c, g, or t
  misc_feature (3689)..(3691): n is a, c, g, or t
  misc_feature (3694)..(3694): n is a, c, g, or t
  misc_feature (3696)..(3696): n is a, c, g, or t
  misc_feature (3698)..(3698): n is a, c, g, or t
  misc_feature (3700)..(3703): n is a, c, g, or t
  misc_feature (3705)..(3705): n is a, c, g, or t
  misc_feature (3707)..(3707): n is a, c, g, or t
  misc_feature (3709)..(3711): n is a, c, g, or t
  misc_feature (3713)..(3713): n is a, c, g, or t
  misc_feature (3715)..(3717): n is a, c, g, or t
  misc_feature (3720)..(3720): n is a, c, g, or t
  misc_feature (3722)..(3722): n is a, c, g, or t
  misc_feature (3730)..(3730): n is a, c, g, or t
  misc_feature (3732)..(3732): n is a, c, g, or t
  misc_feature (3734)..(3734): n is a, c, g, or t
  misc_feature (3736)..(3736): n is a, c, g, or t
  misc_feature (3738)..(3740): n is a, c, g, or t
  misc_feature (3744)..(3746): n is a, c, g, or t
  misc_feature (3750)..(3752): n is a, c, g, or t
  misc_feature (3756)..(3759): n is a, c, g, or t
  misc_feature (3766)..(3766): n is a, c, g, or t
  misc_feature (3770)..(3770): n is a, c, g, or t
  misc_feature (3772)..(3773): n is a, c, g, or t
  misc_feature (3775)..(3775): n is a, c, g, or t
  misc_feature (3778)..(3778): n is a, c, g, or t
  misc_feature (3780)..(3780): n is a, c, g, or t
  misc_feature (3786)..(3786): n is a, c, g, or t
  misc_feature (3788)..(3788): n is a, c, g, or t
  misc_feature (3794)..(3798): n is a, c, g, or t
  misc_feature (3800)..(3801): n is a, c, g, or t
  misc_feature (3805)..(3809): n is a, c, g, or t
  misc_feature (3811)..(3811): n is a, c, g, or t
  misc_feature (3813)..(3815): n is a, c, g, or t
  misc_feature (3819)..(3820): n is a, c, g, or t
  misc_feature (3823)..(3824): n is a, c, g, or t
  misc_feature (3826)..(3826): n is a, c, g, or t
  misc_feature (3828)..(3833): n is a, c, g, or t
  misc_feature (3838)..(3839): n is a, c, g, or t
  misc_feature (3841)..(3842): n is a, c, g, or t
  misc_feature (3844)..(3851): n is a, c, g, or t
  misc_feature (3853)..(3854): n is a, c, g, or t
  misc_feature (3856)..(3862): n is a, c, g, or t
  misc_feature (3864)..(3871): n is a, c, g, or t
  misc_feature (3873)..(3873): n is a, c, g, or t
  misc_feature (3875)..(3875): n is a, c, g, or t
  misc_feature (3878)..(3878): n is a, c, g, or t
  misc_feature (3880)..(3880): n is a, c, g, or t
  misc_feature (3883)..(3883): n is a, c, g, or t
  misc_feature (3887)..(3887): n is a, c, g, or t
  misc_feature (3890)..(3890): n is a, c, g, or t
  misc_feature (3899)..(3901): n is a, c, g, or t
  misc_feature (3903)..(3904): n is a, c, g, or t
  misc_feature (3906)..(3908): n is a, c, g, or t
  misc_feature (3910)..(3910): n is a, c, g, or t
  misc_feature (3912)..(3916): n is a, c, g, or t
  misc_feature (3919)..(3919): n is a, c, g, or t
  misc_feature (3921)..(3921): n is a, c, g, or t
  misc_feature (3923)..(3925): n is a, c, g, or t
  misc_feature (3927)..(3927): n is a, c, g, or t
  misc_feature (3929)..(3931): n is a, c, g, or t
  misc_feature (3935)..(3935): n is a, c, g, or t
  misc_feature (3938)..(3938): n is a, c, g, or t
  misc_feature (3941)..(3941): n is a, c, g, or t
  misc_feature (3943)..(3943): n is a, c, g, or t
  misc_feature (3945)..(3948): n is a, c, g, or t
  misc_feature (3950)..(3951): n is a, c, g, or t
  misc_feature (3953)..(3953): n is a, c, g, or t
  misc_feature (3955)..(3958): n is a, c, g, or t
  misc_feature (3960)..(3960): n is a, c, g, or t
  misc_feature (3962)..(3964): n is a, c, g, or t
  misc_feature (3969)..(3974): n is a, c, g, or t
  misc_feature (3977)..(3982): n is a, c, g, or t
  misc_feature (3985)..(3990): n is a, c, g, or t
  misc_feature (3992)..(3997): n is a, c, g, or t
  misc_feature (3999)..(4000): n is a, c, g, or t
tttgtcttttttattaattaaataaagtttatatttattatgaagaggaaaaaaatccacctttgaattaaaataatataatttatattttttcttaccaattattggtttaactttaccataggacaattgtaatactaatatatatataaagataatcaacagtaattgtaacataaataaattcgatatatttatatatatattttttttattaaaaatttttatttaatatatatattttcaatattaattattatttcatattgattatattctgacaaaatctttttaataagattacataataaaatattaatatatcttaattataaaaatttttaaaagtgtgatatttcaataacttttttttttaaaattttattcattattattcattattattcaattgtataatttttagaaattgttaaagaaaataaaaaaaataatttaattgttttagtatataataattagttttataaactaataaaaaaaaaagaaaagcagtttttttttttaatagattttaataaatatagttattcaaaatttagggatatgctttttttttcttttatttaaaaataatatataagtttatcagtttaattattcctttttaattataattataaatataattattattcaaacttaatgatactttttatatatatatatatagaaaaattatttaactgaattgatttaattattccgtttaagtttttataattataattattattttaatttataattataaagacatatttagaattataaaatataaagataaccaaataatatatattaataaaataattttaattataaaatatttgaatatttattataataatgatctaaaatatggtttatggttaagtcttataatataaaatgaatgattattattaatttgtattttgatattattaattttggattattaagtattaaaattgttatttcgaaaatacaatttcttttataattcatatatgttagtatgtacttattttataatattgaatatactattaatattattattatatatagtattataattatataatatcaaaatataatcattatttcaaagaatttcttttattcattattattacaatatattttaataaaattaaaaggtttagtaatactattactaataaatatttatattcaattaactttttagtagatatatatatttattattaaagttatttcaactataaaattttgaattttatagttgaaataacgatatgtaatatatttaaatattacatgtacttggatttcattttaaatattttttaaatattaaatttattattttggaaatatgatttcctctatttttataaaatatattattaaataattatttaatatatatgctattaatatctattaattatcaatatattatttcaaagaatttcttttaatcataattattactactatcataatatattaaaataaaattaaaaggtataataataataataataataataacaacaaaaacaatatttataataatgataaatatatgacaaaaattaataaattctgttaatttttttttataagatatattagctttaaattatatattaatagtattaatagtaatattaaatacatcataacatcaaagttatattttaataataaatgctaatatatcttgtgaattaatatattttaataatgtataaagtaatagatattataaggggtaaaaatcacatatgattttgtcttttatgtaagctttcccgtaatatgttccagttattaatattttattattcaataatgaaatatcataaaatatattgtataaaagaaaaagtttttttttattaataatttttaaaaaaattaaaatttctctaaattaaagttttttgaataatattattaataattgtttttttttttaaaaaaaaaaaaaaagatggttcttttttccaaaaaaagtttgaaattatagtaataataaaaataaactataatatattgtaatatataaaaatatatattatgatttaaatgtagattaaatttttaaacttttttattaatcatcagttttcttttttatatcatccatcaattttttataactaatttgtattttaaccttttttttcatctatagatggatattaaaatttaattaaattgtaataaaatttttaattagatggtgatggtttatttaaaaatatatatatatatataatattaataatattatatattttaattatttatttttcgtctttaaaaattttattaattaaaatagattgaaccattatatataatataatatattctactttatataatttaatttaaaaaattaaattaaatttattcttattcttattatttatttattcttatttttttaaaaaaaaactattaataaaatattcataatgaaaatttgaatagattttaagacaaacagattattaataatttgtcgaaagttttgctaaaataaatttataatagatgctaatataaaaagtatttcatattaaaaagaaaagattgtaaaaatttatatattaagcagtatttatttttaaatatttaaatatttgaaaacttttttttttttttttaattacattaattcattgtttttttttatagtaaagagaattatataatataatagaatttattaaattaaatacatatatattatttattaagatacacataatatatataatataataattatcaatttttcataaagatgtcacaaaaaaaagttaataataataatagtaataattgcattaataataataataataataagagtattaataataataataaatacttaaatatattgcggttaaattatatttattaaaaaacgcctccattttttttttttttttttttttttttttnatttttttttttttttttttttttttttttttttttttnnnnntttttntttttntnttttttttnntntntntttttatnnnnnnntnnttnnatanntttntnntttannatattnnnatnattnntntttanaattnatnnnanntntnanannnnnnttnannnttttnntnntnntcannntnanaatnnnannaatnannnaattnnnnntnnnnnnnnnntnntnntnntatnnnnnttnnntnanntntttntnaannnttnntnntnntnntnnatttntaatnanttnatnntnaannnattnntnnnntntnantttnnnnntnnnnnnntttnnnnnttatnannnantnnnntntnntttnttnntntnnatttnntntntnataantnnntntannnntnttnnntttnattntnattntnnnaanaantannnnntnaantnnnttnntnnnnnntntttnntnatnntnttnnnatnntnntntnntnaannntannattnnnannnttnnnannnttnntnttntnnnnntnnttattnnnntnanaaantnaanananaaanaaaaaaaaaaaaaaaaaaaaaaaaaaaaaaaaaaaaannaannaannaannaannaannaannaanaaanaaanaaanannnananananananananaantananntnnnnatnatnnnaatnnnaatnanaatnnnaanantnannnntntntnnntntnnnttnantttaaatntnantntnnntttnnntttnnntttnnnntttatanttananntnaanantaaaantnaaaatnnnnntnntttnnnnntntnnntttnnttnntntnnnnnnagtannannannnnnnnntnntnnnnnnngnnnnnnnntnanaananaanaatnatnattattatnnntnnannntnannnnnatntntnnntntnnntatntanatntnannnntnnanannnnanannnataannnnnnttnnnnnnaannnnnntnnnnnnann

SEQ ID NO: 104 - DNA, 4000 bp, Escherichia coli
  misc_feature (965)..(969): n is a, c, g, or t
  misc_feature (972)..(972): n is a, c, g, or t
  misc_feature (974)..(979): n is a, c, g, or t
  misc_feature (981)..(984): n is a, c, g, or t
  misc_feature (986)..(986): n is a, c, g, or t
  misc_feature (988)..(989): n is a, c, g, or t
  misc_feature (991)..(991): n is a, c, g, or t
  misc_feature (993)..(996): n is a, c, g, or t
  misc_feature (998)..(1007): n is a, c, g, or t
  misc_feature (1009)..(1016): n is a, c, g, or t
  misc_feature (1019)..(1020): n is a, c, g, or t
  misc_feature (1022)..(1028): n is a, c, g, or t
  misc_feature (1030)..(1035): n is a, c, g, or t
  misc_feature (1037)..(1042): n is a, c, g, or t
  misc_feature (1046)..(1047): n is a, c, g, or t
  misc_feature (1050)..(1057): n is a, c, g, or t
  misc_feature (1060)..(1066): n is a, c, g, or t
  misc_feature (1068)..(1069): n is a, c, g, or t
  misc_feature (1075)..(1076): n is a, c, g, or t
  misc_feature (1078)..(1080): n is a, c, g, or t
  misc_feature (1082)..(1082): n is a, c, g, or t
  misc_feature (1084)..(1087): n is a, c, g, or t
  misc_feature (1089)..(1100): n is a, c, g, or t
  misc_feature (1102)..(1119): n is a, c, g, or t
  misc_feature (1121)..(1124): n is a, c, g, or t
  misc_feature (1127)..(1127): n is a, c, g, or t
  misc_feature (1129)..(1131): n is a, c, g, or t
  misc_feature (1133)..(1133): n is a, c, g, or t
  misc_feature (1135)..(1135): n is a, c, g, or t
  misc_feature (1137)..(1140): n is a, c, g, or t
  misc_feature (1143)..(1144): n is a, c, g, or t
  misc_feature (1146)..(1152): n is a, c, g, or t
  misc_feature (1154)..(1161): n is a, c, g, or t
  misc_feature (1164)..(1171): n is a, c, g, or t
  misc_feature (1173)..(1176): n is a, c, g, or t
  misc_feature (1178)..(1178): n is a, c, g, or t
  misc_feature (1181)..(1184): n is a, c, g, or t
  misc_feature (1186)..(1187): n is a, c, g, or t
  misc_feature (1189)..(1191): n is a, c, g, or t
  misc_feature (1193)..(1197): n is a, c, g, or t
  misc_feature (1199)..(1200): n is a, c, g, or t
  misc_feature (1202)..(1202): n is a, c, g, or t
  misc_feature (1204)..(1204): n is a, c, g, or t
  misc_feature (1207)..(1213): n is a, c, g, or t
  misc_feature (1215)..(1215): n is a, c, g, or t
  misc_feature (1217)..(1220): n is a, c, g, or t
  misc_feature (1222)..(1226): n is a, c, g, or t
  misc_feature (1228)..(1228): n is a, c, g, or t
  misc_feature (1230)..(1234): n is a, c, g, or t
  misc_feature (1236)..(1237): n is a, c, g, or t
  misc_feature (1240)..(1241): n is a, c, g, or t
  misc_feature (1244)..(1250): n is a, c, g, or t
  misc_feature (1252)..(1254): n is a, c, g, or t
  misc_feature (1256)..(1259): n is a, c, g, or t
  misc_feature (1261)..(1276): n is a, c, g, or t
  misc_feature (1278)..(1280): n is a, c, g, or t
  misc_feature (1282)..(1285): n is a, c, g, or t
  misc_feature (1287)..(1294): n is a, c, g, or t
  misc_feature (1298)..(1298): n is a, c, g, or t
  misc_feature (1300)..(1304): n is a, c, g, or t
  misc_feature (1306)..(1307): n is a, c, g, or t
  misc_feature (1310)..(1311): n is a, c, g, or t
  misc_feature (1314)..(1315): n is a, c, g, or t
  misc_feature (1317)..(1320): n is a, c, g, or t
  misc_feature (1324)..(1328): n is a, c, g, or t
  misc_feature (1331)..(1331): n is a, c, g, or t
  misc_feature (1333)..(1334): n is a, c, g, or t
  misc_feature (1337)..(1338): n is a, c, g, or t
  misc_feature (1340)..(1340): n is a, c, g, or t
  misc_feature (1342)..(1342): n is a, c, g, or t
  misc_feature (1345)..(1346): n is a, c, g, or t
  misc_feature (1348)..(1348): n is a, c, g, or t
  misc_feature (1351)..(1351): n is a, c, g, or t
  misc_feature (1353)..(1353): n is a, c, g, or t
  misc_feature (1358)..(1359): n is a, c, g, or t
  misc_feature (1361)..(1361): n is a, c, g, or t
  misc_feature (1364)..(1364): n is a, c, g, or t
  misc_feature (1369)..(1371): n is a, c, g, or t
  misc_feature (1375)..(1375): n is a, c, g, or t
  misc_feature (1378)..(1378): n is a, c, g, or t
  misc_feature (1380)..(1380): n is a, c, g, or t
  misc_feature (1382)..(1382): n is a, c, g, or t
  misc_feature (1384)..(1386): n is a, c, g, or t
  misc_feature (1392)..(1394): n is a, c, g, or t
  misc_feature (1396)..(1396): n is a, c, g, or t
  misc_feature (1399)..(1399): n is a, c, g, or t
  misc_feature (1403)..(1405): n is a, c, g, or t
  misc_feature (1407)..(1407): n is a, c, g, or t
  misc_feature (1409)..(1409): n is a, c, g, or t
  misc_feature (1411)..(1415): n is a, c, g, or t
  misc_feature (1417)..(1417): n is a, c, g, or t
  misc_feature (1419)..(1419): n is a, c, g, or t
  misc_feature (1421)..(1423): n is a, c, g, or t
  misc_feature (1428)..(1428): n is a, c, g, or t
  misc_feature (1432)..(1436): n is a, c, g, or t
  misc_feature (1481)..(1481): n is a, c, g, or t
  misc_feature (1484)..(1484): n is a, c, g, or t
  misc_feature (1487)..(1488): n is a, c, g, or t
  misc_feature (1514)..(1517): n is a, c, g, or t
  misc_feature (1522)..(1523): n is a, c, g, or t
  misc_feature (1529)..(1529): n is a, c, g, or t
  misc_feature (1532)..(1533): n is a, c, g, or t
  misc_feature (1535)..(1535): n is a, c, g, or t
  misc_feature (1537)..(1538): n is a, c, g, or t
  misc_feature (1540)..(1542): n is a, c, g, or t
  misc_feature (1544)..(1544): n is a, c, g, or t
  misc_feature (1546)..(1547): n is a, c, g, or t
  misc_feature (1550)..(1553): n is a, c, g, or t
  misc_feature (1596)..(1596): n is a, c, g, or t
  misc_feature (1599)..(1599): n is a, c, g, or t
  misc_feature (1605)..(1605): n is a, c, g, or t
  misc_feature (1610)..(1610): n is a, c, g, or t
  misc_feature (1613)..(1613): n is a, c, g, or t
  misc_feature (1620)..(1620): n is a, c, g, or t
  misc_feature (1664)..(1665): n is a, c, g, or t
  misc_feature (1671)..(1672): n is a, c, g, or t
  misc_feature (1675)..(1675): n is a, c, g, or t
  misc_feature (1677)..(1677): n is a, c, g, or t
  misc_feature (1681)..(1681): n is a, c, g, or t
  misc_feature (1684)..(1684): n is a, c, g, or t
  misc_feature (1686)..(1686): n is a, c, g, or t
  misc_feature (1729)..(1730): n is a, c, g, or t
  misc_feature (1732)..(1732): n is a, c, g, or t
  misc_feature (1735)..(1737): n is a, c, g, or t
  misc_feature (1739)..(1740): n is a, c, g, or t
  misc_feature (1745)..(1746): n is a, c, g, or t
  misc_feature (1748)..(1748): n is a, c, g, or t
  misc_feature (1750)..(1753): n is a, c, g, or t
  misc_feature (1791)..(1793): n is a, c, g, or t
  misc_feature (1795)..(1795): n is a, c, g, or t
  misc_feature (1797)..(1802): n is a, c, g, or t
  misc_feature (1805)..(1805): n is a, c, g, or t
  misc_feature (1807)..(1809): n is a, c, g, or t
  misc_feature (1811)..(1812): n is a, c, g, or t
  misc_feature (1814)..(1817): n is a, c, g, or t
  misc_feature (1856)..(1862): n is a, c, g, or t
  misc_feature (1864)..(1865): n is a, c, g, or t
  misc_feature (1867)..(1867): n is a, c, g, or t
  misc_feature (1869)..(1871): n is a, c, g, or t
  misc_feature (1873)..(1885): n is a, c, g, or t
  misc_feature (1922)..(1923): n is a, c, g, or t
  misc_feature (1925)..(1926): n is a, c, g, or t
  misc_feature (1928)..(1929): n is a, c, g, or t
  misc_feature (1931)..(1935): n is a, c, g, or t
  misc_feature (1937)..(1939): n is a, c, g, or t
  misc_feature (1942)..(1944): n is a, c, g, or t
  misc_feature (1946)..(1947): n is a, c, g, or t
  misc_feature (1949)..(1949): n is a, c, g, or t
  misc_feature (1988)..(1989): n is a, c, g, or t
  misc_feature (1991)..(1993): n is a, c, g, or t
  misc_feature (1996)..(1999): n is a, c, g, or t
  misc_feature (2001)..(2003): n is a, c, g, or t
  misc_feature (2005)..(2005): n is a, c, g, or t
  misc_feature (2007)..(2016): n is a, c, g, or t
tggctacatgtcccttgccgctacactcacaacggataacgttgccaacaccgtgggtacattgatgcatggccccacttttatggccaatccactggcatgcgccgttgccaatgccagtatcgaattattattgagctcggcttggcaagacaacattgctcgtattgaaacaacgtttcatgctgaactggcatcgcttaagcaaaataataaagtcaaagatgttcgtattttaggcgccattgccgtggttgaattgcatgacgatattggggtagaatggacacaagagcgcttgattgagcttggtgtttggctaagaccttacggtaagctactctacaccatgccaccgtttacgattaaagagaatgaactgttaacaatcaccaatgcaatgaagatcatcgtggaagagacatgaaaactataatcctagcattaagtctgttgtcatttttttctcaagcagctaactatgcagaagttggtgttgaggtggaatctaaaagattgaatggaaatgcgtactacattccaggcatatctggctcagccactgaatatgagggttttatttctaatgctggttttattgtaacaactgaaggcgtggtggtatttgatggtttgggttcaccacctttggccaatgccatgctgtcagagattagaaaagttaccgataaaccaatcaagctcgtgattgtgagccattatcatgccgatcacatttatggtctgcaagtttttaaagcacaaggtgcgaaaatctgggcgcctaaaggcgtttgggattaccttgattctgaaactgcagaaaccttgctaaaatctcgacgtgacacattgtttccttgggtaaacgatgaaacctatctggttgaacctgaccggattattgataaagacacccaatttagtctgggcgagcataaatttttaatcagctattttggaannnnncantnnnnnngnnnnangnnantnnnnannnnnnnnnntnnnnnnnnttnnannnnnnncnnnnnntnnnnnnggcnnatnnnnnnnntgnnnnnnncnnatattnntnnntngnnnnannnnnnnnnnnntnnnnnnnnnnnnnnnnnngnnnnttntnnncnangnnnnggnngnnnnnnngnnnnnnnnaannnnnnnntnnnntngannnntnntnnncnnnnntnntnantannnnnnntngnnnnannnnntnannnnntnnatnngtnnnnnnngnnntnnnntnnnnnnnnnnnnnnnnannntnnnnannnnnnnncgtncnnnnngnntanncgnnannnngttnnnnncgnannttnnantnttnnangantnattgnntnatngtttnnntttntgnantngnnngtcatnnntntanatannncngnannnnntntnannnaattngtgnnnnntgtttaggcgatagtcggttacaatccagcttatgccactatatntanatnngagttgtgatttgcgtttaggcgatnnnnggttnnaatagnaannananntnnnanannaannnnatagttgtgatttgcgtttaggcgatagtcggttacaatatanatnacttgnatacnccnaaacaanagttgtgatttgcgtttaggcgatagtcggttacaatgaacgtnnaataannganangctngangntgttgtgatttgcgtttaggcgatagtcggttacaatttatannanaannntnnaatannantnnnngttgtgatttgcgtttaggcgatagtcggttacaattnnnanannnnnnatnannncnnannnntagttgtgatttgcgtttaggcgatagtcggttacaatnnnnnnntnnantnnnannnnnnnnnnnnngttgtgatttgcgtttaggcgatagtcggttacaatnnannanntnnnnntnnntcnnntnntnttgttgtgatttgcgtttaggcgatagtcggttacaatnnannnaannnnannnanannnnnnnnnnagttgtgatttgcgtttaggcgatagtcggttacaatatgctcgctacaaacgctgtaccataggcgcaactttcattttttctagtcagaaaaatgaaagttgcgccggtacggtttcgatgggtcggcgtttttttccgtaaaaaacctcgatacgtccaaattgcttatcggtaattttgataattcttacctcgccatcaggcggtaggtggagtttgattctacgcgcgtgtacttgggcgttttcttcactactggagtggcgcatatacactgagtattgcatcatcctaaaaccatcctcaagcaaaaacttgcgaaaatgtgtgtaatctttacgcatccatttatcatcggttggtaaatcaaacagtacaattacccacatggtttgtaagcctccaaacataagtaatcccaatgttcaaaagctttatattacgctcgtaatatggggtatgtcaatgttgagcattctttagtaaagttacgctttagatttgccattagataatgcattgataccatcattggcatttgctttttatcatagcgcacattgtggctaatcaggtttaaaaacggagttttactctcaatggtaatagcaatgttggggttggcttgatacagctcataagcaatactatccacccaagggcgtaacggttccatcaggtcatctgccaagcacagagcattgtattgattgtgatgaaacaagcctattgcagggtgcaaaccactagcgcaaatattacgcgccaccatagcacggatgattgaatagccataattaagtatggcgttaatgccatcggcattttgatcacgaataaaatccaccccaaataaagccttccaataatactgagccgccaagccctcacaattagtactgtcgcctgatttaacttcggtggctaatttatgtaatcgagtataaggcttgttaaattgtttaagcgtatcagcttgattgttaatcttttgaatgataacttgcttccacagtcttttgcgtataggttcagagatattaatttgttgtttgaggattttttggtgcagggtattgccctcagcaatcggcaaaatagtggaatagggcaggtgtttttcatcacaaaaaataatcgctacattatgcttttggcattcaataatcaacggctgggtgatgctaatagcgctatgttctaaaattaaagcgccaatatcctcaatcgggacttgtgccactaattcatgatcttgatcaattaataattgcttgtgtttaaggtgtaaataactcggattactaacctcaacaatgcgtttaatcatgttcgataaaatgaccgatagtgtttatatcgtgttttacgattttatatttatcaaagttatctttactgataccaatataaatttcctcatctttattttttagtgttgatgctatgccaagacgcaagacaaaacgttttgcgcccgtatctattttttgcactcgataaaatacgcgctcgccatctccttgttcgatactcacggtatcgttgatatgcagtgccatgacaaattcccaatcttgcccatagtcagttttaataatggcttgtttgggtatgttaatacccttagcgcggtgcgaggcgagcatggtggttacaaactcgcctttaactttacctgttttgctatttttgatgatttcaacgtggtgggtgttgccatacgacatgtatttaaaaattttgccagttttatcacgcacgccaaatttggtttgggcgagtttcttttcgttggttttggattgtaatacacgcacacgcttaatggggtttttaccaagtttgagtaaagctaaatgttcagcattaaaagcctctttagggtttggatagttttcaaaatgctctaaaactttagttttaacagcttcatcaacaatgcttagggcatttttaagagtgaactctgggcttaggg

SEQ ID NO: 105 - DNA, 4000 bp, Escherichia coli
aaaagatctggctttgtttgttcgtattgctaaaatagaacgtccgaaaaacatcgatgacattccgatctgggtgatgattcctgcttttgtaattagtgaacttaaagtcgcatttcaaatcggatttttattatatgtcccgtttctggtgattgacatggttgtagcgtcaatcctgatggcaatgggtatgatgatgatgccgccggtgatgatttcattaccttttaaactgatgctctttgtacttgttgacggctggcacttgattcttggttcaatggtcaaaagttttgtagatttctaactctctttaatcattttaattacgagaaatttatgacagaagcgcttgtagtctcaatcatgattgaagccatgcggatggctaccctgcttgcggcacctatgctgattggcgcacttgttgtgggtttactggtttcaattttccaagcggttactcagatccaggagcagacattggctatcattcctaaaatgggtgcaatgatggctgttttagcattccttttcccttggttcctctcacaggcaacgacctacatgtccggcattttcactaacatccctcgctatattggcggataaaagccaatagataaacctactcttagttcattgagcaagatccaaaaaattcatctcaagtaatttctggctagaccatcctcttccgatattggataatggtgttcagactgtggaacaattccaaaaccgcagaaataaaattaatactattcctaaactgcaataattaaataaaaataattaaaaaaaactatgagtaaatctcctgatcctgaattagaaaccgatgatgatcctcaagaggaagtaatagaaatagatggagacagtttagagacaatcactgaagaaaaagcactcgtcatcagtgaagatgtttttccggattcactgctcatcgtaccactctatgatcgtccgcttttcccaaaaatgctgctgccggttatcatttctgatgaaaaactggaaaaagtattagaggatgaattaaaaggacctttgaaatatgtcggtctggtttacagttatgaacctgatgggccgaatgtcgagactgaagcagaaaatgttccggacaacctggcaaatataggagcagttggcaggatagtacaggcatcaaagcatggtaatgatccgatgcatataatagtgcaggtcatggagcgctttgaaattcttgaaataattgccgaagatcctgtctacagagcaaaagttgaatatctacagggtacagacgatcaaaaatctgagtatgaattaaaagccttttccgtttctattatcaattttattaaagaattggttcagctgaatccattgttcaaggaagagttaggtctgttgatggggcgcattaacctcaaagatcctgcaacacttgctgactttgcggcatccatgacaactgcatccggaaaggagttgcaggaaatattggaaacaatgagcatcaaggaacgtattgaaaaagccttaaatttgctgaggcatgaactcgaagttgcaaaacttcaggtaaaaatatcccagcgtgtagaagatcggatgtctcaacagcagcgtgaattttttctgcgtgaacaactaaaggaaattaaaaaagagttaggtatcaccaaagaaggttcagaaagtgagaccgagaaatatgaagcacgcataaagaaactaaaacttactgaagagggcaaagagcgtattgaagaagaattggagaaaatgcgtttaatcgaaccttcatcgccagaatatcatgttactcgaacttatctggactggctgacaattttaccgtggggtatttacagtaaagatgtctttaatatccagcgtgcagcaagaattctaaatcgtgaccactatggtttaaaagatgtcaaagatcggatcctcgaactgatctctgtgggcatcataaacggagacctcgcaggatcaattgttttgctggttggtcctcctggaacaggaaaaacatctgtggggcagtcaattgccagagcaataggacgtaaattttaccgtttttctctaggcggtatgcgtgatgaagcggaaataaaagggcatcggcgtacatatattggggcactcccaggaaaatttataaatgcgatgaaaacctgtaaaacggcaaatccagtaatcatgctggatgaaatagacaaaattggcgcaagttttcaaggagaccctgcatctgcattgctggaagtattagaccctgaacagaacaaagatttccttgatcattatcttgatgtacgctttgatctttcaaaagtactttttatttgtactgcaaaccaaacagacacgatcccacctgccttgctcgaccggatggaagtcatccggctttcaggttatatcctggaagagaaactgcaaattgcacgtaaacatcttttaccaaaacaacttaaaatacatggactcaagaagtcacagttttctctgccgaaagttgttctacgtgaaataattgatggttatgccagagaagcaggtgtaagaagtctggaaaacaatcttaaaaaaataatgagaaaatctgcacgtaagattgtagaggaagaaattgaaaatgttaagattactaaagatgatctgcctgaaatgttgggacgcaagactttcgcagaagaaacacgttacaaaaaacctaaagttggagtcataactggtctcgcatatacaagtgtcggcggagcaactttgttcatagaagcatcttttgtggaagctaagaatccgggattcaagcagacaggccaacttggtgatgtgatgatagaatcaactgaaattgcttacacatatatccgttcaaaaggcagtagtgatgcaagaattaaaaaattctttgcagaaaactttgtccacatgcacgtaccggcaggagctactcctaaagatggaccttctgcgggtattacaatggcttgcgcacttcactcactggttgcaaatgaagcaattattcctaatattgccatgactggagagttaactcttactggtttggttatgcctattggtggagtaaaagaaaaaacaattgctgccagacgtaccggtatttctcaattaatttttcctgcagaaaatcaaaaagattttgaggatttggatgagataataactagaggcatcaaaccgcattttgtgaaaacatttgaagatgtactgcctatttgctttccaaatttaaaaggaacaagtaaaaagaaaccggcaaaaaaataaatcgacattacatgcaatccatttttaacaatcctgaaattatttcactgttgggtttgctgtttgtttcaggtgcatttgcgggtttgttagcaggtcttttcggcgtcggcggtggaatcattttagtgccggccttactctatgcctttgatgaactgggttattcagctgaagtcactgcacacatggcagttgggacatcactggcgattatcgtacccacctcaatcacctccgcctggtcccattacaaacgtggttcaggcaacattattttattccgcaaacttgcaattccggtgatgttcggcgcgctgcttggttcatggcttggtggtagtttgagtggagatacactcaaagcggttttcgccacgctgacaatgttgattgcactaaatttattacggaaaaaccatttcgtacttgctaaagaattacctgcagcttcaaagcagtggagtgcagcaggtctgatcggtctgctttcagcaataatgggaatcggcggaggtgtctttttcacttcttactttactgcttacagtttgcctatgctgagcgcagttggaacatcagcaagtttaggtttgatgatttcactaccaggagcaatcggttatattttcagcggttggtacaatccaaatcttcctcaattaagcttcggatattttaattt

SEQ ID NO: 106 - DNA, 4000 bp, Escherichia coli
  misc_feature (1)..(1): n is a, c, g, or t
  misc_feature (4)..(5): n is a, c, g, or t
  misc_feature (7)..(8): n is a, c, g, or t
  misc_feature (10)..(14): n is a, c, g, or t
  misc_feature (19)..(19): n is a, c, g, or t
  misc_feature (22)..(24): n is a, c, g, or t
  misc_feature (27)..(27): n is a, c, g, or t
  misc_feature (29)..(29): n is a, c, g, or t
  misc_feature (32)..(34): n is a, c, g, or t
  misc_feature (37)..(47): n is a, c, g, or t
  misc_feature (49)..(52): n is a, c, g, or t
  misc_feature (55)..(56): n is a, c, g, or t
  misc_feature (58)..(58): n is a, c, g, or t
  misc_feature (60)..(61): n is a, c, g, or t
  misc_feature (63)..(66): n is a, c, g, or t
  misc_feature (68)..(73): n is a, c, g, or t
  misc_feature (75)..(77): n is a, c, g, or t
  misc_feature (79)..(81): n is a, c, g, or t
  misc_feature (84)..(85): n is a, c, g, or t
  misc_feature (87)..(87): n is a, c, g, or t
  misc_feature (90)..(92): n is a, c, g, or t
  misc_feature (95)..(95): n is a, c, g, or t
  misc_feature (97)..(101): n is a, c, g, or t
  misc_feature (103)..(105): n is a, c, g, or t
  misc_feature (108)..(109): n is a, c, g, or t
  misc_feature (112)..(115): n is a, c, g, or t
  misc_feature (117)..(118): n is a, c, g, or t
  misc_feature (120)..(124): n is a, c, g, or t
  misc_feature (126)..(131): n is a, c, g, or t
  misc_feature (133)..(135): n is a, c, g, or t
  misc_feature (138)..(139): n is a, c, g, or t
  misc_feature (141)..(142): n is a, c, g, or t
  misc_feature (145)..(146): n is a, c, g, or t
  misc_feature (148)..(148): n is a, c, g, or t
  misc_feature (150)..(152): n is a, c, g, or t
  misc_feature (156)..(157): n is a, c, g, or t
  misc_feature (159)..(159): n is a, c, g, or t
  misc_feature (163)..(163): n is a, c, g, or t
  misc_feature (165)..(170): n is a, c, g, or t
  misc_feature (173)..(175): n is a, c, g, or t
  misc_feature (177)..(177): n is a, c, g, or t
  misc_feature (180)..(184): n is a, c, g, or t
  misc_feature (186)..(186): n is a, c, g, or t
  misc_feature (188)..(194): n is a, c, g, or t
  misc_feature (196)..(196): n is a, c, g, or t
  misc_feature (198)..(203): n is a, c, g, or t
  misc_feature (205)..(206): n is a, c, g, or t
  misc_feature (208)..(209): n is a, c, g, or t
  misc_feature (213)..(218): n is a, c, g, or t
  misc_feature (220)..(229): n is a, c, g, or t
  misc_feature (232)..(235): n is a, c, g, or t
  misc_feature (237)..(238): n is a, c, g, or t
  misc_feature (241)..(242): n is a, c, g, or t
  misc_feature (244)..(248): n is a, c, g, or t
  misc_feature (251)..(253): n is a, c, g, or t
  misc_feature (255)..(258): n is a, c, g, or t
  misc_feature (260)..(260): n is a, c, g, or t
  misc_feature (262)..(264): n is a, c, g, or t
  misc_feature (266)..(271): n is a, c, g, or t
  misc_feature (274)..(278): n is a, c, g, or t
  misc_feature (280)..(285): n is a, c, g, or t
  misc_feature (289)..(292): n is a, c, g, or t
  misc_feature (294)..(300): n is a, c, g, or t
  misc_feature (302)..(302): n is a, c, g, or t
  misc_feature (305)..(307): n is a, c, g, or t
  misc_feature (309)..(309): n is a, c, g, or t
  misc_feature (311)..(316): n is a, c, g, or t
  misc_feature (318)..(322): n is a, c, g, or t
  misc_feature (325)..(325): n is a, c, g, or t
  misc_feature (328)..(331): n is a, c, g, or t
  misc_feature (334)..(335): n is a, c, g, or t
  misc_feature (337)..(341): n is a, c, g, or t
  misc_feature (345)..(346): n is a, c, g, or t
  misc_feature (350)..(351): n is a, c, g, or t
  misc_feature (354)..(354): n is a, c, g, or t
  misc_feature (356)..(359): n is a, c, g, or t
  misc_feature (361)..(361): n is a, c, g, or t
  misc_feature (363)..(363): n is a, c, g, or t
  misc_feature (365)..(367): n is a, c, g, or t
  misc_feature (369)..(371): n is a, c, g, or t
  misc_feature (374)..(377): n is a, c, g, or t
  misc_feature (382)..(386): n is a, c, g, or t
  misc_feature (388)..(390): n is a, c, g, or t
  misc_feature (392)..(392): n is a, c, g, or t
  misc_feature (394)..(394): n is a, c, g, or t
  misc_feature (397)..(398): n is a, c, g, or t
  misc_feature (400)..(401): n is a, c, g, or t
  misc_feature (403)..(408): n is a, c, g, or t
  misc_feature (410)..(410): n is a, c, g, or t
  misc_feature (412)..(412): n is a, c, g, or t
  misc_feature (414)..(415): n is a, c, g, or t
  misc_feature (417)..(418): n is a, c, g, or t
  misc_feature (420)..(427): n is a, c, g, or t
  misc_feature (429)..(429): n is a, c, g, or t
  misc_feature (431)..(431): n is a, c, g, or t
  misc_feature (433)..(435): n is a, c, g, or t
  misc_feature (438)..(441): n is a, c, g, or t
  misc_feature (444)..(446): n is a, c, g, or t
  misc_feature (526)..(526): n is a, c, g, or t
  misc_feature (528)..(528): n is a, c, g, or t
  misc_feature (543)..(543): n is a, c, g, or t
  misc_feature (546)..(546): n is a, c, g, or t
  misc_feature (549)..(549): n is a, c, g, or t
  misc_feature (552)..(552): n is a, c, g, or t
  misc_feature (579)..(579): n is a, c, g, or t
  misc_feature (604)..(604): n is a, c, g, or t
  misc_feature (664)..(664): n is a, c, g, or t
  misc_feature (738)..(738): n is a, c, g, or t
  misc_feature (747)..(747): n is a, c, g, or t
  misc_feature (945)..(945): n is a, c, g, or t
  misc_feature (948)..(948): n is a, c, g, or t
  misc_feature (967)..(967): n is a, c, g, or t
  misc_feature (993)..(993): n is a, c, g, or t
  misc_feature (1035)..(1035): n is a, c, g, or t
  misc_feature (1044)..(1044): n is a, c, g, or t
  misc_feature (1071)..(1071): n is a, c, g, or t
  misc_feature (1101)..(1101): n is a, c, g, or t
  misc_feature (1122)..(1122): n is a, c, g, or t
  misc_feature (1143)..(1143): n is a, c, g, or t
  misc_feature (1341)..(1341): n is a, c, g, or t
  misc_feature (1350)..(1350): n is a, c, g, or t
  misc_feature (1353)..(1353): n is a, c, g, or t
  misc_feature (1399)..(1399): n is a, c, g, or t
  misc_feature (1456)..(1456): n is a, c, g, or t
  misc_feature (1765)..(1765): n is a, c, g, or t
  misc_feature (1973)..(1973): n is a, c, g, or t
  misc_feature (1975)..(1976): n is a, c, g, or t
  misc_feature (1978)..(1981): n is a, c, g, or t
  misc_feature (1984)..(1984): n is a, c, g, or t
  misc_feature (1986)..(1986): n is a, c, g, or t
  misc_feature (1989)..(1990): n is a, c, g, or t
  misc_feature (1996)..(1996): n is a, c, g, or t
  misc_feature (2049)..(2049): n is a, c, g, or t
  misc_feature (2055)..(2056): n is a, c, g, or t
  misc_feature (2060)..(2062): n is a, c, g, or t
  misc_feature (2066)..(2066): n is a, c, g, or t
  misc_feature (2070)..(2072): n is a, c, g, or t
  misc_feature (2074)..(2074): n is a, c, g, or t
  misc_feature (2126)..(2126): n is a, c, g, or t
  misc_feature (2132)..(2132): n is a, c, g, or t
  misc_feature (2134)..(2134): n is a, c, g, or t
  misc_feature (2138)..(2142): n is a, c, g, or t
  misc_feature (2145)..(2147): n is a, c, g, or t
  misc_feature (2153)..(2154): n is a, c, g, or t
  misc_feature (2202)..(2202): n is a, c, g, or t
  misc_feature (2211)..(2211): n is a, c, g, or t
  misc_feature (2213)..(2213): n is a, c, g, or t
  misc_feature (2216)..(2216): n is a, c, g, or t
  misc_feature (2220)..(2220): n is a, c, g, or t
  misc_feature (2227)..(2228): n is a, c, g, or t
  misc_feature (2278)..(2278): n is a, c, g, or t
  misc_feature (2281)..(2282): n is a, c, g, or t
  misc_feature (2291)..(2291): n is a, c, g, or t
  misc_feature (2294)..(2295): n is a, c, g, or t
  misc_feature (2301)..(2301): n is a, c, g, or t
  misc_feature (2304)..(2304): n is a, c, g, or t
  misc_feature (2355)..(2355): n is a, c, g, or t
  misc_feature (2357)..(2357): n is a, c, g, or t
  misc_feature (2362)..(2362): n is a, c, g, or t
  misc_feature (2372)..(2372): n is a, c, g, or t
  misc_feature (2377)..(2378): n is a, c, g, or t
  misc_feature (2381)..(2381): n is a, c, g, or t
nttnntnnannnnnaaaanggnnnaancnttnnnttnnnnnnnnnnnannnnaannangnnannnntnnnnnnannncnnnccnntnaannnagntnnnnnannnttnnaannnngnntnnnnncnnnnnnannnttnnannaannangnnnaaanntnaaantnnnnnnttnnncnaannnnntngnnnnnnntncnnnnnnannannaaannnnnncnnnnnnnnnnaannnnannaannannnnnttnnnannnngntnnntnnnnnnggnnnnnannnnnntttnnnncnnnnnnngnttnnnangnnnnnntnnnnnaanttnnnnttnnannnnnaaannaaannggnannnncntnannngnnnaannnntaaannnnntnnntngnaanntnnannnnnncngntnngnnannnnnnnnangntnnnaannnnaannnattgcctatgataaagaaaactctatgcttcagcaatccaatctacttaagtttgcgaaatgcacaattagttctgcatntncctgaagtagaaagnaanaanacnttgcctgaagctataaaaaaagaagcngagcgcaccatcccgatagaagatntcggggtggtaatcctcgacaataggcgtattaccataacttctggggtaatggaggctntacttgagaacaactgcgcagtcatcacttgcaatcaaaagagtatgccagtagggttacttctgccactatgnggtaacacnacacaaaacgaacgtttccgctctcagatagacgcctccttacctttacggaaacagctttggcaacagacaataaaacaaaagattcttaatcaagagtatgtgctacggacaaatacagataaggaaaccaattgtatgcgtgtatggtctaatgatgtacgtagtggagaccctgataaccttgaagcaagagcngcngcctattattggaaaaacntctttataaattatccaaactttgtnagagacagagaaggaacccctcctaataatctcttaaactanggctatgcnattcttcgtgccataatcgctcgagcnttagtaggaagtggattgctaccaaccttnggaatccatcatcataatagntataacgcctattgtcttgcngatgatattatggaaccctatcgcccttatgtcgatcaattagtgttagatatcattcaatgcaactcagaaatatctgatatcacacgagatttgaaaatgcaacttctcggtattccaatgttagatgtagtgataaatggcaaacgcagtcctttaatgattgctgcccaacaaactacagcctcgcttgcaagntgttttgcnggngaaaacaaacgcattagttacccagaaatgtaaaagtagtatgacnggctttgagcgcttcagtgagtaccgaattatgtggattcttgtattctttgatctnccaacggaaacaaagaaggagaaaaaagcctatagtgatttccggaaatcccttatcaaggatgggttcactatgttccagttttccatctatgtacgccattgcgcaagtatggaaaatgcagaggtacatataaaacgagttcgaaccatgttaccaaagttaggaaaagtcggaatactctgtataacagataaacaatttgcaaacattcaactctactatggcgaaaaagaacaaactcctaacgcacctggacaacaattagaacttttttgaactttataccctaacaattaaaaacaagcnttcaatatcctctcaaccaacttaaaacttatccttctcagcatagtcattaaagtaaaaaatcccattctaaacgaatgggatttcactttgttgtatcaaattattttcgaataacaaacttatatcttgttgttagccaataaattaaacaacatcagttgttttagataccacaaaggtacagattttcaagcaaatcacaacnanntnnnncangntcnntatctnacaccgttgttttagataccacaaaggtacagattttcaagcaaatcacaacngcgtgnngatnnntatnaacnnnantttcgttgttttagataccacaaaggtacagattttcaagcaaatcacaacngtgtancncctnnnnnaannnatcttnngttgttttagataccacaaaggtacagattttcaagcaaatcacaacntactagtgnantantaantcagttnnaagttgttttagataccacaaaggtacagattttcaagcaaatcacaacntanntcttagttnttnncatgtngtnctagttgttttagataccacaaaggtacagattttcaagcaaatcacaacnantcgtntatgtgttantgccnnctntgagttgttttagataccacaaaggtacagattttcaagcaaatcacaaccaaaatcgcatatacatttataatcaatctgttgttttagataccacaaaggtacagattttcaagcaaatcacaacaagaattgactggaacaaaggctacattaagttgttttagataccacaaaggtacagattttcaagcaaatcacaactgcaattatgtgcgccttcagaagcaacatgttgttttagataccacaaaggtacagattttcaagcaaatcacaacttatggtctaaatatccagatattgagtcgttgttttagataccacaaaggtacagattttcaagcaaatcacaacggttacaaggttgcctatctgctgcaatgtgttgttttagataccacaaaggtacagattttcaagcaaatcacaaccgttgctatcaaatgtaacgtcactaaattgttgttttagataccacaaaggtacagattttcaagcaaatcacaacacccaacatacgaggacgacggcaagggcggttgttttagataccacaaaggtacagattttcaagcaaatcacaacctatggaagaaatatcccgatattgagtcgttgttttagataccacaaaggtacagattttcaagcaaatcacaactaatcgctacttcaaggagcacactggaacgttgttttagataccacaaaggtacagattttcaagcaaatcacaacatctttttttgttttagttttctttttagagttgttttagataccacaaaggtacagattttcaagcaaatcacaaccatgacaccattactccatatcttttcagagttgttttagataccacaaaggtacagattttcaagcaaatcacaacgggtgagaggaagaataactctcacccgtagttgttttagataccacaaaggtacagattttcaagcaaatcacaaccgctgaaaccttccaaagaaagaacctcttgttgttttagataccacaaaggtacagattttcaagcaaatcacaactggtgctgtgttagatgccccagctcttgagttgttttagataccacaaaggtacagattttcaagcaaatcacaaccacatatggtgcggataccccgcaccatatgttgttttagataccacaaaggtacagattttcaagcaaatcacaactgatgtctccttcaacatcttgcgttccatgttgttttagataccacaaaggtacagattttcaagcaaatcacaacataatttgtattataataattattttattgttgttttagataccacaaaggtacagattttcaagcaaatcacaactgatataatcattactaccaatttcatctggttgttttagataccacaaaggtacagattttcaagcaaatcacaaccagtaagtcacaacgcaagaagaacataagttgttttagataccacaaaggtacagattttcaagcaaatcacaacagatattgttcatgttctcatcggtgtaggttgttttagataccacaaaggtacagattttcaagcaaatcacaacacacttttattaagttgctcaagtttataagttg

SEQ ID NO: 107 - DNA, 4000 bp, Escherichia coli
  misc_feature (1980)..(1980): n is a, c, g, or t
  misc_feature (1985)..(1986): n is a, c, g, or t
  misc_feature (1989)..(1989): n is a, c, g, or t
  misc_feature (1997)..(1998): n is a, c, g, or t
  misc_feature (2013)..(2013): n is a, c, g, or t
  misc_feature (2018)..(2019): n is a, c, g, or t
  misc_feature (2025)..(2025): n is a, c, g, or t
  misc_feature (2027)..(2028): n is a, c, g, or t
  misc_feature (2039)..(2040): n is a, c, g, or t
  misc_feature (2045)..(2046): n is a, c, g, or t
  misc_feature (2051)..(2052): n is a, c, g, or t
  misc_feature (2054)..(2054): n is a, c, g, or t
gcccgtttctcccgatagcaacaaggttggttggatgggtaactttcatggaatggcacaaaaaaccgttatccgtaatttactgagtaaatacggctatttgtccgtagaaatgcaaaatgccatcaccaatgactacgagggtgacgaaacttcacagcgtgaaatattgaccgacaattacgcaaacaaacaattgattgatgcggaagatgtgagctttgaaagcgtgtctgaacaccatacggaaagcgagcaacaaacggcaactattgaccccggatattgatagcgtatgaaactgatagtattaggttcgagtagttcgggtaattgctatatacttgataatggtacggaaagccttattatagaagctggaatccgtttccaagaagtcaagaaagcgttggatttcaatctgagaaaggttgtagggtgtgtggtaacgcacgcccacaacgaccacgccaaatatattaaggcgatggtagatagtggatttcacacgttggcattacgggaggtatggactgcaaagggcgtttgggattcccgttctttggtggttaaagagggcaaaggctataagatgggtaattttaaggtacttccttttcctgcttgccatgatgtgccatgtgtcggctatctgatagaccaccccgatatgggaaagatggtatttcttaccgatagctgtatgtgcgaatatcagttcaaggggcttaaccatgtgctgatagagtgcaattactctgataagaagctcatcgaggcgattacaaccgggcgcacgttgccctcacagcgtgaacgtctgcttacctcacacatggagcttactacgtgcaaggggtttttggaagcaaacgacttatcccatgtttcggaaatcgtgcttttacacctttccgagaataatagcgatgagccttatttcatatcggaagtggaaaggcatacggggaaagtggtttatgcggcaaagccgggtttaacgattgatttagacagaatataaggatatggctaaactccaagtagaaaagagaaacgggttatttgatttgaagcctctatacgaatggatgcgtaacgctttggatggtatctataggatagaggttaagaaagtcagaaagccacgttctttagaccaaaacgggtggttgttcgggtgtatttaccctatccttttagacgctcttttggaagctggttgggagttcgtttcagtagaacaagtgcatgagttttttaaggctcaaatgacggctgacaaagtggtaaataagcacacgggggagattatagagttcccgtgttctacagccactatggacacggtgacattctccacctattgcgaaaaactgagggagtacgccaaagagtttctgaatgtggatattcccgacccggataaatattggagaagccatgaaaagaatacctaacagcgtggtatctgagctgatacgcttagtgcccattttgatagcaaatattccacccggacaaagtacgagagtggataacgcaataagattaacaaaaaagattatcaacaaattaaaaacattgaaagatgagaacatttgaaattacagagaaagaagtagcggctgcatttcgtgaagcggaaagtggagaagcaaagaaaatattggcggctttgttctgcaaggaagaaatggtaaaacctacactggacgattacaagacaattcgcacgtatgaggatgcttgtaaggcacttggtgagcctatttttgaagaccctaataatttgcccaatcatatcatagcccttatgaagttggaaactattagccgggctttgtggggtagaaatttccaaccaaagccggatggggagggaagcaaagtgtattggtatccgtggtttgccttatggactaagaaagaggttgaggatatgaatcccgaacaaagaggtgcccttttgtctgcgantgcgnnttntggtgcgnntgcgggtttcggttntctgnntgcgantnntcgttcctcgnntgcgnntgcgnncnttgggttccgcttgtgccaagaaacggaagaaaaggctaagtattttgggcagcaattcattgaactttgggctgaatatttgaaattcaactttaccgtaggaaatcgtttgaaataaaagtgtgtttgtcaaacatattatcaactaaaaaataaagtgaaatgaaagacatcatgttagccgataccccggtggaacaaagggaacagattctacgtgatagctgcgaccaaattgtagaacgtagctacacacgcaaatttgacacgcaacagattaacgaaagacgtgctgaacttgcaaacgtagcaattcaaaaagctgatttggaagatgagttggctggaatcagagctgaatacaagtccaaaattaagcctttggatgagagaattggaaaggttcgtgatgagttgaaagccggaggcgattatgtaaaaggtgattgcttcaagtttgtagatgaagatgagggcatggttggattctacaccccggagggttatttgctggagcaacgtgccatgacgcaagaagaaagacaacgtaacgtattccgtgccattagaacggatagaacgggtacgaatgattgattattaacacattaaattttagtaaaatggaaaatcaagaaaaaggattaaccgtaaacatcggtgagtacaagggtgaaaaacctatcgaagtagtgtacagaattggtaatgctcctaaagcattggacgaattgcccattaagcaaccggaaagtatttctgtatcaggtgttatcagaactccgttggattggttggaaaagcgtattgacaccatcgaccaaaagcgtgcgaatgttaaagtaaaccgtgagaaaatgagtatcacgcttaccgtgaatgaggatgattattacaccaaaaacacctttgtaggtacggtggaattatcggaagtcttttcaaagttcggtatcaatgacggagaatgtggctggattccggctaaactggggcagttcctgcgtttgaatcgtggcgtattcatgcaaaaagaggattgtatgaagctcgtttcggtattaaagaacttcacggctaacgccaagactgaaattcagaaacagcgtgacccgtccggctctatggctgaggtgtaccgttcacaggtagaaagtaatttgcccaagagtttcacgattaacatcgccattttcaagggaactgcaaaaacgcctattgaagttgagttcgaccactatctttctaatggtgatgtgttgttgcaacttgtttcgcccggtgctaacgaactggcagaggactacagagataagtgtattgatgaggtgttggacggtattcgtgccattgccccggacattgctattcttgaaatctaaatactatatcgtgggggagcaatcccccacttataacagctcataatatggctaataaaaaaatcataccgcctatgcctttcgatgctaccgcttggttatccaacaatgcggctatgaggttgtcatttgcttgtaagggcttgtggctggatatgctttgctgtatgtgggtgagtatagagcgtggggttatgctgaaacctattggcggtgcgtacacggttgatgaattagaagccctctacggaagtggaacaaaggagctgatagaatcattgattaacgctgaattattgtctgtaaggaatgatggagctttgtacaacgctgatatggttaaaatggaatcaatacgggtaaaacggtctgaggctgggaaaaaaggtggtgtaactatgggtaaacggatattagccaaagttgatgcgcttgtggaaacgccaccgatagaaacgccacatacaccgtccccaacggctgaaacgcaacaaggggcgcaagcagacctattccccgatgatttgccggagaatccaccgccactgactgatgaacaacag

SEQ ID NO: 108 - DNA, 4000 bp, Escherichia coli
  misc_feature (2979)..(2979): n is a, c, g, or t
  misc_feature (2982)..(2982): n is a, c, g, or t
  misc_feature (2985)..(2985): n is a, c, g, or t
  misc_feature (3138)..(3138): n is a, c, g, or t
  misc_feature (3144)..(3144): n is a, c, g, or t
  misc_feature (3153)..(3153): n is a, c, g, or t
  misc_feature (3363)..(3363): n is a, c, g, or t
  misc_feature (3384)..(3384): n is a, c, g, or t
  misc_feature (3657)..(3657): n is a, c, g, or t
  misc_feature (3735)..(3735): n is a, c, g, or t
  misc_feature (3858)..(3858): n is a, c, g, or t
  misc_feature (3891)..(3891): n is a, c, g, or t
  misc_feature (3978)..(3978): n is a, c, g, or t
gtgttatgacggtcagaacttcttcgacaacgaccacccggtatatgaaaaagtcgatggcaccggccaatccaccactgtatccaatattttcaccggtaccgaagccgcttggtatttgctggatacatcacgcgccctgaaacctctgatttatcaggaacgcaagcctaagcagttcactgccatgaccgccgctaccgacgaaggcgtatttatgcgcaacgaataccgctacggcgtggacggccgttgtaatgttggtttgggcttctggcaaatggcggctaagtcgcaagaaaccctggatgccgaaggttttgaaaaggcttacaacgcaatggtcagcctgaaaggcgacggcggccgaccgctgggtatccgcccgaatgtgctgctggttcctccttctttggaaaacgccgccaaaaaattagtggaaggcgaccgcctggatagtggtgcgtacaacccgaacaaaggcaaatgcaaggtaatcgtatctccttggttgctgtaaccctttagataggcgggctctgcccgccgaaaggataagaaatggcaaaagtaaaaaacgaagatgaaaaaaccgagcaaacggttggcgcaactgtggatgtaaaccccgaagacgttaagttgcaggcgtttcttgaggctgaagtcgaaaaattgaacgccgagcttgaagcggcgcgtgtgcgtatcgccgaattggaagctcaattggaacaggccgcaagccctgccgttgaagcagtagcagcacaagaacgctatcaggcaggcggtgaagcggcggcagatgccgaagtggttgccatcaaatccaaacatggccatgcgttttggcgcagcgggtatcacgttcaaccgcattttacctttgtgaaacgtgccgatttcgagcccgaagcgtgggagcgcctgctggccgaaccgatggctgttgtttgtgaagccttgcctgtggagcaggattaatggcttacgcaacggttgccgatttggtggcgcgttataccgagccgacgattgcaggtctgaccgacctgacgcgcttgggaagcgtgaatgccgaaattgcgcaacaaggtttggatgatgcctccgccgaaatcgacggctatctggcatcgcgctatgaattgccgttgcctgcccctgtgcgcctgttgagcctttattgctgcgacattgccgtttaccgtttggcaacgggcaagcgccaactgacggaagatatggtgcaccgatatgaggcggcgattgcgtatctcaaattggtggcatcaggcaaggctggtttgggtgtggctgaaaatgccgaccccaagccgaccgtgcaaggtgatgcggtaatgtttgccgccaaggaaaaggtgttcggccgtgatagcgtctattgaacaagccatcaaacagcgtctttcagacggccttggccaaatggtcagcggtgtgcatacatacggtggcgaatttgacggcgaaggcttggctcaagtggtcaaccagttccccgccgtttgggtcatgtttgccggcattaccgacagcgagccccatgatacgcgccgaacacgctaccaagtcactggtcactttactgtcttggtcggcgaccgtgccagcggcagcgaggcggacagccgcttcggcggtttacaccgaaacgatgtcggcacttaccggctgatgcaggccgtgcgcctgttgctgatcaatcagactatgggtttgtgtataggccgtctaaagccgggcaaagcaaaaagcctgttttctaaacaaatggagttggacgcaatcagcgtatttgcgctggattttgaaacgcattggttcgaagacgcactgcgagacggcgattggccacggcctacggtttcagatgctcaacaggcgcaaatatatgccgacgtatccgaataccatggctgtacctatccagaacatcctgacttgaaaggcgcaaaccttgagctgcgtatcccgcccaaaaaaccaaaccaacccgccgatatggcggccaccgttaaaaccgaggtaaaacatgactgaaaccattaaagttcgtgccgccacaggtctgcaagtacctatggcaggaaagccacatgaatatattaccgaccaagaagcggtcgaagtgccgaatgccgcgtattacctgcgctgtattcactacggcgacttggttattgttgaggacaacccgaaaggcaacaaatcatgacttccgcaaacgtcagtttcgacaaaattcagaccagtacgcgtaagccgggcgtttacgtcgaatggaacaccaagcttgctgtacgcaacctgccaaccaacaagcaacgtgtactgctgattgcgcaacacagcaatcccaaggcgggcaagctgactgcgctggcaaatatctattctgcggccgatgtcgcagctgcgtatggtgccggctctcaggcgcatttgatggcattggccgctatcaaggcttacgcatatgcagatttgagcctgattaccgttgccgacaatgaagcaggcgttgcggcgaccggcaatatcacgattacgggcactgccgatacgcaaggcgttttacgcgtcaacatcggcaatgccgatacgctgaccgtcggtgtcgccgccaatgcaaccgccgcaaccgtagcctctgccgtcaaagccgccattgatgccgaaacatcattgccggtaacggcgacagcctctgaaggcttggtaacgctgacagctaaaaataaaggcacgcacggcaaccatatccgtattcgcacaggtaataccgccgaagggattaccgttgcagtcaaagcgatgagcggcggcgatgccgatgccgatatcggccctgcattgaatgcagtgattgccgaaggccataatttgattgcggtaggctgtaccgatgaggcgaacctcttgaagttgcgcacacatttggaaactgtcggngcnccngaagaaaaacgctgggcattgggtatttatggccaaaccggtgcattggcgcaaacaacgacacaggcaggccgtctgaacagcggttatctgtattcggcctggtatcgtaaaacgcctagcctgccatgtgagctggcagccgcgtttgcngccgtngtggccagngaggaagacccggctcgtccgctcaataccctgaagctcaacggcatcggtgtgtgcgacagtgcagacaagactatgcgtaccgaacaggaaaacgcgctctacaacggcgttactcctattgaaaccagcccagacggcacatccgcccaaatcgtccgcgctatttcgacttataccaaaactgccaacggcacggcagacgaaagnctgctcgatatgactaccgtncgcacattgatttatgtatcaggcgcgtgtgccgaccgtatcgcattgcgtttcccgcgcgacaaaatgaccgagcgcaccattgcccgtgtccgctccgaattgatcgacgtgttgatgaaatgcgaagaattggaaatcgtcgaagacgttgaaaacaatttggccaacctgattgtggaacgcgatgcacaaaacaccggcatgctcaactgccgcgtgccatccgatgtggttaacggcctgcaccaagtaggcatggttatcgacctntatctgtaaaaaggaaagaacatgagtacagaatatgtaggcagcgtaacgctgtatgtcggtgcgaccgaggtggangtcaccaagattgatgtgaaaaacatcacaggcaaaaaagaagttaaaaccatgaaccgcacacgccgcgtcaaaggctttacgcgcggtgtcggccagtatgatatttcttttaccgccgtngtgccgacagacggtacggttatcgattggganaaaatcgaagacgcaaaaatctcgctggttcctgatatcaatggtgcgcgcccaacctcctatcttggtttttgcgcgaaggaagcnggtgaaagctatacggtggaca

SEQ ID NO: 109 - DNA, 4000 bp, Escherichia coli
  misc_feature (1)..(16): n is a, c, g, or t
  misc_feature (18)..(53): n is a, c, g, or t
  misc_feature (55)..(57): n is a, c, g, or t
  misc_feature (59)..(61): n is a, c, g, or t
  misc_feature (63)..(117): n is a, c, g, or t
  misc_feature (119)..(119): n is a, c, g, or t
  misc_feature (121)..(146): n is a, c, g, or t
  misc_feature (148)..(157): n is a, c, g, or t
  misc_feature (159)..(194): n is a, c, g, or t
  misc_feature (196)..(207): n is a, c, g, or t
  misc_feature (209)..(214): n is a, c, g, or t
  misc_feature (216)..(287): n is a, c, g, or t
  misc_feature (289)..(374): n is a, c, g, or t
  misc_feature (376)..(458): n is a, c, g, or t
  misc_feature (460)..(463): n is a, c, g, or t
  misc_feature (465)..(504): n is a, c, g, or t
  misc_feature (506)..(548): n is a, c, g, or t
  misc_feature (550)..(574): n is a, c, g, or t
  misc_feature (576)..(576): n is a, c, g, or t
  misc_feature (578)..(616): n is a, c, g, or t
  misc_feature (618)..(640): n is a, c, g, or t
  misc_feature (642)..(663): n is a, c, g, or t
  misc_feature (665)..(670): n is a, c, g, or t
  misc_feature (672)..(698): n is a, c, g, or t
  misc_feature (700)..(769): n is a, c, g, or t
  misc_feature (774)..(778): n is a, c, g, or t
  misc_feature (780)..(784): n is a, c, g, or t
  misc_feature (786)..(788): n is a, c, g, or t
  misc_feature (790)..(791): n is a, c, g, or t
  misc_feature (794)..(798): n is a, c, g, or t
  misc_feature (801)..(805): n is a, c, g, or t
  misc_feature (809)..(811): n is a, c, g, or t
  misc_feature (813)..(814): n is a, c, g, or t
  misc_feature (1937)..(1938): n is a, c, g, or t
  misc_feature (1940)..(1940): n is a, c, g, or t
  misc_feature (1943)..(1944): n is a, c, g, or t
  misc_feature (1949)..(1950): n is a, c, g, or t
  misc_feature (1957)..(1957): n is a, c, g, or t
  misc_feature (1976)..(1977): n is a, c, g, or t
  misc_feature (1982)..(1983): n is a, c, g, or t
  misc_feature (1985)..(1985): n is a, c, g, or t
  misc_feature (1997)..(1998): n is a, c, g, or t
  misc_feature (2003)..(2004): n is a, c, g, or t
  misc_feature (2009)..(2010): n is a, c, g, or t
  misc_feature (3160)..(3160): n is a, c, g, or t
  misc_feature (3164)..(3165): n is a, c, g, or t
  misc_feature (3168)..(3168): n is a, c, g, or t
  misc_feature (3171)..(3171): n is a, c, g, or t
  misc_feature (3180)..(3180): n is a, c, g, or t
  misc_feature (3185)..(3185): n is a, c, g, or t
  misc_feature (3187)..(3187): n is a, c, g, or t
  misc_feature (3189)..(3190): n is a, c, g, or t
  misc_feature (3193)..(3193): n is a, c, g, or t
  misc_feature (3197)..(3197): n is a, c, g, or t
  misc_feature (3200)..(3200): n is a, c, g, or t
  misc_feature (3202)..(3203): n is a, c, g, or t
  misc_feature (3205)..(3205): n is a, c, g, or t
  misc_feature (3207)..(3208): n is a, c, g, or t
  misc_feature (3210)..(3211): n is a, c, g, or t
  misc_feature (3214)..(3214): n is a, c, g, or t
  misc_feature (3216)..(3220): n is a, c, g, or t
  misc_feature (3223)..(3224): n is a, c, g, or t
  misc_feature (3226)..(3226): n is a, c, g, or t
  misc_feature (3228)..(3230): n is a, c, g, or t
  misc_feature (3234)..(3234): n is a, c, g, or t
  misc_feature (3238)..(3238): n is a, c, g, or t
  misc_feature (3242)..(3242): n is a, c, g, or t
  misc_feature (3244)..(3244): n is a, c, g, or t
  misc_feature (3250)..(3252): n is a, c, g, or t
  misc_feature (3256)..(3257): n is a, c, g, or t
  misc_feature (3261)..(3262): n is a, c, g, or t
  misc_feature (3264)..(3264): n is a, c, g, or t
  misc_feature (3267)..(3267): n is a, c, g, or t
  misc_feature (3273)..(3277): n is a, c, g, or t
  misc_feature (3279)..(3280): n is a, c, g, or t
  misc_feature (3282)..(3282): n is a, c, g, or t
  misc_feature (3284)..(3284): n is a, c, g, or t
  misc_feature (3288)..(3289): n is a, c, g, or t
  misc_feature (3299)..(3302): n is a, c, g, or t
  misc_feature (3310)..(3312): n is a, c, g, or t
  misc_feature (3317)..(3317): n is a, c, g, or t
  misc_feature (3320)..(3321): n is a, c, g, or t
  misc_feature (3323)..(3326): n is a, c, g, or t
  misc_feature (3330)..(3331): n is a, c, g, or t
  misc_feature (3333)..(3334): n is a, c, g, or t
  misc_feature (3338)..(3339): n is a, c, g, or t
  misc_feature (3341)..(3341): n is a, c, g, or t
  misc_feature (3343)..(3343): n is a, c, g, or t
  misc_feature (3348)..(3350): n is a, c, g, or t
  misc_feature (3352)..(3352): n is a, c, g, or t
  misc_feature (3355)..(3355): n is a, c, g, or t
  misc_feature (3366)..(3366): n is a, c, g, or t
  misc_feature (3370)..(3370): n is a, c, g, or t
  misc_feature (3373)..(3373): n is a, c, g, or t
  misc_feature (3375)..(3379): n is a, c, g, or t
  misc_feature (3382)..(3382): n is a, c, g, or t
  misc_feature (3384)..(3384): n is a, c, g, or t
  misc_feature (3388)..(3390): n is a, c, g, or t
  misc_feature (3392)..(3395): n is a, c, g, or t
  misc_feature (3402)..(3403): n is a, c, g, or t
  misc_feature (3407)..(3407): n is a, c, g, or t
  misc_feature (3414)..(3415): n is a, c, g, or t
  misc_feature (3420)..(3420): n is a, c, g, or t
  misc_feature (3422)..(3422): n is a, c, g, or t
  misc_feature (3424)..(3426): n is a, c, g, or t
  misc_feature (3428)..(3429): n is a, c, g, or t
  misc_feature (3431)..(3439): n is a, c, g, or t
  misc_feature (3441)..(3444): n is a, c, g, or t
  misc_feature (3446)..(3446): n is a, c, g, or t
  misc_feature (3452)..(3452): n is a, c, g, or t
  misc_feature (3459)..(3459): n is a, c, g, or t
  misc_feature (3461)..(3461): n is a, c, g, or t
  misc_feature (3466)..(3466): n is a, c, g, or t
  misc_feature (3470)..(3470): n is a, c, g, or t
  misc_feature (3472)..(3472): n is a, c, g, or t
  misc_feature (3482)..(3482): n is a, c, g, or t
  misc_feature (3485)..(3485): n is a, c, g, or t
  misc_feature (3488)..(3488): n is a, c, g, or t
  misc_feature (3496)..(3496): n is a, c, g, or t
  misc_feature (3499)..(3499): n is a, c, g, or t
  misc_feature (3506)..(3508): n is a, c, g, or t
  misc_feature (3515)..(3515): n is a, c, g, or t
  misc_feature (3518)..(3519): n is a, c, g, or t
  misc_feature (3525)..(3525): n is a, c, g, or t
  misc_feature (3530)..(3530): n is a, c, g, or t
  misc_feature (3541)..(3542): n is a, c, g, or t
  misc_feature (3547)..(3547): n is a, c, g, or t
  misc_feature (3553)..(3553): n is a, c, g, or t
  misc_feature (3555)..(3556): n is a, c, g, or t
  misc_feature (3563)..(3564): n is a, c, g, or t
  misc_feature (3571)..(3571): n is a, c, g, or t
  misc_feature (3574)..(3574): n is a, c, g, or t
  misc_feature (3580)..(3582): n is a, c, g, or t
  misc_feature (3591)..(3592): n is a, c, g, or t
  misc_feature (3595)..(3595): n is a, c, g, or t
  misc_feature (3605)..(3605): n is a, c, g, or t
  misc_feature (3607)..(3607): n is a, c, g, or t
  misc_feature (3612)..(3612): n is a, c, g, or t
  misc_feature (3616)..(3616): n is a, c, g, or t
  misc_feature (3618)..(3618): n is a, c, g, or t
  misc_feature (3624)..(3625): n is a, c, g, or t
  misc_feature (3627)..(3627): n is a, c, g, or t
  misc_feature (3633)..(3633): n is a, c, g, or t
  misc_feature (3637)..(3638): n is a, c, g, or t
  misc_feature (3640)..(3640): n is a, c, g, or t
  misc_feature (3642)..(3642): n is a, c, g, or t
  misc_feature (3644)..(3645): n is a, c, g, or t
  misc_feature (3650)..(3650): n is a, c, g, or t
  misc_feature (3653)..(3653): n is a, c, g, or t
  misc_feature (3657)..(3657): n is a, c, g, or t
  misc_feature (3660)..(3660): n is a, c, g, or t
  misc_feature (3669)..(3669): n is a, c, g, or t
  misc_feature (3674)..(3674): n is a, c, g, or t
  misc_feature (3676)..(3676): n is a, c, g, or t
  misc_feature (3678)..(3678): n is a, c, g, or t
  misc_feature (3681)..(3681): n is a, c, g, or t
  misc_feature (3683)..(3683): n is a, c, g, or t
  misc_feature (3689)..(3692): n is a, c, g, or t
  misc_feature (3695)..(3699): n is a, c, g, or t
  misc_feature (3704)..(3704): n is a, c, g, or t
  misc_feature (3708)..(3710): n is a, c, g, or t
  misc_feature (3717)..(3718): n is a, c, g, or t
  misc_feature (3725)..(3725): n is a, c, g, or t
  misc_feature (3730)..(3732): n is a, c, g, or t
  misc_feature (3735)..(3735): n is a, c, g, or t
  misc_feature (3737)..(3737): n is a, c, g, or t
  misc_feature (3742)..(3742): n is a, c, g, or t
  misc_feature (3745)..(3745): n is a, c, g, or t
  misc_feature (3750)..(3750): n is a, c, g, or t
  misc_feature (3752)..(3753): n is a, c, g, or t
  misc_feature (3756)..(3756): n is a, c, g, or t
  misc_feature (3758)..(3758): n is a, c, g, or t
  misc_feature (3762)..(3762): n is a, c, g, or t
  misc_feature (3765)..(3765): n is a, c, g, or t
  misc_feature (3767)..(3768): n is a, c, g, or t
  misc_feature (3773)..(3774): n is a, c, g, or t
  misc_feature (3778)..(3778): n is a, c, g, or t
  misc_feature (3781)..(3781): n is a, c, g, or t
  misc_feature (3784)..(3785): n is a, c, g, or t
  misc_feature (3790)..(3790): n is a, c, g, or t
  misc_feature (3793)..(3793): n is a, c, g, or t
  misc_feature (3796)..(3796): n is a, c, g, or t
  misc_feature (3798)..(3798): n is a, c, g, or t
  misc_feature (3802)..(3802): n is a, c, g, or t
  misc_feature (3805)..(3805): n is a, c, g, or t
  misc_feature (3811)..(3811): n is a, c, g, or t
  misc_feature (3813)..(3813): n is a, c, g, or t
  misc_feature (3820)..(3822): n is a, c, g, or t
  misc_feature (3824)..(3826): n is a, c, g, or t
  misc_feature (3828)..(3828): n is a, c, g, or t
  misc_feature (3830)..(3830): n is a, c, g, or t
  misc_feature (3834)..(3834): n is a, c, g, or t
  misc_feature (3837)..(3838): n is a, c, g, or t
  misc_feature (3841)..(3841): n is a, c, g, or t
  misc_feature (3843)..(3843): n is a, c, g, or t
  misc_feature (3855)..(3855): n is a, c, g, or t
  misc_feature (3857)..(3857): n is a, c, g, or t
  misc_feature (3860)..(3862): n is a, c, g, or t
  misc_feature (3866)..(3866): n is a, c, g, or t
  misc_feature (3873)..(3873): n is a, c, g, or t
  misc_feature (3877)..(3877): n is a, c, g, or t
  misc_feature (3879)..(3879): n is a, c, g, or t
  misc_feature (3883)..(3883): n is a, c, g, or t
  misc_feature (3886)..(3887): n is a, c, g, or t
  misc_feature (3890)..(3894): n is a, c, g, or t
  misc_feature (3897)..(3897): n is a, c, g, or t
  misc_feature (3900)..(3900): n is a, c, g, or t
  misc_feature (3902)..(3902): n is a, c, g, or t
  misc_feature (3906)..(3906): n is a, c, g, or t
  misc_feature (3911)..(3913): n is a, c, g, or t
  misc_feature (3921)..(3921): n is a, c, g, or t
  misc_feature (3923)..(3924): n is a, c, g, or t
  misc_feature (3928)..(3929): n is a, c, g, or t
  misc_feature (3931)..(3931): n is a, c, g, or t
  misc_feature (3933)..(3933): n is a, c, g, or t
  misc_feature (3936)..(3937): n is a, c, g, or t
  misc_feature (3940)..(3940): n is a, c, g, or t
  misc_feature (3942)..(3942): n is a, c, g, or t
  misc_feature (3945)..(3946): n is a, c, g, or t
  misc_feature (3948)..(3948): n is a, c, g, or t
  misc_feature (3954)..(3954): n is a, c, g, or t
  misc_feature (3956)..(3958): n is a, c, g, or t
  misc_feature (3960)..(3960): n is a, c, g, or t
  misc_feature (3962)..(3962): n is a, c, g, or t
  misc_feature (3964)..(3965): n is a, c, g, or t
  misc_feature (3968)..(3968): n is a, c, g, or t
  misc_feature (3971)..(3971): n is a, c, g, or t
  misc_feature (3999)..(3999): n is a, c, g, or t
nnnnnnnnnnnnnnnnannnnnnnnnnnnnnnnnnnnnnnnnnnnnnnnnnnntnnntnnntnnnnnnnnnnnnnnnnnnnnnnnnnnnnnnnnnnnnnnnnnnnnnnnnnnnnnnntntnnnnnnnnnnnnnnnnnnnnnnnnnntnnnnnnnnnnannnnnnnnnnnnnnnnnnnnnnnnnnnnnnnnnnnnannnnnnnnnnnntnnnnnnannnnnnnnnnnnnnnnnnnnnnnnnnnnnnnnnnnnnnnnnnnnnnnnnnnnnnnnnnnnnnnnnnnnnnnntnnnnnnnnnnnnnnnnnnnnnnnnnnnnnnnnnnnnnnnnnnnnnnnnnnnnnnnnnnnnnnnnnnnnnnnnnnnnnnnnnnnnnntnnnnnnnnnnnnnnnnnnnnnnnnnnnnnnnnnnnnnnnnnnnnnnnnnnnnnnnnnnnnnnnnnnnnnnnnnnnnnnnnnnntnnnnannnnnnnnnnnnnnnnnnnnnnnnnnnnnnnnnnnnnnnntnnnnnnnnnnnnnnnnnnnnnnnnnnnnnnnnnnnnnnnnnnntnnnnnnnnnnnnnnnnnnnnnnnnnantnnnnnnnnnnnnnnnnnnnnnnnnnnnnnnnnnnnnnnntnnnnnnnnnnnnnnnnnnnnnnnannnnnnnnnnnnnnnnnnnnnnannnnnnannnnnnnnnnnnnnnnnnnnnnnnnnntnnnnnnnnnnnnnnnnnnnnnnnnnnnnnnnnnnnnnnnnnnnnnnnnnnnnnnnnnnnnnnnnnnnnnnaaaannnnnannnnntnnntnnttnnnnnttnnnnntttnnntnngtgattcaagtaacgtttattaatcgcttgattattaattgcttgtataattgtatagcctacaatatgcctacatttcttatctattacaggttatttcttacttaataagacttgtattagacgttccttctcctcaattatcctttctaaatcagctatttttgcatccttatcaagttcatttgattttattccaggtatgggaatattatcaaagaatacacctacaggaacttccagaacctttgctattgcctcaatggtttttgtattcgttgttccattcctgacaatagcctgtatgctactatcttcttttcctatacgtgatgcaagttctcgtatagtgattttctttaactcacataattctcttattaacaagaaattagccatattatatctttgttataacttttattaacgtaattcttattcacttgtggtgaaaataattatacctttgctatgtaaagttaataataatgagtatatttatcacaaaggtatgacgaaaaaaaaattaaaaaggaatgatgacggcgagaaactaagaatgtaccttttgaatttgccggtaaaagaatcttctgaaatgtcccttaaattggcagaagcatgtaaagtgccattacatacctttcgtaattggcggggtagtcgttgtcgtattcccgaacttgccaaggataagatcgaggaagtaacaggcgtaaaaatcttccatagtgaaaaccaataaataaaagaaaaatgaaatcaaagaaattagaaatcgaaattccggaaggtaaaacggccgtctggagaaatggcatcttaactcttattgatgaaccggagaaagacgtaaaagaacgtattaagacgtttgaggacgcctgccgtgaaattggcattgatgcggaagcatggagccgggataaaatatccctcggtcttgaacctgacgttctggctttcctgaaactccgtatcattgtcaaggctttaaatgaaggctgggaacctcaatttatagaggatgaataccgttattatccttggtttattctttatacaggggaagaatacaataagttggacgaggaagaaaagtctcgtgtggtgtatcggtcgnncnacnncgcgnncgcgttnggcggtgtttcgtatgcgnncgcgnntnacgattcatcgnncacgnntgcgnncatcggcgttcggcttgccttcaaaacgtcagaactggcagcgtattgcggtcgacaattccttgatatttgggcggactttgtttttcttccggaaaagaaaagtgaataaataaccggggcggcttttgccgctccatataataaccgccggagtgtggagataaccccgaagggcgaaagcgggtgttattggtagttcgatgctatcctccggcacagctataaacaacaatgagcaaaatttacatagtaactaaaagggaatctggaaaatacgaagaagacggcgtttggttttctatccttgccgcatttgatacgagaaataaagcagaagaatatttaaagaaatatgtaaaaacggctcctaaagaagcttactacactttctatcgaatagaatctgttccgttgtttctttcttctcataaagtgaaaataaacagaccgaaacatacgacctatcctattggtgaattggtaaaattaaaaataagtggtgaaaaataattcaaatcaagaacagaaatgagcaaaaaaatctccataaaagtaactgaagcacaaccgcttccttgcccttattgcaatggtttttacggttatcagtatagtgatctgtttagaatgagttacacgagtgtgcataattctgacggtacatattccggtggggaatattccgacggagtttccttaaacaagagtaaaacagcttattgtgtgaattgtggtaccaaactaccttttaccctaatacgtgaaggtgaggaacaagtcgaataattaaaaataaatcagaaatgaaatcaacaattaccacccccgatgaattaaccacgctacgaatagaaggcagtagtggaacctataaaatattcagtagcttccgccccatggaatcccctgcgttcgtggatgcggtggaccggaaatataatctggcggagattaagaatctttccggcggaaaaggttatttcctggtacacttgaacagagagcagcaggaaactatacaggaggatttaagcgctatcctttgcgatagtgtgccatgtcttctgtaaactaagacgatcttaacgaaatgccatgaaagaagacagacgcctaagaaacctacgttatcagatgcggaagaaangttnncanttngatacaaanaaccngntnnccnttangcntnnanannannaangnnnnnttnncnannnaagnagantaancnaattcnnntttnnaatnnantanaacatnnnnnannantnaaanntaaaaatttnnnntacatcgnnnacgcnatnntnnnngttnncnntatnngncngattnnntntgncatttattatncggntanannnnnttntntttnnntnnnnttattcnntttnctgtatnnacctngnannnanntnnnnnnnnnannnnangaaganaacgaanantaagnaacnangtaactttanaangangataaagncanaagacannnacaaagnaannaacaangggcnggatataattnnacatnattatncnnaagcccnngattgtntcngaaccnnncgccatttnnaangccggccgtnanaggangacncntcggcnngnatcaanttanncngnanngaagnttnccancangtttataangtaangnanttngncgatannnnaannnnncaaancccnnncgatatnngcatgtntgagnnnggncnccggnttnacgangnnatncntaanctngnntccanntacnacntanncgatnaantcnancgtnacntaaacnanccggatnnncnnnangntccngcnnccnangatcagaaagangntannnaaantttcgancttncngatnatnncannnnngancantnacgnatacnnngcccccgngnnaccnngnanaannccnangcnntncactgntnnncngncnnatncanagggtatgtaaaaaatcgcgaggtaacnt

SEQ ID NO: 110 - DNA, 4000 bp, Escherichia coli
  misc_feature (590)..(590): n is a, c, g, or t
  misc_feature (3081)..(3082): n is a, c, g, or t
taagtgcctgattagcaagacttgcgacacccacatcaaataaggacaaatcaatatgctgcccctgccctgttttgttgcgatgttcaacagccgccagaatagcaacgcttgcattaaggcctgttagaatatctatcagggcaacaccggctttcactggcataccgccagcatctttgggctcacccgtaacagacatcagcccgctcatgccctgtatcatgaaatcatatccagcgcgcgaggcatcagggccatcctggccaaaaccagtgaccgaacaatagataagatggggatagtctttgctcaggcttgcgtaatcaaggccatattttgctagaccacctaccttgaaattttcaattagaatatcggcttcaccggcaagctgatgaatcaggcgcgcgccctcttcagaggtaaaatcaagagcgatagattttttatttctgtttacattagcgaaataggcagaaatgcccggcacatcgccatctggctcctgcacaaaaggaggcccccaactgcgggtttcatcccctgagccggggcgctcaatcttccaaatttcagcgcccatatcnccaagcgtctgggtggcccatgggccagccagaacacggctcatatcgagcactttcagatgggacagtgccccttgcgcaacactcatccggacagcgccccctaattagcctgtaaaggcctgaagacctgtctgtgcccggccaagaataagcgcatgcacatcatgagttccttcataggtgttcacagtttccaaattcaccatatgacgcatcacatgataatcttcagaaataccgttaccgccatgcatatcacgcgaaaggcgtgcaatatgcagcgctttgccgcagctgttacgcttcatcattgagataagttcgggcgcgcatcttcccgcttccatcatccgtgagacgtgcaagacagattgcagagcaagggtaatttctgtctgcatatcagctagttttagctggataagctggtttgctgctaacggacggttaaactgcttgcgctcaagcgtataggtgcgcgcggcatgccagcatgcttctgctgcgcccaatgcaccccagctaatgccaaagcgtgctttgttaagacagctgaacggacctttcaagccttcgacatgtggcagtaatgcatcctcagacacatcgacattatccatgctaatcgatccggtcatagaggcccgcaatgaaagctttcctttgatagggtcagccgataagcctttcatgcccttttccagaatgaagcctttaattttaccgtcatgtgcatctgactttgcccagatgataaacacatccgctatcggggcatttgaaatccacattttcgagccagaaatccggtacccatctgaggtcttctcagcacgtgtccgcatcgcacctgggtcagagcctgcatctgcttcggttaggccaaaacaaccaataaactcacctgttgccaagcgtggcaggaatttttgtttctgctcttcagtaccaaagctttcgataggatgcatgaccagcgatgactgaacagacagcatcgagcgatagcctgaatcaacccgttcaatttcacgcgcaacaagaccataggctgtgctattggcgccaacgccgccatattctggtgacactgttaccccgagcaagccaatttctcccatctcggtaaagatagctgggtctgtcttttcttcgcgatatgcttcgacaatccgtggctgcaatttatcagttgcataggcgcgcgctgtatcacgaatgagacgctcatcttcagagagctgatgctcaatttctaacgggtcatcccaggtaaaaacgggcttagaagaagatgtcgttgtattaaggctatccataataaaaaagagctcctgttgagaaagcgagtggatgtcggctattaccgaagaaaaaggcacttaatgaataaagcataatctataccgcccacattaacatacaagctagtaggcgaaaataggctagtttttttacctgttggttttttaccggctggttttttcctgttccagagagcgtgttctttgccacagatagaggccagagccaacaataagcgcgcttccgctgagggttgccgcggacggtacttcattaaacagcaacaagccccagatcatcgcaaacacaagggtgagataattaaccggcgcaaggtctgttgccgatactttgttgagggccagaataaggctgtaatgaccaatactcccgaacaacgacattgatagcatcaataagatggttatcccgctatcgggcatcacccacacaaaaggcagaataaggctactagcaatcgcgccgcaccctgctgtgtagaacaaggttgtacgggcatcttcgcttggccccagaaagcgggtgagaatagaatagctcgcatacaggcttgccgcgcataatggcagaagactggctaatgaaaaacttgatgattggggctgaataattatcattgcgccaacaaacccaacaagcaggcagacaattcgcctcatcccgattgtctcgcccagaaacagaacagctagtatcgttatcaccagtggcgccacctgaaagatggctgtcgcaagaccctgatcaagataaaacaaactcgtaaagaaacagatagttgctgaaaaaagagctgcagaccttgcgagctgaaggccaagataacgggtatgcataacccgttttaagtgcggcgcaaacacaatcagcaagagcaaaaactgtccggcatagcgggcccagacaacctgcaagacaggctgtgtctgggttagaattttggcaacagtatccatcgctggaaaacacatgactgtcaccaacataagcagaaagccaatttgatgctgacttaatgaggataaaagacgcgaaaccatagccggaaattaccccctacacacaaccgcgttacagtagggttcttttcattattctcctacttctttttgtctgcgtttaatcaccctctggtcttacgcctctcatgtgatatattagnngtaggtagcgcatcgttgaacggtttgtgaggggtagcgtcactattctgcaaaccgagcaacgtaaggtctaaaactcttcactttttggcagggtcattcgatgtccaagacaaaaaaaacacctgcagacatagccagcgccaaacgggcatcctggcagaaaaaggcgtctgaggagctgcgtggtgcgccgctagaaagtctgacaaaaacaactgcagaaggcatcgatattgcgccgctttataccagcgaagatgcagagggcttaccgcatatgggctcccttcccggcgaggctccttttttgcggggtccgcgggcaagcatgtatacacaccggccttggaccatccgtcaatatgctggtttttcaacggccgaagaaaccaataactttttcaggtccgccctaaatgccggccagaagggcctgtctgttgcgttcgatcttgcgacacatcgtggctatgattctgatcatgaacgggtacgcggcgatgttggcaaagccggcgttgcaatagatacagtcgaagatatgaaacgtctatttgacggcatccctctggatagcatgtctgtttccatgacaatgaacggtgctgttctgcctgtattagcaagctttattgttgctgccgaagagcagggtgtgcctgctgaaaagatatctggcaccatccagaatgacattctcaaagaatttatggtgcgaaacacctatatttatccgcccagcccttcaatgcggattgttgctgatattatcgagcatacggcgagcaatatgccgaaattcaattccatctcgatttctggctatcatatgcaggaagcaggggcaaaccttgtacaagaactcgcttttacaattgctgatgggcttgaatatgtaaaagtagcgactgacag

SEQ ID NO: 111 - DNA, 4000 bp, Escherichia coli
  misc_feature (54)..(54): n is a, c, g, or t
  misc_feature (56)..(56): n is a, c, g, or t
  misc_feature (80)..(80): n is a, c, g, or t
  misc_feature (159)..(159): n is a, c, g, or t
  misc_feature (218)..(218): n is a, c, g, or t
  misc_feature (232)..(234): n is a, c, g, or t
  misc_feature (236)..(236): n is a, c, g, or t
  misc_feature (240)..(240): n is a, c, g, or t
  misc_feature (242)..(243): n is a, c, g, or t
  misc_feature (245)..(245): n is a, c, g, or t
  misc_feature (379)..(379): n is a, c, g, or t
  misc_feature (437)..(437): n is a, c, g, or t
  misc_feature (464)..(464): n is a, c, g, or t
  misc_feature (493)..(493): n is a, c, g, or t
  misc_feature (704)..(704): n is a, c, g, or t
  misc_feature (725)..(725): n is a, c, g, or t
  misc_feature (776)..(776): n is a, c, g, or t
  misc_feature (884)..(884): n is a, c, g, or t
  misc_feature (890)..(890): n is a, c, g, or t
  misc_feature (896)..(896): n is a, c, g, or t
  misc_feature (964)..(964): n is a, c, g, or t
  misc_feature (975)..(975): n is a, c, g, or t
  misc_feature (987)..(987): n is a, c, g, or t
  misc_feature (1520)..(1520): n is a, c, g, or t
  misc_feature (1525)..(1526): n is a, c, g, or t
  misc_feature (1582)..(1582): n is a, c, g, or t
  misc_feature (1986)..(1986): n is a, c, g, or t
  misc_feature (1992)..(1992): n is a, c, g, or t
  misc_feature (2001)..(2001): n is a, c, g, or t
  misc_feature (2003)..(2004): n is a, c, g, or t
  misc_feature (2007)..(2007): n is a, c, g, or t
  misc_feature (2009)..(2009): n is a, c, g, or t
  misc_feature (2027)..(2028): n is a, c, g, or t
  misc_feature (2033)..(2033): n is a, c, g, or t
  misc_feature (2323)..(2323): n is a, c, g, or t
  misc_feature (2373)..(2373): n is a, c, g, or t
  misc_feature (2404)..(2404): n is a, c, g, or t
  misc_feature (2529)..(2529): n is a, c, g, or t
  misc_feature (2591)..(2591): n is a, c, g, or t
  misc_feature (2630)..(2630): n is a, c, g, or t
  misc_feature (2656)..(2657): n is a, c, g, or t
  misc_feature (2672)..(2672): n is a, c, g, or t
  misc_feature (2681)..(2681): n is a, c, g, or t
  misc_feature (2695)..(2695): n is a, c, g, or t
  misc_feature (2703)..(2703): n is a, c, g, or t
  misc_feature (2705)..(2708): n is a, c, g, or t
  misc_feature (2710)..(2710): n is a, c, g, or t
  misc_feature (2712)..(2712): n is a, c, g, or t
  misc_feature (2714)..(2719): n is a, c, g, or t
  misc_feature (2721)..(2721): n is a, c, g, or t
  misc_feature (2723)..(2727): n is a, c, g, or t
  misc_feature (2729)..(2734): n is a, c, g, or t
  misc_feature (2736)..(2736): n is a, c, g, or t
  misc_feature (2738)..(2739): n is a, c, g, or t
  misc_feature (2741)..(2741): n is a, c, g, or t
  misc_feature (2744)..(2744): n is a, c, g, or t
  misc_feature (2746)..(2746): n is a, c, g, or t
  misc_feature (2748)..(2750): n is a, c, g, or t
  misc_feature (2752)..(2755): n is a, c, g, or t
  misc_feature (2758)..(2758): n is a, c, g, or t
  misc_feature (2762)..(2762): n is a, c, g, or t
  misc_feature (2765)..(2768): n is a, c, g, or t
  misc_feature (2770)..(2775): n is a, c, g, or t
  misc_feature (2777)..(2777): n is a, c, g, or t
  misc_feature (2779)..(2779): n is a, c, g, or t
  misc_feature (2785)..(2786): n is a, c, g, or t
  misc_feature (2789)..(2790): n is a, c, g, or t
  misc_feature (2792)..(2792): n is a, c, g, or t
  misc_feature (2795)..(2796): n is a, c, g, or t
  misc_feature (2798)..(2799): n is a, c, g, or t
  misc_feature (2802)..(2802): n is a, c, g, or t
  misc_feature (2804)..(2804): n is a, c, g, or t
  misc_feature (2806)..(2806): n is a, c, g, or t
  misc_feature (2811)..(2813): n is a, c, g, or t
  misc_feature (2815)..(2815): n is a, c, g, or t
  misc_feature (2817)..(2818): n is a, c, g, or t
  misc_feature (2820)..(2825): n is a, c, g, or t
  misc_feature (2827)..(2827): n is a, c, g, or t
  misc_feature (2829)..(2829): n is a, c, g, or t
  misc_feature (2831)..(2831): n is a, c, g, or t
  misc_feature (2835)..(2841): n is a, c, g, or t
  misc_feature (2845)..(2845): n is a, c, g, or t
  misc_feature (2847)..(2848): n is a, c, g, or t
  misc_feature (2850)..(2851): n is a, c, g, or t
  misc_feature (2855)..(2858): n is a, c, g, or t
  misc_feature (2861)..(2861): n is a, c, g, or t
  misc_feature (2863)..(2863): n is a, c, g, or t
  misc_feature (2866)..(2869): n is a, c, g, or t
  misc_feature (2872)..(2872): n is a, c, g, or t
  misc_feature (2874)..(2876): n is a, c, g, or t
  misc_feature (2878)..(2880): n is a, c, g, or t
  misc_feature (2883)..(2884): n is a, c, g, or t
  misc_feature (2886)..(2887): n is a, c, g, or t
  misc_feature (2891)..(2891): n is a, c, g, or t
  misc_feature (2893)..(2896): n is a, c, g, or t
  misc_feature (2898)..(2898): n is a, c, g, or t
  misc_feature (2903)..(2904): n is a, c, g, or t
  misc_feature (2906)..(2907): n is a, c, g, or t
  misc_feature (2910)..(2910): n is a, c, g, or t
  misc_feature (2915)..(2917): n is a, c, g, or t
  misc_feature (2919)..(2919): n is a, c, g, or t
  misc_feature (2921)..(2922): n is a, c, g, or t
  misc_feature (2925)..(2925): n is a, c, g, or t
  misc_feature (2929)..(2931): n is a, c, g, or t
  misc_feature (2933)..(2934): n is a, c, g, or t
  misc_feature (2936)..(2937): n is a, c, g, or t
  misc_feature (2939)..(2944): n is a, c, g, or t
  misc_feature (2947)..(2951): n is a, c, g, or t
  misc_feature (2956)..(2958): n is a, c, g, or t
  misc_feature (2960)..(2961): n is a, c, g, or t
  misc_feature (2964)..(2964): n is a, c, g, or t
  misc_feature (2966)..(2968): n is a, c, g, or t
  misc_feature (2971)..(2972): n is a, c, g, or t
  misc_feature (2974)..(2974): n is a, c, g, or t
  misc_feature (2978)..(2978): n is a, c, g, or t
  misc_feature (2980)..(2981): n is a, c, g, or t
  misc_feature (2984)..(2985): n is a, c, g, or t
  misc_feature (2989)..(2989): n is a, c, g, or t
  misc_feature (2991)..(2991): n is a, c, g, or t
  misc_feature (2994)..(2994): n is a, c, g, or t
  misc_feature (2996)..(3006): n is a, c, g, or t
  misc_feature (3009)..(3011): n is a, c, g, or t
  misc_feature (3013)..(3014): n is a, c, g, or t
  misc_feature (3016)..(3018): n is a, c, g, or t
  misc_feature (3020)..(3025): n is a, c, g, or t
  misc_feature (3027)..(3027): n is a, c, g, or t
  misc_feature (3029)..(3033): n is a, c, g, or t
  misc_feature (3036)..(3038): n is a, c, g, or t
  misc_feature (3041)..(3042): n is a, c, g, or t
  misc_feature (3044)..(3046): n is a, c, g, or t
  misc_feature (3048)..(3048): n is a, c, g, or t
  misc_feature (3051)..(3051): n is a, c, g, or t
  misc_feature (3053)..(3053): n is a, c, g, or t
  misc_feature (3055)..(3059): n is a, c, g, or t
  misc_feature (3062)..(3065): n is a, c, g, or t
  misc_feature (3067)..(3069): n is a, c, g, or t
  misc_feature (3071)..(3073): n is a, c, g, or t
  misc_feature (3076)..(3078): n is a, c, g, or t
  misc_feature (3080)..(3088): n is a, c, g, or t
  misc_feature (3092)..(3093): n is a, c, g, or t
  misc_feature (3095)..(3098): n is a, c, g, or t
  misc_feature (3100)..(3100): n is a, c, g, or t
  misc_feature (3103)..(3105): n is a, c, g, or t
  misc_feature (3110)..(3111): n is a, c, g, or t
  misc_feature (3113)..(3113): n is a, c, g, or t
  misc_feature (3117)..(3118): n is a, c, g, or t
  misc_feature (3120)..(3120): n is a, c, g, or t
  misc_feature (3122)..(3122): n is a, c, g, or t
  misc_feature (3126)..(3127): n is a, c, g, or t
  misc_feature (3129)..(3129): n is a, c, g, or t
  misc_feature (3131)..(3131): n is a, c, g, or t
  misc_feature (3133)..(3134): n is a, c, g, or t
  misc_feature (3136)..(3137): n is a, c, g, or t
  misc_feature (3142)..(3143): n is a, c, g, or t
  misc_feature (3146)..(3149): n is a, c, g, or t
  misc_feature (3151)..(3151): n is a, c, g, or t
  misc_feature (3155)..(3156): n is a, c, g, or t
  misc_feature (3159)..(3159): n is a, c, g, or t
  misc_feature (3162)..(3163): n is a, c, g, or t
  misc_feature (3167)..(3168): n is a, c, g, or t
  misc_feature (3172)..(3173): n is a, c, g, or t
  misc_feature (3176)..(3178): n is a, c, g, or t
  misc_feature (3180)..(3181): n is a, c, g, or t
  misc_feature (3185)..(3185): n is a, c, g, or t
  misc_feature (3189)..(3190): n is a, c, g, or t
  misc_feature (3193)..(3197): n is a, c, g, or t
  misc_feature (3200)..(3201): n is a, c, g, or t
  misc_feature (3204)..(3208): n is a, c, g, or t
  misc_feature (3210)..(3210): n is a, c, g, or t
  misc_feature (3212)..(3212): n is a, c, g, or t
  misc_feature (3215)..(3218): n is a, c, g, or t
  misc_feature (3220)..(3224): n is a, c, g, or t
  misc_feature (3226)..(3227): n is a, c, g, or t
  misc_feature (3229)..(3230): n is a, c, g, or t
  misc_feature (3232)..(3232): n is a, c, g, or t
  misc_feature (3235)..(3236): n is a, c, g, or t
  misc_feature (3238)..(3238): n is a, c, g, or t
  misc_feature (3242)..(3244): n is a, c, g, or t
  misc_feature (3246)..(3246): n is a, c, g, or t
  misc_feature (3248)..(3248): n is a, c, g, or t
  misc_feature (3250)..(3254): n is a, c, g, or t
  misc_feature (3256)..(3256): n is a, c, g, or t
  misc_feature (3258)..(3261): n is a, c, g, or t
  misc_feature (3263)..(3263): n is a, c, g, or t
  misc_feature (3265)..(3267): n is a, c, g, or t
  misc_feature (3269)..(3269): n is a, c, g, or t
  misc_feature (3271)..(3275): n is a, c, g, or t
  misc_feature (3278)..(3279): n is a, c, g, or t
  misc_feature (3281)..(3283): n is a, c, g, or t
  misc_feature (3286)..(3286): n is a, c, g, or t
  misc_feature (3290)..(3290): n is a, c, g, or t
  misc_feature (3294)..(3295): n is a, c, g, or t
  misc_feature (3302)..(3305): n is a, c, g, or t
  misc_feature (3309)..(3312): n is a, c, g, or t
  misc_feature (3317)..(3317): n is a, c, g, or t
  misc_feature (3320)..(3324): n is a, c, g, or t
  misc_feature (3326)..(3327): n is a, c, g, or t
  misc_feature (3329)..(3330): n is a, c, g, or t
  misc_feature (3332)..(3332): n is a, c, g, or t
  misc_feature (3336)..(3337): n is a, c, g, or t
  misc_feature (3339)..(3339): n is a, c, g, or t
  misc_feature (3341)..(3342): n is a, c, g, or t
  misc_feature (3344)..(3344): n is a, c, g, or t
  misc_feature (3346)..(3347): n is a, c, g, or t
  misc_feature (3349)..(3349): n is a, c, g, or t
  misc_feature (3352)..(3353): n is a, c, g, or t
  misc_feature (3358)..(3359): n is a, c, g, or t
  misc_feature (3362)..(3362): n is a, c, g, or t
  misc_feature (3365)..(3365): n is a, c, g, or t
  misc_feature (3367)..(3368): n is a, c, g, or t
  misc_feature (3370)..(3374): n is a, c, g, or t
  misc_feature (3377)..(3377): n is a, c, g, or t
  misc_feature (3379)..(3379): n is a, c, g, or t
  misc_feature (3384)..(3385): n is a, c, g, or t
  misc_feature (3388)..(3388): n is a, c, g, or t
  misc_feature (3390)..(3390): n is a, c, g, or t
  misc_feature (3397)..(3398): n is a, c, g, or t
  misc_feature (3401)..(3408): n is a, c, g, or t
  misc_feature (3411)..(3411): n is a, c, g, or t
  misc_feature (3413)..(3413): n is a, c, g, or t
  misc_feature (3418)..(3418): n is a, c, g, or t
  misc_feature (3423)..(3425): n is a, c, g, or t
  misc_feature (3430)..(3430): n is a, c, g, or t
  misc_feature (3434)..(3437): n is a, c, g, or t
  misc_feature (3447)..(3453): n is a, c, g, or t
  misc_feature (3456)..(3456): n is a, c, g, or t
  misc_feature (3458)..(3460): n is a, c, g, or t
  misc_feature (3463)..(3463): n is a, c, g, or t
  misc_feature (3466)..(3466): n is a, c, g, or t
  misc_feature (3468)..(3469): n is a, c, g, or t
  misc_feature (3471)..(3473): n is a, c, g, or t
  misc_feature (3478)..(3479): n is a, c, g, or t
  misc_feature (3481)..(3483): n is a, c, g, or t
  misc_feature (3485)..(3486): n is a, c, g, or t
  misc_feature (3492)..(3492): n is a, c, g, or t
  misc_feature (3494)..(3494): n is a, c, g, or t
  misc_feature (3496)..(3496): n is a, c, g, or t
  misc_feature (3498)..(3498): n is a, c, g, or t
  misc_feature (3500)..(3501): n is a, c, g, or t
  misc_feature (3503)..(3505): n is a, c, g, or t
  misc_feature (3508)..(3510): n is a, c, g, or t
  misc_feature (3512)..(3514): n is a, c, g, or t
  misc_feature (3518)..(3520): n is a, c, g, or t
  misc_feature (3522)..(3522): n is a, c, g, or t
  misc_feature (3526)..(3532): n is a, c, g, or t
  misc_feature (3534)..(3535): n is a, c, g, or t
  misc_feature (3539)..(3539): n is a, c, g, or t
  misc_feature (3542)..(3544): n is a, c, g, or t
  misc_feature (3546)..(3549): n is a, c, g, or t
  misc_feature (3552)..(3557): n is a, c, g, or t
  misc_feature (3559)..(3559): n is a, c, g, or t
  misc_feature (3564)..(3564): n is a, c, g, or t
  misc_feature (3566)..(3566): n is a, c, g, or t
  misc_feature (3569)..(3569): n is a, c, g, or t
  misc_feature (3572)..(3573): n is a, c, g, or t
  misc_feature (3575)..(3578): n is a, c, g, or t
  misc_feature (3580)..(3582): n is a, c, g, or t
  misc_feature (3584)..(3585): n is a, c, g, or t
  misc_feature (3587)..(3588): n is a, c, g, or t
  misc_feature (3590)..(3591): n is a, c, g, or t
  misc_feature (3604)..(3604): n is a, c, g, or t
  misc_feature (3606)..(3607): n is a, c, g, or t
  misc_feature (3612)..(3613): n is a, c, g, or t
  misc_feature (3615)..(3615): n is a, c, g, or t
  misc_feature (3618)..(3618): n is a, c, g, or t
  misc_feature (3620)..(3620): n is a, c, g, or t
  misc_feature (3625)..(3625): n is a, c, g, or t
  misc_feature (3628)..(3628): n is a, c, g, or t
  misc_feature (3631)..(3631): n is a, c, g, or t
  misc_feature (3636)..(3636): n is a, c, g, or t
  misc_feature (3638)..(3641): n is a, c, g, or t
  misc_feature (3644)..(3646): n is a, c, g, or t
  misc_feature (3648)..(3651): n is a, c, g, or t
  misc_feature (3657)..(3662): n is a, c, g, or t
  misc_feature (3665)..(3666): n is a, c, g, or t
  misc_feature (3669)..(3670): n is a, c, g, or t
  misc_feature (3673)..(3675): n is a, c, g, or t
  misc_feature (3683)..(3684): n is a, c, g, or t
  misc_feature (3688)..(3688): n is a, c, g, or t
  misc_feature (3691)..(3692): n is a, c, g, or t
  misc_feature (3694)..(3695): n is a, c, g, or t
  misc_feature (3701)..(3702): n is a, c, g, or t
  misc_feature (3707)..(3707): n is a, c, g, or t
  misc_feature (3710)..(3711): n is a, c, g, or t
  misc_feature (3713)..(3714): n is a, c, g, or t
  misc_feature (3716)..(3716): n is a, c, g, or t
gcctccaggtggtaggctgtctgcgacgatacgcggatggtgattttctttcgntnctcgctcatgcctcgcctccgccngtaggccggaggtagccattttcaacggccatggcccggattttgcggatggtggcgtcgctgacccgcaggccggtgncgctcctggtagccaggctgtcaataaagccgttgatgactttctcaagctcatcctgngagatgacgatagnnngnttgngnncntccagctcatccaggtaggcacagagctgagcgtcggtcatcttccgcacccggattgcccggtcgtgctgctcctgttcaaagccggtcctccggcagcttcgcttcttcaatagttctccctccagttattntccgtctacccgtaccatgccctccgggtactcctgaatgagagggccgccccacagntctttcagactgtttttcataaagacngggaccccggcagactgagcaacttccgngatggcctctacccattcccgcttcggctgctttcgcttgcttcccggcccggtcatggctccgatgatgacccaaagaggctcgcccaaccgccggaaaccggcgcagtcatccgcgctgaacggctccagcagcggctcaatgctcaagaacgtgttgacgcaggaagctccaaagtattccgtttcggggctggtgatcgtggtcccntaccagaagttccgctccatnggaagcttcccggcgtggcccatgtcaagatacctctgcgggttcttggtnaggaacaggtaagtatgctgcggcgctcgcttgcaggcggcgaagacatcctcaatccagatgtccggcacccactccccgaacaggtctcccatgctggagacgaanatccgngcaggngtcttccgcttctcaggatagtccatggtgtaggcgtgataggtgggggcaaagcccttggggtacgnggtagagcgcncaggctccccgntttcgtcgcagagcttggtaggctgctccacgtagtagcacccggtccccttgggtagtacctccagtggctcaatgatgggccgctcgcaggggtgcgggccaaacctggacaccatgcgccgggcgtagcagtattcgcacccgtgcttgcaccccgttacggggttccatgtgtggctgcaccactcaatgtcggttttgtgaatattcataggtcagtctccctcgcgcttgggggcggtggcccccatgtcaaataagctgcattggttctccatcatcttccggtcggcctcttcctgctttatcttccgcaggcagcagggaccgtacccatcccgcaagccctgggaggatgtcagcagacctccacaccgcttgcaccggcgggccgggatggtgaacacttcatcgtgcataggctacactccaaacgcgattagaatagacagggccagcaggcccgcagatgtaacctttgcgccgttgctccggtcattcatggtcttgcccccaaaggtgtagcaaaanccagnnaatgtaatcaggatgaagagggtccacgtaaacagcagcatcgtcattcacccagnagctcgcaaaggtgctccagcttggcaatctccatgtcggtgttgtcaccgaagatgacgtggagctggttcagcatgatttccacatcggccctctcttcggagatcgccgccaggatttccgcctcatcgccctgctcatggtccttgaagcgcagatacttgagtagggccttttgcagctcgctcatctcttccaccgccatgaggatttgagcgctctccccgaactgctccacggcctgctcatagagggccatttccgcttgctccggggtctcatccactccaggctgcggaccgtcggcgggccggatttctgccgctctcttcttgtcctcggcgtcaaggatagatgccaagatgtcagatttcagagttaaagccgggcgcacacccctgcngccgtngtacgcgtngnngtngntgaggctcccgtccgagnncacgnagcgcacgaaagaggtcccggaactcttcggggtcccgtccggcgtgatgagccagcgccaatgctccggcgcggggtgcagatcgcgggtctgccggtactcatcggcggtgagcatcgttaccttgtccagacagtttccgtagtcccggaggccgtcatcggcggtcaggtcgcggtaggtggggacaatggcgtctttcaggccggggcattcagcgatgaggttatccaggaactcgccgttgagccgcttccgcaggctcgccttgttccagtcgttgcagtcnttctcatcaaagggggcctggaagacgtcttcggtggcctcgcagaagtngagatcggagcagcccggcgtcggcgccggngtggtccgcagcacaatccagtccagaccggccacgtggaacacgtctccgtacttgaaagtcctcttttgctcttgcatggtaaattcctcctgatttttatttccccggcttctggccgtggnttatctgtggtggcttgacctgtccgcaccgggtcgggtggttcaagcaggggttcttgcanttcttatcccggtagccgcaatcggcgcagcagatgttnccgtgccgccggtcgcagttgaagannttgcatcggcgtggngctgtcttnctcatggggcctcncctccttngnnnntncncnnnnnncncnnnnngnnnnnngncnngnttngngnnncnnnntcncccngtnnnntnnnnnngntnaaaccnngcnnangtnnanngcncngncacgnnntntnnannnnnncnancncgtnnnnnnntctncnnanncatnnnnccngnggnnnnttncnnngnnngcnntnngccntnnnntntgccnntnncancagtnnnangnnatngcannncnngnntnnnnnngtnnnnntttcnnncnncgncnnnccnncnaaantnnatnncgcngnccncnnnnnnnnnnncgnnngnncnnngnnnnnntncnnnnnggnnnatnnannncngcncntnnnnntcnnnntnnncnnngcnnngnnnnnnnnntgcnntnnnncnggnnngcgcnncngcgnngncntctnnangntnnanngcccnntcnnnncncacnncgncgnnccannaaanncgnnnannctgncggnnggnnnnnagnnctnnnnncncngtnnnngnnnnncnntnntnctnnanccgnnncngnannnnntngnnnncncnnngncnnnnnagnncnnngcnggcntccnngcccgcnnnntggnnnntcgcncannnnngnntnncnaccnntncnncngnncnacnnggatnnggngananngnnnnnacngncgatnnggngngggtagnngtnnnnnnnnccntnaggancggannntccgncgcnnnngcaggctcannnnnnnccncnnntcnggncnncnnnggcgnnannngnncgctcncnancncnngnnngcnnngnnngccnnnancaannnnnnncnnccgntcnnncnnnngtnnnnnncnctccntncanagnntnnnncnnngnntnngnnggcttcctctacngnnttaanncnacngnccctnagnttncgcangnnnntcnnnannnncccccnnnnnngcnnccnncgnnnccggcccnnttcnaanncnnagcccnncagcnccnngnntncctccgggaatgacatggaccactctccatcctcattctgagactggaccatgatctgaaagaacgtccgcttctcatcgtatggcccaggggtcttgcctgggaagaactctgcccacaggtgggcggtggtctccgcaagctccacccccagggcctccgtgtagccgaaatagcttgtcgggtcctctttgaactctgccaggaagtctccctccaggtcatccgggggcggctgccagccctccatctcttccactgagcggagatggtaggtgctgggc

SEQ ID NO: 112 - DNA, 4000 bp, Escherichia coli
  misc_feature (897)..(897): n is a, c, g, or t
  misc_feature (1957)..(1958): n is a, c, g, or t
  misc_feature (1966)..(1967): n is a, c, g, or t
  misc_feature (1972)..(1973): n is a, c, g, or t
  misc_feature (1975)..(1976): n is a, c, g, or t
  misc_feature (1978)..(1978): n is a, c, g, or t
  misc_feature (1985)..(1985): n is a, c, g, or t
  misc_feature (1987)..(1987): n is a, c, g, or t
  misc_feature (1990)..(1990): n is a, c, g, or t
  misc_feature (1994)..(1994): n is a, c, g, or t
  misc_feature (1996)..(1997): n is a, c, g, or t
  misc_feature (1999)..(2000): n is a, c, g, or t
  misc_feature (2008)..(2009): n is a, c, g, or t
  misc_feature (2015)..(2015): n is a, c, g, or t
  misc_feature (2019)..(2019): n is a, c, g, or t
  misc_feature (3405)..(3405): n is a, c, g, or t
  misc_feature (3459)..(3459): n is a, c, g, or t
ttcgatggaatcattcaggacggaatattgcagcatgtcggaactgcaatggttgtaaaagaatcggaagcaatgattatcaacgttggtgtcggacgagcctggttcaatcacacttggacgctgaatgacgctctgttaccgttagtagttccacagtccgagattctgctgaaccgatatgatgcagttgtgcttgaagtggattcgagagaggccgtcagagcaaatgacatcaaaatcattaaaggaaccccagcatcgaatccaacgaaacctacgatggtgaagacaaatgatcgctggcaatatccgctggcgtatatttatgtcggcgccggagttacttctattcgacaggcaaacatcacgaactgcgttggaacttcagagtgtccattcgtaacggctccattggacaaggtcgaaatcgatgatttgattgctcaatggcaggaccagtggaaagagttctacgaaaagcagactactgatatggaagaaacaaataagttttggaaagagcagtggtctacctggtttctggcacagactgaggagattcagtctgcatatttgacatgggaagctcagtggaacctttggtactcggagcatacagcagatatggaagccacaagtacctattggaaagaaaaatgggaggcgtggttcaacgaatacacaagcatcaatactgcggaaatggctgactggaaacagaagtcagaaacagaatttcgagaatggtttgatcagttacaggcactgttagatggcaatacggcggcaagccttgctaagaagctgctggaattgcaggagcaggtagatattcttaaccagttcagttccaaccttgaaaacgaatacacggtatatcagaagctttatganaatggataccgtacttacggagacgtgctcgattcttcggacgcacccattactgacagcaatttggatacggtcattggacgtacatattccagtgatcttctccgtgacagcaatggcgatgttatcgaaggtcgggctatttttgtcatcaaataaaggaggattcattaaatgaaaatcacagactacgaaaaggtccaggcgttagcagcaagtaatattttcctgcttgacggacctaacgggacaaagaccattgcggcagatgctttagcaaaggcgttaatcggtcttttaagttccaaagattttatcggaggagtaaatctttccgaactcacccagatcaacgagctggtatccggtaacaaattactcgtcgggactacggacggaaacaaggctattgcagctgaagacgcactctttgctatgcttgatggctttgctccggtggagcttcgccgggtactcttcagaggcaagaatcttggtacagcgctgaccgcagtacagaaagctgctattaaggacggttcctttaaaggaatgttccttggcgactattggagtatcggaggtcgtatttggcgtatcgttgatatggattactggtacaactgcggtgatactgcatttaccagccatcatctcgttatcatgccggatgaggcgctttacaatgcgcagatgaatactaccaatgttacgaccggtggatatgtgggctctgcgatgtacaagagtaacttggcaaacgccaaaacaatcgtaaatgcggctttccaggggtctgttcttactcacagagaatacctgtgcaatgcggttgcaaatggaagaccgtcaggtggagcatggttcgattccagcattgagctcccgaacgaacctatgatgtatggccatcctcatttcagtccaacttctgatggttcaacagttccgagtatctacacaatcagcaagactcagctggcgctgttcatggtatgtccgagattcatcgtaaacagatcttacaaccagtggttaagagacgtcgtttcttcggctnnctttgccnntgtgnncnncnatggcantncgnactncnncnncgcttcgnnctcttntggngttcgtccggtcttcccggttggttaattaaaatcgcggggccttgtgccccgtttatatttttgaaaggagcttctaatcatggaagagaaaatctataaaattattctcggtgatggaactgagatttccaatcttaagctgaacggaaacaatttcatttctacagaaaaaatcgaggaatctgtatttgcagataactgctctccggttactatcagcgacggaacaaccgagactgttcatccgaacatggagctggttcagatcgttgagcaggttcctggcgaatactggtttgtccttagagatatttctgaggaggagtttgccagaaccaaaatgcagtctgacatcgcctacattgcgatgatgtccaatgtagagctttaagaaggaggatcaccatggaacatagcaagaattacagtaaagtaaagctttggtacagcatgaaaatgtggaatgagaccagagttcgtaatgcggtgaagatgggctggatcaccaaagaggagttcgctgagatcaccggtaaagattacgaatgagcgttctgttaggcgacagaaaagagtcaaaattcgaagcgattacgtactcgatcgagttgcatgatatgctgatactccttatgcagaggggatttggtgttaaggatgtggacggctttgttcggaagaagtatgcgtatggagaaatttcggaagaaaactttgctaagtacagggaactgatgcggagtttcaaatcgaaagtaaaccagtgtgcttccctgataacgagcaatgttagagcggcaaacaccatttacccacggacaatgcacgagtacgagaccaggagagattaccagaatgcggccattgtaaattgcgagcagctcatcaacgagttgcagcgggttgttgaaatattcgatgtagatctgaatgtgtacaaccggtatgttaaagctatcgaccgagaaatcggattgataaaaaggtggcgtcaaagagacatggcgattaagtcgcggttagaaaaagggtaacatctaaaaaattgcgtcgtttcttcggctaactttgccaatgtgaacaacaatggcaatacgaactacaacaacgcttcgaactctaatggagttcgtccggattcttcgattaaccaacgaagaaggagatgctatccgttccgcaaggataaataataaagcctaatacaatttactacggtaagtattgttataacggtgaataggttatgaactacgaggagattgtctgtgacgccaataacttgtatagggcttataaggtctctgtgaaaagcagcaagtggaaagaatcgacgcaaaaattcatgatgaatttcctgcggtatatatttgaaatccaagangatctaataaatcggacacttcaaaatggaccgacacaggaattcgagctgcangaaagaggccgaataagacctattacaagcattcaaatccgcgatcgcattgtccgacattctctgtgcgatgaggttttacttccagaagttagaaaacatatcatttatgataactgcgcatctatcaaggggcgcggaatttcacaacagagaaaacgattcgaaatccatctccacaaatactaccaattatacggaaatgacggttatattctattcggtgacttttcaaagttctatgacaatattatccatgagattgctaaacgagaattgttgaagctgttcaatgacgatgagtttattgactggcttttaacgttgatatttaaaggtttccagatcgatgtttcgtatatgtctgacgaggaatacgagacctgtatgatcgatactttcaataaactggagtatcggaatattccaaaagagaagctcactggcgaaaagtggatggagaagtccgtcaatattggggatcaactttcacaagtcattggaatttattatccatatccgattgacaattacgtcaagt

SEQ ID NO: 113 - DNA, 4000 bp, Escherichia coli
  misc_feature (118)..(118): n is a, c, g, or t
  misc_feature (223)..(223): n is a, c, g, or t
  misc_feature (226)..(226): n is a, c, g, or t
  misc_feature (541)..(541): n is a, c, g, or t
  misc_feature (1991)..(1991): n is a, c, g, or t
  misc_feature (2123)..(2125): n is a, c, g, or t
  misc_feature (2127)..(2128): n is a, c, g, or t
  misc_feature (2130)..(2130): n is a, c, g, or t
  misc_feature (2132)..(2133): n is a, c, g, or t
  misc_feature (2135)..(2135): n is a, c, g, or t
  misc_feature (2137)..(2137): n is a, c, g, or t
  misc_feature (2141)..(2142): n is a, c, g, or t
  misc_feature (2144)..(2144): n is a, c, g, or t
  misc_feature (2148)..(2150): n is a, c, g, or t
  misc_feature (2153)..(2155): n is a, c, g, or t
  misc_feature (2157)..(2157): n is a, c, g, or t
  misc_feature (2160)..(2165): n is a, c, g, or t
  misc_feature (2167)..(2168): n is a, c, g, or t
  misc_feature (2170)..(2176): n is a, c, g, or t
  misc_feature (2182)..(2187): n is a, c, g, or t
  misc_feature (2189)..(2189): n is a, c, g, or t
  misc_feature (2193)..(2198): n is a, c, g, or t
  misc_feature (2200)..(2203): n is a, c, g, or t
  misc_feature (2205)..(2205): n is a, c, g, or t
  misc_feature (2207)..(2215): n is a, c, g, or t
  misc_feature (2218)..(2229): n is a, c, g, or t
  misc_feature (2232)..(2233): n is a, c, g, or t
  misc_feature (2235)..(2237): n is a, c, g, or t
  misc_feature (2240)..(2242): n is a, c, g, or t
  misc_feature (2244)..(2245): n is a, c, g, or t
  misc_feature (2247)..(2249): n is a, c, g, or t
  misc_feature (2251)..(2256): n is a, c, g, or t
  misc_feature (2258)..(2260): n is a, c, g, or t
  misc_feature (2262)..(2265): n is a, c, g, or t
  misc_feature (2267)..(2277): n is a, c, g, or t
  misc_feature (2279)..(2280): n is a, c, g, or t
  misc_feature (2284)..(2285): n is a, c, g, or t
  misc_feature (2287)..(2290): n is a, c, g, or t
  misc_feature (2294)..(2294): n is a, c, g, or t
  misc_feature (2296)..(2299): n is a, c, g, or t
  misc_feature (2301)..(2303): n is a, c, g, or t
  misc_feature (2308)..(2311): n is a, c, g, or t
  misc_feature (2313)..(2313): n is a, c, g, or t
  misc_feature (2316)..(2323): n is a, c, g, or t
  misc_feature (2325)..(2325): n is a, c, g, or t
  misc_feature (2328)..(2330): n is a, c, g, or t
  misc_feature (2332)..(2338): n is a, c, g, or t
  misc_feature (2340)..(2341): n is a, c, g, or t
  misc_feature (2343)..(2344): n is a, c, g, or t
  misc_feature (2347)..(2350): n is a, c, g, or t
  misc_feature (2352)..(2355): n is a, c, g, or t
  misc_feature (2358)..(2376): n is a, c, g, or t
  misc_feature (2378)..(2378): n is a, c, g, or t
  misc_feature (2381)..(2382): n is a, c, g, or t
  misc_feature (2384)..(2386): n is a, c, g, or t
  misc_feature (2388)..(2391): n is a, c, g, or t
  misc_feature (2394)..(2394): n is a, c, g, or t
  misc_feature (2398)..(2399): n is a, c, g, or t
  misc_feature (2401)..(2403): n is a, c, g, or t
  misc_feature (2405)..(2405): n is a, c, g, or t
  misc_feature (2408)..(2410): n is a, c, g, or t
  misc_feature (2414)..(2416): n is a, c, g, or t
  misc_feature (2419)..(2419): n is a, c, g, or t
  misc_feature (2421)..(2421): n is a, c, g, or t
  misc_feature (2423)..(2426): n is a, c, g, or t
  misc_feature (2429)..(2431): n is a, c, g, or t
  misc_feature (2434)..(2435): n is a, c, g, or t
  misc_feature (2437)..(2439): n is a, c, g, or t
  misc_feature (2441)..(2442): n is a, c, g, or t
  misc_feature (2446)..(2446): n is a, c, g, or t
  misc_feature (2448)..(2449): n is a, c, g, or t
  misc_feature (2451)..(2452): n is a, c, g, or t
  misc_feature (2454)..(2461): n is a, c, g, or t
  misc_feature (2463)..(2467): n is a, c, g, or t
  misc_feature (2469)..(2469): n is a, c, g, or t
  misc_feature (2471)..(2471): n is a, c, g, or t
  misc_feature (2473)..(2476): n is a, c, g, or t
  misc_feature (2478)..(2490): n is a, c, g, or t
  misc_feature (2492)..(2492): n is a, c, g, or t
  misc_feature (2494)..(2502): n is a, c, g, or t
  misc_feature (2504)..(2504): n is a, c, g, or t
  misc_feature (2506)..(2510): n is a, c, g, or t
  misc_feature (2512)..(2516): n is a, c, g, or t
  misc_feature (2519)..(2520): n is a, c, g, or t
  misc_feature (2522)..(2522): n is a, c, g, or t
  misc_feature (2526)..(2527): n is a, c, g, or t
  misc_feature (2529)..(2532): n is a, c, g, or t
  misc_feature (2535)..(2538): n is a, c, g, or t
  misc_feature (2540)..(2541): n is a, c, g, or t
  misc_feature (2543)..(2543): n is a, c, g, or t
  misc_feature (2546)..(2547): n is a, c, g, or t
  misc_feature (2549)..(2552): n is a, c, g, or t
  misc_feature (2554)..(2562): n is a, c, g, or t
  misc_feature (2564)..(2564): n is a, c, g, or t
  misc_feature (2566)..(2568): n is a, c, g, or t
  misc_feature (2570)..(2573): n is a, c, g, or t
  misc_feature (2575)..(2576): n is a, c, g, or t
  misc_feature (2580)..(2580): n is a, c, g, or t
  misc_feature (2582)..(2582): n is a, c, g, or t
  misc_feature (2584)..(2588): n is a, c, g, or t
  misc_feature (2590)..(2593): n is a, c, g, or t
  misc_feature (2595)..(2601): n is a, c, g, or t
  misc_feature (2603)..(2604): n is a, c, g, or t
  misc_feature (2606)..(2614): n is a, c, g, or t
  misc_feature (2616)..(2616): n is a, c, g, or t
  misc_feature (2618)..(2618): n is a, c, g, or t
  misc_feature (2621)..(2627): n is a, c, g, or t
  misc_feature (2630)..(2630): n is a, c, g, or t
  misc_feature (2632)..(2633): n is a, c, g, or t
  misc_feature (2635)..(2637): n is a, c, g, or t
  misc_feature (2639)..(2639): n is a, c, g, or t
  misc_feature (2641)..(2645): n is a, c, g, or t
  misc_feature (2647)..(2655): n is a, c, g, or t
  misc_feature (2657)..(2659): n is a, c, g, or t
  misc_feature (2662)..(2666): n is a, c, g, or t
  misc_feature (2668)..(2668): n is a, c, g, or t
  misc_feature (2670)..(2684): n is a, c, g, or t
  misc_feature (2686)..(2690): n is a, c, g, or t
  misc_feature (2692)..(2696): n is a, c, g, or t
  misc_feature (2698)..(2698): n is a, c, g, or t
  misc_feature (2700)..(2704): n is a, c, g, or t
  misc_feature (2707)..(2707): n is a, c, g, or t
  misc_feature (2709)..(2714): n is a, c, g, or t
  misc_feature (2718)..(2722): n is a, c, g, or t
  misc_feature (2724)..(2725): n is a, c, g, or t
  misc_feature (2727)..(2727): n is a, c, g, or t
  misc_feature (2729)..(2736): n is a, c, g, or t
  misc_feature (2738)..(2740): n is a, c, g, or t
  misc_feature (2742)..(2742): n is a, c, g, or t
  misc_feature (2744)..(2744): n is a, c, g, or t
  misc_feature (2746)..(2747): n is a, c, g, or t
  misc_feature (2749)..(2751): n is a, c, g, or t
  misc_feature (2753)..(2755): n is a, c, g, or t
  misc_feature (2758)..(2759): n is a, c, g, or t
  misc_feature (2762)..(2762): n is a, c, g, or t
  misc_feature (2765)..(2766): n is a, c, g, or t
  misc_feature (2768)..(2768): n is a, c, g, or t
  misc_feature (2770)..(2771): n is a, c, g, or t
  misc_feature (2773)..(2774): n is a, c, g, or t
  misc_feature (2776)..(2777): n is a, c, g, or t
  misc_feature (2779)..(2781): n is a, c, g, or t
  misc_feature (2784)..(2789): n is a, c, g, or t
  misc_feature (2791)..(2795): n is a, c, g, or t
  misc_feature (2797)..(2797): n is a, c, g, or t
  misc_feature (2799)..(2801): n is a, c, g, or t
  misc_feature (2803)..(2805): n is a, c, g, or t
  misc_feature (2807)..(2807): n is a, c, g, or t
  misc_feature (2809)..(2810): n is a, c, g, or t
  misc_feature (2812)..(2817): n is a, c, g, or t
  misc_feature (2819)..(2819): n is a, c, g, or t
  misc_feature (2821)..(2822): n is a, c, g, or t
  misc_feature (2824)..(2826): n is a, c, g, or t
  misc_feature (2828)..(2828): n is a, c, g, or t
  misc_feature (2830)..(2837): n is a, c, g, or t
  misc_feature (2840)..(2841): n is a, c, g, or t
  misc_feature (2843)..(2844): n is a, c, g, or t
  misc_feature (2846)..(2847): n is a, c, g, or t
  misc_feature (2849)..(2855): n is a, c, g, or t
  misc_feature (2858)..(2859): n is a, c, g, or t
  misc_feature (2861)..(2861): n is a, c, g, or t
  misc_feature (2863)..(2865): n is a, c, g, or t
  misc_feature (2867)..(2869): n is a, c, g, or t
  misc_feature (2872)..(2879): n is a, c, g, or t
  misc_feature (2881)..(2882): n is a, c, g, or t
  misc_feature (2884)..(2886): n is a, c, g, or t
  misc_feature (2888)..(2888): n is a, c, g, or t
  misc_feature (2892)..(2899): n is a, c, g, or t
  misc_feature (2901)..(2901): n is a, c, g, or t
  misc_feature (2903)..(2903): n is a, c, g, or t
  misc_feature (2905)..(2907): n is a, c, g, or t
  misc_feature (2909)..(2910): n is a, c, g, or t
  misc_feature (2912)..(2913): n is a, c, g, or t
  misc_feature (2915)..(2916): n is a, c, g, or t
  misc_feature (2918)..(2919): n is a, c, g, or t
  misc_feature (2921)..(2923): n is a, c, g, or t
  misc_feature (2926)..(2926): n is a, c, g, or t
  misc_feature (2928)..(2929): n is a, c, g, or t
  misc_feature (2933)..(2935): n is a, c, g, or t
  misc_feature (2937)..(2937): n is a, c, g, or t
  misc_feature (2939)..(2940): n is a, c, g, or t
  misc_feature (2942)..(2942): n is a, c, g, or t
  misc_feature (2944)..(2944): n is a, c, g, or t
  misc_feature (2946)..(2951): n is a, c, g, or t
  misc_feature (2953)..(2962): n is a, c, g, or t
  misc_feature (2965)..(2971): n is a, c, g, or t
  misc_feature (2973)..(2973): n is a, c, g, or t
  misc_feature (2975)..(2975): n is a, c, g, or t
  misc_feature (2977)..(2982): n is a, c, g, or t
  misc_feature (2984)..(2992): n is a, c, g, or t
  misc_feature (2994)..(2997): n is a, c, g, or t
  misc_feature (3000)..(3004): n is a, c, g, or t
  misc_feature (3006)..(3009): n is a, c, g, or t
  misc_feature (3011)..(3018): n is a, c, g, or t
  misc_feature (3020)..(3023): n is a, c, g, or t
  misc_feature (3025)..(3031): n is a, c, g, or t
  misc_feature (3033)..(3039): n is a, c, g, or t
  misc_feature (3041)..(3041): n is a, c, g, or t
  misc_feature (3043)..(3048): n is a, c, g, or t
  misc_feature (3050)..(3052): n is a, c, g, or t
  misc_feature (3054)..(3055): n is a, c, g, or t
  misc_feature (3057)..(3068): n is a, c, g, or t
  misc_feature (3070)..(3070): n is a, c, g, or t
  misc_feature (3072)..(3074): n is a, c, g, or t
  misc_feature (3077)..(3078): n is a, c, g, or t
  misc_feature (3080)..(3084): n is a, c, g, or t
  misc_feature (3086)..(3086): n is a, c, g, or t
  misc_feature (3088)..(3088): n is a, c, g, or t
  misc_feature (3090)..(3090): n is a, c, g, or t
  misc_feature (3093)..(3094): n is a, c, g, or t
  misc_feature (3096)..(3096): n is a, c, g, or t
  misc_feature (3098)..(3101): n is a, c, g, or t
  misc_feature (3103)..(3104): n is a, c, g, or t
  misc_feature (3107)..(3109): n is a, c, g, or t
  misc_feature (3111)..(3120): n is a, c, g, or t
  misc_feature (3122)..(3126): n is a, c, g, or t
  misc_feature (3128)..(3128): n is a, c, g, or t
  misc_feature (3130)..(3132): n is a, c, g, or t
  misc_feature (3134)..(3134): n is a, c, g, or t
  misc_feature (3137)..(3139): n is a, c, g, or t
  misc_feature (3141)..(3144): n is a, c, g, or t
  misc_feature (3147)..(3148): n is a, c, g, or t
  misc_feature (3152)..(3155): n is a, c, g, or t
  misc_feature (3157)..(3157): n is a, c, g, or t
  misc_feature (3159)..(3159): n is a, c, g, or t
  misc_feature (3161)..(3161): n is a, c, g, or t
  misc_feature (3164)..(3164): n is a, c, g, or t
  misc_feature (3166)..(3167): n is a, c, g, or t
  misc_feature (3170)..(3173): n is a, c, g, or t
  misc_feature (3175)..(3177): n is a, c, g, or t
  misc_feature (3179)..(3184): n is a, c, g, or t
  misc_feature (3186)..(3187): n is a, c, g, or t
  misc_feature (3189)..(3195): n is a, c, g, or t
  misc_feature (3197)..(3197): n is a, c, g, or t
  misc_feature (3199)..(3200): n is a, c, g, or t
  misc_feature (3202)..(3203): n is a, c, g, or t
  misc_feature (3207)..(3210): n is a, c, g, or t
  misc_feature (3212)..(3212): n is a, c, g, or t
  misc_feature (3214)..(3214): n is a, c, g, or t
  misc_feature (3217)..(3217): n is a, c, g, or t
  misc_feature (3220)..(3221): n is a, c, g, or t
  misc_feature (3224)..(3234): n is a, c, g, or t
  misc_feature (3236)..(3239): n is a, c, g, or t
  misc_feature (3241)..(3247): n is a, c, g, or t
  misc_feature (3249)..(3254): n is a, c, g, or t
  misc_feature (3256)..(3258): n is a, c, g, or t
  misc_feature (3260)..(3263): n is a, c, g, or t
  misc_feature (3266)..(3270): n is a, c, g, or t
  misc_feature (3272)..(3273): n is a, c, g, or t
  misc_feature (3275)..(3276): n is a, c, g, or t
  misc_feature (3279)..(3286): n is a, c, g, or t
  misc_feature (3288)..(3289): n is a, c, g, or t
  misc_feature (3291)..(3292): n is a, c, g, or t
  misc_feature (3294)..(3298): n is a, c, g, or t
  misc_feature (3301)..(3302): n is a, c, g, or t
  misc_feature (3304)..(3305): n is a, c, g, or t
  misc_feature (3308)..(3309): n is a, c, g, or t
  misc_feature (3311)..(3311): n is a, c, g, or t
  misc_feature (3314)..(3314): n is a, c, g, or t
  misc_feature (3317)..(3321): n is a, c, g, or t
  misc_feature (3323)..(3324): n is a, c, g, or t
  misc_feature (3326)..(3330): n is a, c, g, or t
  misc_feature (3332)..(3333): n is a, c, g, or t
  misc_feature (3335)..(3337): n is a, c, g, or t
  misc_feature (3339)..(3339): n is a, c, g, or t
  misc_feature (3341)..(3341): n is a, c, g, or t
  misc_feature (3343)..(3343): n is a, c, g, or t
  misc_feature (3345)..(3350): n is a, c, g, or t
  misc_feature (3352)..(3356): n is a, c, g, or t
  misc_feature (3358)..(3359): n is a, c, g, or t
  misc_feature (3361)..(3363): n is a, c, g, or t
  misc_feature (3365)..(3365): n is a, c, g, or t
  misc_feature (3367)..(3370): n is a, c, g, or t
  misc_feature (3372)..(3377): n is a, c, g, or t
  misc_feature (3379)..(3380): n is a, c, g, or t
  misc_feature (3382)..(3382): n is a, c, g, or t
  misc_feature (3384)..(3386): n is a, c, g, or t
  misc_feature (3388)..(3392): n is a, c, g, or t
  misc_feature (3394)..(3397): n is a, c, g, or t
  misc_feature (3399)..(3400): n is a, c, g, or t
  misc_feature (3402)..(3407): n is a, c, g, or t
  misc_feature (3409)..(3413): n is a, c, g, or t
  misc_feature (3415)..(3415): n is a, c, g, or t
  misc_feature (3417)..(3420): n is a, c, g, or t
  misc_feature (3422)..(3426): n is a, c, g, or t
  misc_feature (3428)..(3428): n is a, c, g, or t
  misc_feature (3430)..(3433): n is a, c, g, or t
  misc_feature (3435)..(3438): n is a, c, g, or t
  misc_feature (3440)..(3441): n is a, c, g, or t
  misc_feature (3444)..(3447): n is a, c, g, or t
  misc_feature (3449)..(3451): n is a, c, g, or t
  misc_feature (3454)..(3457): n is a, c, g, or t
  misc_feature (3459)..(3459): n is a, c, g, or t
  misc_feature (3461)..(3464): n is a, c, g, or t
  misc_feature (3466)..(3466): n is a, c, g, or t
  misc_feature (3468)..(3469): n is a, c, g, or t
  misc_feature (3471)..(3473): n is a, c, g, or t
  misc_feature (3475)..(3475): n is a, c, g, or t
  misc_feature (3477)..(3486): n is a, c, g, or t
  misc_feature (3488)..(3488): n is a, c, g, or t
  misc_feature (3490)..(3490): n is a, c, g, or t
  misc_feature (3492)..(3492): n is a, c, g, or t
  misc_feature (3495)..(3500): n is a, c, g, or t
  misc_feature (3503)..(3507): n is a, c, g, or t
  misc_feature (3509)..(3512): n is a, c, g, or t
  misc_feature (3514)..(3517): n is a, c, g, or t
  misc_feature (3519)..(3524): n is a, c, g, or t
  misc_feature (3527)..(3528): n is a, c, g, or t
  misc_feature (3531)..(3532): n is a, c, g, or t
  misc_feature (3534)..(3534): n is a, c, g, or t
  misc_feature (3536)..(3538): n is a, c, g, or t
  misc_feature (3541)..(3544): n is a, c, g, or t
  misc_feature (3546)..(3547): n is a, c, g, or t
  misc_feature (3553)..(3557): n is a, c, g, or t
  misc_feature (3559)..(3563): n is a, c, g, or t
  misc_feature (3566)..(3566): n is a, c, g, or t
  misc_feature (3568)..(3568): n is a, c, g, or t
  misc_feature (3571)..(3571): n is a, c, g, or t
  misc_feature (3573)..(3575): n is a, c, g, or t
  misc_feature (3577)..(3577): n is a, c, g, or t
  misc_feature (3579)..(3583): n is a, c, g, or t
  misc_feature (3585)..(3590): n is a, c, g, or t
  misc_feature (3592)..(3592): n is a, c, g, or t
  misc_feature (3594)..(3595): n is a, c, g, or t
  misc_feature (3597)..(3597): n is a, c, g, or t
  misc_feature (3599)..(3599): n is a, c, g, or t
  misc_feature (3602)..(3603): n is a, c, g, or t
  misc_feature (3605)..(3606): n is a, c, g, or t
  misc_feature (3611)..(3614): n is a, c, g, or t
  misc_feature (3616)..(3616): n is a, c, g, or t
  misc_feature (3618)..(3619): n is a, c, g, or t
  misc_feature (3621)..(3621): n is a, c, g, or t
  misc_feature (3623)..(3624): n is a, c, g, or t
  misc_feature (3626)..(3630): n is a, c, g, or t
  misc_feature (3633)..(3638): n is a, c, g, or t
  misc_feature (3642)..(3642): n is a, c, g, or t
  misc_feature (3644)..(3645): n is a, c, g, or t
  misc_feature (3647)..(3647): n is a, c, g, or t
  misc_feature (3649)..(3652): n is a, c, g, or t
  misc_feature (3654)..(3661): n is a, c, g, or t
  misc_feature (3663)..(3665): n is a, c, g, or t
  misc_feature (3667)..(3668): n is a, c, g, or t
  misc_feature (3670)..(3670): n is a, c, g, or t
  misc_feature (3672)..(3676): n is a, c, g, or t
  misc_feature (3678)..(3678): n is a, c, g, or t
  misc_feature (3680)..(3680): n is a, c, g, or t
  misc_feature (3682)..(3682): n is a, c, g, or t
  misc_feature (3684)..(3684): n is a, c, g, or t
  misc_feature (3687)..(3687): n is a, c, g, or t
  misc_feature (3689)..(3689): n is a, c, g, or t
  misc_feature (3693)..(3694): n is a, c, g, or t
  misc_feature (3696)..(3698): n is a, c, g, or t
  misc_feature (3700)..(3701): n is a, c, g, or t
  misc_feature (3707)..(3708): n is a, c, g, or t
  misc_feature (3710)..(3719): n is a, c, g, or t
  misc_feature (3723)..(3725): n is a, c, g, or t
  misc_feature (3728)..(3729): n is a, c, g, or t
  misc_feature (3731)..(3731): n is a, c, g, or t
  misc_feature (3733)..(3741): n is a, c, g, or t
  misc_feature (3743)..(3744): n is a, c, g, or t
  misc_feature (3746)..(3746): n is a, c, g, or t
  misc_feature (3748)..(3753): n is a, c, g, or t
  misc_feature (3755)..(3757): n is a, c, g, or t
  misc_feature (3759)..(3763): n is a, c, g, or t
  misc_feature (3765)..(3767): n is a, c, g, or t
  misc_feature (3769)..(3769): n is a, c, g, or t
  misc_feature (3771)..(3771): n is a, c, g, or t
  misc_feature (3773)..(3778): n is a, c, g, or t
  misc_feature (3780)..(3781): n is a, c, g, or t
  misc_feature (3783)..(3783): n is a, c, g, or t
  misc_feature (3785)..(3785): n is a, c, g, or t
  misc_feature (3787)..(3787): n is a, c, g, or t
  misc_feature (3790)..(3790): n is a, c, g, or t
  misc_feature (3792)..(3793): n is a, c, g, or t
  misc_feature (3795)..(3795): n is a, c, g, or t
  misc_feature (3797)..(3797): n is a, c, g, or t
  misc_feature (3799)..(3799): n is a, c, g, or t
  misc_feature (3801)..(3802): n is a, c, g, or t
  misc_feature (3804)..(3810): n is a, c, g, or t
  misc_feature (3812)..(3814): n is a, c, g, or t
  misc_feature (3816)..(3819): n is a, c, g, or t
  misc_feature (3821)..(3823): n is a, c, g, or t
  misc_feature (3825)..(3825): n is a, c, g, or t
  misc_feature (3827)..(3832): n is a, c, g, or t
  misc_feature (3834)..(3835): n is a, c, g, or t
  misc_feature (3837)..(3840): n is a, c, g, or t
  misc_feature (3842)..(3844): n is a, c, g, or t
  misc_feature (3846)..(3846): n is a, c, g, or t
  misc_feature (3848)..(3852): n is a, c, g, or t
  misc_feature (3856)..(3859): n is a, c, g, or t
  misc_feature (3862)..(3862): n is a, c, g, or t
  misc_feature (3864)..(3869): n is a, c, g, or t
  misc_feature (3873)..(3874): n is a, c, g, or t
  misc_feature (3878)..(3879): n is a, c, g, or t
  misc_feature (3881)..(3882): n is a, c, g, or t
  misc_feature (3885)..(3892): n is a, c, g, or t
  misc_feature (3894)..(3894): n is a, c, g, or t
  misc_feature (3896)..(3898): n is a, c, g, or t
  misc_feature (3900)..(3906): n is a, c, g, or t
  misc_feature (3908)..(3909): n is a, c, g, or t
  misc_feature (3912)..(3912): n is a, c, g, or t
  misc_feature (3914)..(3918): n is a, c, g, or t
  misc_feature (3921)..(3925): n is a, c, g, or t
  misc_feature (3928)..(3928): n is a, c, g, or t
  misc_feature (3930)..(3931): n is a, c, g, or t
  misc_feature (3933)..(3934): n is a, c, g, or t
  misc_feature (3936)..(3939): n is a, c, g, or t
  misc_feature (3941)..(3943): n is a, c, g, or t
  misc_feature (3945)..(3946): n is a, c, g, or t
  misc_feature (3948)..(3951): n is a, c, g, or t
  misc_feature (3953)..(3955): n is a, c, g, or t
  misc_feature (3957)..(3964): n is a, c, g, or t
  misc_feature (3966)..(3969): n is a, c, g, or t
  misc_feature (3971)..(3973): n is a, c, g, or t
  misc_feature (3975)..(3976): n is a, c, g, or t
  misc_feature (3978)..(3982): n is a, c, g, or t
  misc_feature (3984)..(3985): n is a, c, g, or t
  misc_feature (3987)..(3990): n is a, c, g, or t
  misc_feature (3992)..(3994): n is a, c, g, or t
  misc_feature (3997)..(4000): n is a, c, g, or t
cgaccaaccggcttggcaggaactcactagcctggaagatgtgaaaggctttgtagagaaggtgggctatccggtactggtgcgtccgtcttacgtactctccggtgctgcgatgaangtatgctacgatgaagaagaactggaaaacttcttgaagatggctgctgaggtatctaaggaatatccggtggtggtatcccagttcttgcagaacaccaagganatngagttcgacgctgttgcccaaaacggtgaagtggtggaatacgccatctccgagcacgtagagtttgccggtgtacactccggtgacgctacgctggtattcccggcacagaagatttactttgcaacggcacgccgcatcaagaaaatcagccgccagattgcgaaggaactcaatatttccggtcctttcaatatccagttcctggcacgcaacaacgaggtgaaggttatcgagtgtaacctccgtgcatcgcgcagcttcccgttcgtatccaaggtgctgaagcgtaacttcatcgagactgctacccgnatcatgctggacgctccctatacacaaccggacaagtcggcattcgacatcgaccgtatcggtgtgaaggcaagccagttctccttctcccgtctgcacaaggcagacccggtattgggtgtggacatgtcgtctacgggcgaggtaggctgtattggcgacgacttctccgaagcattgctgaatgccatgattgctaccggattcagaatcccccgtcccgagaagggcgtgatgttctcctccggagccatgaagtccaaggtggatttgctggatgccagccgcatgctctttgccaaaggctataagatttatgctacggcaggtacagccgctttcctcaacgcccatggcgtgacgacggaagccgtttactggccggatgaacgcccggatgcggaaaacaacgtgatgacgatgattgccgaccatgccttcgacctgattgtcaacattccgaagaaccatacgaaacgcgagctgaccaatggctacaagattcgtcgcggtgccatcgaccacaacattccgttgattaccaatgcccgcctggcaagtgcctttatcgaggcattctgcgaaatgaagctggaagatatccagattaagagctggcaggagtacaaataaattgtttgctctataaacgattgcaggagcggaaagccgaaaggttttccgctcttttggtatactgcgtttatttccgtatttttgttcggggctgagtctctgtatgaatcaaaagaagaaataatatgaatgaagtggaaaaaatgcgtagctcccagttggcggatatgtccgttccggagatacaggtgaagttcgagcatgccaagcgcttgctggcaaaaatgcgtgtgatgagtacttacgatgaggattaccggagtttgctggaggaactggtgccaggtattcccgctacttccatcatctgcccgcccttccattgcgaccacggggatgggatccggctgggtgagcatgtctttgtcaatgccaattgcactttcctggacgggggatatatcacgattggtgcccatacgttggtcggtccatgcgtacagatatacactccccatcatccgatggattatatcgagcgtcgtacggaaaaggaatatgcctatccggtgacgataggagaggattgctggattggcggcggtgccattctgtgtccaggcgtcaccatcggcgaccgttgtatcatcggtgcgggtagtgtggtgacgaaagatattccatccgatagcatagccgttggtaatccggcaaaggtcatccggaaaaatgaggcaaaaaagtgaacgtactaaatgcttgagaaacagagcgtgtcgctaaatgactaaaaaaatatcgaaaaatattatgcaaaagttttggtaatgtcaaaataagctgtacctttgcatcgcttttgaaacggaagtgnacgggcgtttagctcagctggttcagagcatctgccttacaagcagagggtcggcggttcgaatccgtcaacgcccactggaaattttcattcgaaggtggtcttgcaagtgattgtaaggccatttttttnnncnntnanntncntttnntnaaannnttnnncnttnnnnnntnntnnnnnnnaaaaannnnnnantttnnnnnncnnnnantnnnnnnnnnaannnnnnnnnnnnaanntnnnttnnntnncnnnannnnnncnnntnnnngnnnnnnnnnnngnnaaanngnnnntttngnnnncnnnttttnnnnanttnnnnnnnntnaannncnnnnnnnanntnnaannnnannnnttnnnnnnnnnnnnnnnnnnncnttnncnnnannnnaangggnngnnnanggnnntttnnnaancntnnnnaannnttnncnnnanntttncnnanncnnnnnnnnannnnntnangnnnntnnnnnnnnnnnnnancnnnnnnnnnangnnnnngnnnnnttnntnaaannannnnttnnnnanntnggnngnnnngnnnnnnnnnangnnntnnnncnntttngncnnnnntnnnnannnnnnnannannnnnnnnntncnttnnnnnnnaangnngnnntngnnnnngnnnnnnnnncnnnaannnnngnannnnnnnnnnnnnnncnnnnntnnnnngnannnnnggncnnnnnncccnnnnntnncnannnnnnnngnnnancngnntnnncnnnccnnttnggnnangnngnnanngnnnttnnnnnncnnnnngnannncnnntngnnannnnnnangnntnnncngnnnnnnnnaanntnngnngnnnnnnnggnnantnnnannnccnnnnnnnngnntnnncngaannnnnnnngnangnnntnngnnannanntnnnttncnnaaannntngnntngnannnnnngnnnnnnnnnnccnnnnnnncnantnnnnnnannnnnnnnncnnnnttnnnnncnnnnannnnnnnnannnngnnnnnnntnnnnnnnancnnnnnntnnngnnannnnnnnnnnnngnannnttnnannnnnanantnaanncngnnnngnnggnnncnnnnnnnnnncnnnnnangnnnanccnnntnnnnttnnaaannnngnangnaancnnggnnnngnnnannnnnntnntnnnnnnntngnngnnaaannnncngnttnccnnttnnnnnnnnnnntnnnngnnnnnnncnnnnnncnnnannnnggnnnnncnntnnggnnnnnnnntnntnncnnnnnaanntnnttnnanggnttnnnnnanntnnnnntnnannnancngncnnnnnncnnnnncnngnnnantnnnngnnnnnngnngncnnngnnnnncnnnncnntnnnnnncnnnnngncnnnncnnnnncntnnnnannnntnnaannnntnnnccnnnncnannnngncnntnnngnannnnnnnnnnangnanttnnnnnnggnnnnnannnnannnnannnnnnaannaannantnnnggnnnntnncccccnnnnntnnnnnggnanttnannnancnnnnnannnnnncngnngnanttnnannttttnnnncngnnantnntnnnnnaannnnnnaaantnnangnnnnannnnnnnnannnanngncnnnnngncnangnttnantttnntnnnannaaaaannannnnnnnnnnaaannnaanntngnnnnnnnnntnntncnnnnnngnnnannnnngnnncngncnnnnnngnnancnanttnannangnangnngnnnnnnncnnncnnnntnnnancnnnnnnanngnnnncnnncntnnnnncccnnnnttnannnnnnaaanngggnncnnccnnnnnnnncntnnnannnnnnncnnccntnnnnnccnnnnnttnanncnngnnnngnnnanngnnnncnnncnnnnnnnncnnnntnnnannannnnnanngnnnncnnnccnnnn

SEQ ID NO: 114 - DNA, 4000 bp, Escherichia coli
  misc_feature (1984)..(1985): n is a, c, g, or t
  misc_feature (1987)..(1988): n is a, c, g, or t
  misc_feature (1992)..(1992): n is a, c, g, or t
  misc_feature (1994)..(1994): n is a, c, g, or t
gcacattggcaaagaattttagccgtatatctatttatttgttttcagactgcaggaatagcagaaatgcgaatggggcaggattatttaaaggctgtaattgttagtattatccttaccccttttggtctatttttctttaaaaaggaatccttaaaatgatgcgaacgttcaagctaatcattatttatattttatgtccagtcgttctttttgggcaaagaacagggttagaaattatggaacaggttaaaaataatcccttaccatcgtcttctattacccatattgaattaacgattgtgacgaaaaaaggaaaacgagaaaagaagaaaatccgagagtttattcgttatcaaaaaaattacgaatcgggtaaatatgaacgaaaaactttggtgcgttttacgaagcccttgtttgttaaaggaacaggcttattaaattggactcaaaaaaatggcgtccaagaacaatggatttttctacccaaattaaaaacagcaaaaaaaattacgtctaaagatagaacaaaatctttcatgggttcagattttatttatgaagatttagaatcacgttctctaaatgaggatacttttactgaatttggtatcgaagttattttcaataccccgtgttatgttatcgaagcgaaaccgaaagaagaaagtgcttatcagtggcaaaaaatttgggttgaaacaagcacttggcaaattaaaaaagtggagtattacaatgaaaaaaataaaatcataaaaacattatcaattcctaagcataaaatcgtaaatggattttatatcccagaaaaaatgaccatgatatctattaaggggaatcaaacaagtatggtgattaacaaagccactatggacgcaggactgcaaaatgatatattttctaagaaatttttaattcgaatcaaataaaccattgacttataaaggagctgttttgtaatatcggaaacgatatatacgaaaaacgtttccattgaccgactcacagacacaacaagaagcatatatactcgaacaaagctttgaagctttgacgcgggatggtgttcgttcattcacagtggattctctgtctcagaatttgggaatgagtaaaaaaacgatttataaatttttcccatcaaaagaagatttagttgataaaagtgtaggatattttcacggattaattgaaaaaaaattaaaacggcttattgaaactgaaccgaatcccgctatccaatttgtgaaagtaatggaatttatcatggggcatatttccaatgtatctattgagagattagcggatttaaaaaaccgttttccgagagtatgggaaaaaatggaaacatttagattagcaagaagagatgatttttttcatgttttatcaaatgcgcaaaaacagggatatgtgagagatgatgtagatattaatattattgctactttatatatgaatattattaattctacgtttcaacccgagttttttctaaaaaataatttggcaccaacggatgcgattcacaattttttaaaaatgatttctggcggtctttttacgccttccggaaatcaatatgtcaataaactatttaataaggaagatttataaatggggcatccaattagagaatgggtcattcaaaaaaccctaaagcatccaaaaagaacgattattatcagtatcctgataacaattttcatggcatcgggcatcaggttttttattgttgacgatgatatgatgaaactattgccaaaagatatgccatctcgtattgcttgggataatgtcatggaagaatttggtaatacagatatgatttatgtggcgtttggtgaaaagggtaagccggggatcaatcaaaaatcattagcaacattatgggatttcacaaaagccatggaggctttgcctgaagtggaaaaagtaacttcaatcacttcaattgaccggttggagagtgaagatnntnntatngnagtcggcgaccttcagaattcacgagaattaacgattgaagaagtggctgaaatcaatcaatacttaaataaaaataaaaatgttaaaaaacaattaatcagccaaagtgatgtttatcttaatgttgttatccagccttctgctcattcaaagtttgatgttctaagtcataaagtgagagatgtgggggatgatattttaagcaagtatgaaacccattatggcggtgctgcctacataacaggtatcgttccaagtctcattcgagatgatgttgctatgttgatgcaatcaggtatgttgattatggtattgattttattggtcaacttaagaagtccagtggctgtaggaatggttatgcttactattgttttgtccctaggatttatgcttgggtttatgggatgggttttaaaattgacaggttcggaaaagtttttattcaccatgatgaatacatctatgcccatcattttattgacaatagccaattcagatggtgttcatatgatggcgaagtttttcaaagaattaagaaatagaagaaatattaaagaatcggtcacagtggcaatggattcattattggtccctatctttttaactagcatcacaacagcggcggcattcttggcacttatttttgcaccgattgagcaaatggtgggatatggtatttcaatatctgccggcattttatgggcgtggattttatcttcaacaatgcttcccgctttgatttcattaaggaaatgggatctaaactctaaagcggttactcaagcaagtatttttgaaaatggtattgatcgactcgcaaagcaagtaacaaagcatccaaaatatatattaacgacaggactccttcttgtctccattggaggcatgggcgtgacgatggtagaagtcgatgtaaattttatgacttttttcaaaaaggggacggaaattcgtgacagtatggacttcttagaagatgaaatgttaggcaccatggatgtgcgtgttcgcgtagaaggcgatttaaaagagccagaacatttacaagcgattgttgacctgcaaacatacatggaggaagatgagaaagtcgggatgagtttttctattgcgaacattgtgcaacaaatgcataaatccattatggatgatgatccgaattttgaaactattccggattcaagagggaaggtaaataatctgttcactatgtattcgttttcaggagatccaaacgcttttgagtccatggtcgattatgattatgaagtgggactcgttacagcattaagtaaaatgatggggacacaagaaattattgtttttgtggataaaattgaaaactacgtgatggatcattttcccgaaggattgtctgctatgattactgggatggccgtagtatatagagatctcgtttttctcattataaaatcatctctcattagtattattgtatccatttttgtaattggagccatagcaagtctgtttttcggaaaatttcattggggaatattagcgattattcccttatctgcagccgtgattctaaattttggttttatggggctgtttgatgtaaagcttagtcatattacggctatattagcctcaatcattattggtgtgggtgtggattttgctattcattatattgctcaatttagacggtattcacgcgatccaaataaggttgacaatttgagccaggaagtcatcgacgatgtgggataccctattattcttgatgcagcttcaaatatgggatttggcgcattattgttttctacttttgtccctattcaatatataggtggtcttatggtttttgccatgatttcaacatcgcttgggactttgactgttttggctgcgctcactgaattattaaaaaaacgaattgttgaacaataggaggttcaaatgaaaaaaatcattttatggataagtctctttggaattggcatggcacaaacaggtatagaaattgcccaaatgg

SEQ ID NO: 115 - DNA, 4000 bp, Escherichia coli
  misc_feature (45)..(45): n is a, c, g, or t
  misc_feature (574)..(574): n is a, c, g, or t
  misc_feature (587)..(588): n is a, c, g, or t
  misc_feature (639)..(639): n is a, c, g, or t
  misc_feature (642)..(642): n is a, c, g, or t
  misc_feature (645)..(645): n is a, c, g, or t
  misc_feature (647)..(648): n is a, c, g, or t
  misc_feature (651)..(651): n is a, c, g, or t
  misc_feature (653)..(653): n is a, c, g, or t
  misc_feature (657)..(658): n is a, c, g, or t
  misc_feature (661)..(661): n is a, c, g, or t
  misc_feature (826)..(826): n is a, c, g, or t
  misc_feature (1984)..(1985): n is a, c, g, or t
  misc_feature (1987)..(1987): n is a, c, g, or t
  misc_feature (1990)..(1990): n is a, c, g, or t
  misc_feature (1993)..(1993): n is a, c, g, or t
  misc_feature (2003)..(2003): n is a, c, g, or t
  misc_feature (2018)..(2018): n is a, c, g, or t
  misc_feature (2023)..(2024): n is a, c, g, or t
  misc_feature (2029)..(2030): n is a, c, g, or t
  misc_feature (2032)..(2033): n is a, c, g, or t
  misc_feature (2044)..(2044): n is a, c, g, or t
  misc_feature (2047)..(2047): n is a, c, g, or t
  misc_feature (2050)..(2051): n is a, c, g, or t
  misc_feature (2056)..(2057): n is a, c, g, or t
aacaaaggacacgctttaaccgaaactacttggtggaaatgtatngctcgtggaacaaccgccacagcagcagctaaaaaggctgaggacgctgctaaactggctaatgaaaaagctacagcagccgatagcgcagcaggtaaggcagtagaggctaccaacaatgccaacgcaaaagctaatgaagctcacgaaaaggcagaagaagccaatactgctaaagataatgcaaatgaagctactggcgatgcaagggtagttatcgcaaggctggaggaactggaagaatcgctaatctcaaaatacaagctgatccctacttccatgaagctaaactacccgaaaaaagttacttacaggaatacccagcctttcaaagttgaggtagaattacttcccgtagatactggtaggaatgtattgtttctcggtgatgatcgggcggtgtctatcactcctgatggcgtatttatgattaacggtgtagggatgagtaaaattcacgttatcccaacggaaaatacgggtatttatcaaactatacagattgaagtacaggagccaggaataaggnttacttctggtannggtatgcgtttatccggctctggtggtatcatattaacttagtaaattttnttnttnannttntnaacnntanaaaatatggcacttacagcagaagaggaagctaaagtaaaaaagattattacagcttacgacaatggcaaaagattaaatgaattaccagtagcagacagcagtaaccctttcgacctcacaactgaggtattggataaaagcggagaaagcaaacaagctggtntggctgctatgctaccttatgcagaggatcaatgtagttatggcgtagaattagatgtaacagtatcttcttcggttcttacccgtactggcaatatgacactgcataaaacattgccaattcaaagcaagatgaaagggtgtttgctatcagatgaaggcaaggttattgaatacctaaaccctaccaactggaaagcgcataaaagggatggttccaatggtatggttatggtggaaatccctgctcactggagaagattttataccaatggaaacaaaagaggtgtacgaatcagtgaatacccgatacctggttatcatttcgtaaagaaatgctatatctcggcttatgaggcaacaatccaacgtagcactggtaaactggcttctgtagtaaatacttcggctgattacagaggtggtaataaccaagcagattgggatgctttgcctaaatcccaattaggcaagccagctacatctacgagtagaacaaactttcgtgctgctgctcgtaaaaggggagctggtacgcaatggaactgcatggactataacgcttatatcactttggcatggctctattacatagagtatggaaaccttaactgccagttggctttcaatgcccagaaagatagcaacgggtatgctcagggtggtttgggtaatggtgtaactacatgggatggtacaaagtggaacaattttagtggttattatcctattattccttgcggtacgagtgatgaattgggaaatgcttctggtgaagtagcttacactttagagaaagcagaaggagaaaacagcaaagtatttaccgtacctcgctatcgtggtattgaaaatcccttcgggcacgtctggaagtggacggatggagtaaatatagaagtgaaaaccaattcagacggaggaacttctaaagtgtatgtttgcgatgatccttctaaatacaacgatagtaactacacaggctatacgcttagaggattggctgcacgtgcagaaggttatgcaaaagaaatgattttcggtgaatttggcgatttgattgcttctgtagtcggaggtggatctactacctattggtgtgattacttctataccaatataggatctaacgctcttaggggtgtccttttcggcggtnntncgnatnatggcgatcntgcgggcttcggttntgcgnntacgnntnncgccccctcgnatncgnntgcgnntgtcggctctcggctttgttttattcctgaatcgtgaagcgagccaggtttagactgcaaaacttaaatgattaataaacaaataaatataggttggttgctggtgggtgtccttttcagcggtaatacgaataatggcgatcatgcaggcttcggttatgcgaatacgaataacaccccctcgaatacgaatgcgaatgtcagctctcagctatgatttttcaaaattaactcaacatacgaagcaacgaccttacctattggtagaagataacataactcataaaggtgctggtagggaaaccgaaggctctgagtacgaaaaacaaagaatatgaagagattaagtaatttatacgagcaaattatttcacttgacaacttgcgcctggctgatgaaaaagccagaaaaggcaagttgcgttcttatggtgtcaaacgacacgataggaatagggaagcaaacatactggctcttcacgaatctttgaaaaacaagacttttgtaaattctaaatatgaggtatttataatcagagatcccaaagaacggcttatttaccgtttgccttattatcctgatagaatcttgcaccatgccattatgaatattctggagcctatatgggtgtccttatttacagaagatacctattcttgcattaaggatcgtggtattcataaagcagcagataaagtaaagaaggctttgaaagaagatccagaacacactacttactgcttgaaaatggatatagtgaagttctatccaagtatagaccatgatattttgaaaacaatattacggaagaaaatcaaagataaagatctgctttggttgcttgacgtgattatagacagtgccgatggcgtacccatagggaactatctaagtcagtattttgctaatatttatctggcttacttcgatcactggataaaggaggttaagaaggtaagatattactttaggtatgcagatgatattgtgattttaggcgatgatcctaaacagcttcacaaactccgtatagagattgaagaatatctgcatgacaatttaaagctatcacttcgtaaagtggatcctaaaactggaaaaaagaaatggaagtttcaagtattcaaaattgatagccatagaggtattgattttgtcgggtatgtcttttaccatacccatacccttattcggaagggaatcaaaaagaacctatgtaggaaggcagccaagctgaataagaaaaagcacatttccgatatggaatacaagcaagttatttgcagttggtttggctgggctaaatatagtaattctaagcatctattaaaaacaataattaaaaagcaagtatatgatacactacgattttaagccttctaagttagaggctaacgggaatggttcttacacataccgttgggatattcaggaagttcaagtagaaaaccattttggagaagctggagataatgggcaagctacaaaatggacttgtaacgaagttgttgtttggggaatggttacaaatgataagctaaaaaaggcagttattacccatttgtgggattcggataaagaagccaagattatcaatgactataacgctgcccagctcggtattcttactgaaaaatcagctaccaatgattacaaggaatatttgcaaaagagaaaagctatcaaagaaatgatagataacgattgtaaggaacttaatattatattgtgatgaaaaagtttagtgagttaggtgtaaccgtacaagatgaacgtaaaatgttcaactgtagccaggtttctatttcggatgtgctgaactgtgagatcattgtagaagatttcattccagatgtaaagacttcgcacggtgaaggaagataccttgtgaaatttaaacatagcaatggtgcggatggtaagtttttcacaaacgcagctt

SEQ ID NO: 116 - DNA, 4000 bp, Escherichia coli
  misc_feature (46)..(46): n is a, c, g, or t
  misc_feature (238)..(238): n is a, c, g, or t
  misc_feature (259)..(259): n is a, c, g, or t
  misc_feature (910)..(910): n is a, c, g, or t
  misc_feature (1621)..(1621): n is a, c, g, or t
  misc_feature (1934)..(1934): n is a, c, g, or t
  misc_feature (1947)..(1947): n is a, c, g, or t
  misc_feature (1952)..(1953): n is a, c, g, or t
  misc_feature (1955)..(1955): n is a, c, g, or t
  misc_feature (1979)..(1979): n is a, c, g, or t
  misc_feature (1985)..(1985): n is a, c, g, or t
  misc_feature (1991)..(1992): n is a, c, g, or t
  misc_feature (1994)..(1994): n is a, c, g, or t
  misc_feature (2006)..(2007): n is a, c, g, or t
  misc_feature (2012)..(2013): n is a, c, g, or t
  misc_feature (2018)..(2019): n is a, c, g, or t
  misc_feature (2021)..(2021): n is a, c, g, or t
  misc_feature (2965)..(2965): n is a, c, g, or t
  misc_feature (2986)..(2986): n is a, c, g, or t
  misc_feature (3296)..(3296): n is a, c, g, or t
  misc_feature (3492)..(3492): n is a, c, g, or t
  misc_feature (3577)..(3577): n is a, c, g, or t
  misc_feature (3726)..(3726): n is a, c, g, or t
tgtattaccagaatatttggaaggcaacagaactggctcatacacnccagaacagtggcttgacgaagtaaaggacaaaaattcggacgagattatccaggagggaactccaatggatgccgaacacttcaatcacatggagcagggcattcataacaactcacttatgttggctcttttgttagagaatgtaaagcatactcagcaaagcgtagagtctgttgatggtgaggaactngaagttacattgaccaacacnaaggatttctattttaataattctgttaagactgtggcgcttgcaaatatgcgtagcacattggattatagggttatcacagaagtacaaggcaatcctgtaaatgttggcgatgtggttgtctatgataagcaggtgaatggttttaagattgcttttacaggcagtgctaaaagtgtgactgttcgctgctttgtacagggaggaggtacggtgtagtggcaaatatcattattcatagtgacgaaagaaaagctgaaacaaacagaactcttcgtgattatggtatcaatccggaacatgcaaccaaagcacaaagagatatggctgattgcgtagcccagaagacaggcgaagcctgcagagaattaaggaggtatgacagatgaaagtcgtagaggtaaatgttggaaagaaaattgagtacagtgtatcgaaaaataagattacatttgctgatgaactgatgctcaattgcgaaaagttggagagagataatgatgaatgtgttgacatttgcattgcaaagaatgggatgattacttctggccagcttggtgaaaagtatgcagcacaaattgagattccagcaaggcagtatgttgaaaaggaagttcctaatccagattatgatcctgatgtagaaaacancagcgaaacaattatggaaagaacccctgttccattcaatatggcaaatgttacgctcaaattatatgcaatcgaataaggaggactattatgggaaattatgatcagatggcagctgcggtaagcgagctgtcaggcggaaaaaatgtggtattactggatgacatcggaatgccatcaatttatgtaagaattccaaaaggaaaaaattcagagcttgtaagcggtcttagcgataatgttcattatgcgtttaatgtggacagtgtcgagaaggccgctttttattattccaagtatcagaatattattgtaaatgaaagggcatattctcttggacacagagatcctgcaaattccataaattgggatgctgcaagaaaggcttgcgaaaataaaggagcgggcttccaccttgcaacaatggcagagtgggcttatattgctctctggtgccgcaagaatggcactatgccacatggaaacaataattacggaaaagattcggcttatacacatgaacacggcgaggaatcttcaaaggatagcggaaaaactggaagatgtttcacaggttctggacctgtaacatggaaccataaccatcacggagatggcatttgcgacttaaacggaaatgtatgggagtggaatgcaggcatgcgtcttgttgatggagaaatccagatcattccatacaataatgcagcnatgggtagcaaatgtgatatgtcggcatcctctactctctggaaagcaattaaggcggatggctcgcttgtagaacctggaacagctggaacattaaagtgggattgggtatctggcaaaattcagcttacttctggtgcgattacatataagactgatagcggtgtcggagggcagtataaagatatgacacttgcaagcgggcttactgctccagaaattgcaaagatgttattgctctacccagacgaaccaaacggagattacgcaggtgattatcattggttcaaccctgttggcgagcgtttgccgntttgcgggggcanctggnncnatggtgccaacgctggtgtcttcngcttgnacctcnncnatccccgctccnntgcgnnctggnncntcggtttccgctccgcttttgttgatctgtaatctgttgcactgtaatctgactgaggctgcgatagcagcctcttattttattttttaccttgcaataacgaaatacgatataaaataacaaataaatccgaagcagaactatgtgtggtagaatggaaaaaaatatggtatagagggactttatggaggaattaaagatattacaaaagaccttcgatatgatgaactatgcttatcctgcattggcacaatatccaaagggcgagaaattcgcccttgttgtggatataaagaggtgcatggatgttatgttggagaggattatcgaggccaacaaaaagtattataagaaaactacactacaggaattagatgtagaagtggaaaagttaaaggcatatgtccgattgtcatataacttaggttttttacctccgaaaaaatatgaacaatggtccggtctggtagttgaaattggcagaatggtaggaggctggataaagagtgtaagcaagtagggtacggaatactgcgtttgccgatttgcgggggcaactggaacaatggtgccaacgctggtgtcttcaacttgaacctcaacaatccccgctccaatgcgaactggaacatcggtttccgctccgctctgccttcaagtcagatgctgcagacctaatgggtgtgcagtcagtacagaggtgtaaaggattccgtctcctttgctctcgcaaaaaaatgtaatgggcatgaatgccggtagtagtataagcgaatcccgcaatgctctgaaaggagataatatgtccattaaaaatgtgtatgctcaaatcgtatcttttgataatttgctacaggctgagaaagatgcccgagcaggaaaaagatatgaaaatgagcagcttgcattctgggggaacctggaagacaatatacattcgatanccgaaaaacttaaatgccatnattatccgccagacatataccatcatttttatgtgtatgagccaaaattgcgaaaagtaatattttctgattacacaacaaaggtaattcaaagggcagcatacaatgtactcaatcctatagtttgtaaagggatgattagtgatacctattcctgcatagaagatagaggacaacttaaatctatgcagagattagcagggtgggttgattttgtagagaaaagcggtgaacgttggtactatctgaaaatggatgtggagaaattcttctatcgaatggatcatgaggtgcttatgagcataatccngaaaaagataggggacaaggaagcggttagattccttgaacattatgtgtgccatgcttccagagcatttggacttccgcttggagtaaagtcaccactggaaatatcggataaagaaatgctgtgggatgtagggattgccataggtggcggattgtcacacatgtatggcaatatgtatttaaaccctatggancaaatggcaaagagaaaagagggcatacagtattatattcgttatatggatgatgtgattattctatcgacggacaaggagctgntacacaggtacaagaatatgttttctgattttttaggcgatgttctgaaacttcgattaaataataaaacagcaattcgacctgtctcacatggcatggagtttgttggttatactattcgcccttttgatgttcgattgagaaaaagnacaagccttagaatgaaaaggcatttgaaaacaatacaggagctttatcgtgattatgagatagaccttgatagagcccgctccactcttatgagttataaggccttgatggaccattgcgactgcagggctttggaaaagaaaatatttgaggattttgttcttacgcacaatccgaaggaggctgatacagacaatggatgaagacaatatgttggaactgctcgaactttatatggatatggttgaaaaacaggatgaaatcatataccgc

SEQ ID NO: 117 - DNA, 4000 bp, Escherichia coli
  misc_feature (1984)..(1985): n is a, c, g, or t
  misc_feature (1990)..(1991): n is a, c, g, or t
  misc_feature (1993)..(1993): n is a, c, g, or t
  misc_feature (2002)..(2003): n is a, c, g, or t
  misc_feature (2018)..(2018): n is a, c, g, or t
  misc_feature (2023)..(2023): n is a, c, g, or t
  misc_feature (2029)..(2030): n is a, c, g, or t
  misc_feature (2032)..(2032): n is a, c, g, or t
  misc_feature (2044)..(2044): n is a, c, g, or t
  misc_feature (2047)..(2047): n is a, c, g, or t
  misc_feature (2050)..(2051): n is a, c, g, or t
  misc_feature (2056)..(2056): n is a, c, g, or t
  misc_feature (2059)..(2059): n is a, c, g, or t
  misc_feature (2515)..(2515): n is a, c, g, or t
cctgctgtcgaaatacggctatctctccgtcgagatgcagaacgcgatggctcacgatgtcgaggatgaggccatgtcgaaccgcaacgacacgctcgataatgccgcagcgcagacggtcgatctctcggcaacggaatacgaggaggtcgatacggaaacgggggaagtcaaggaaaccggatcggagcaggccgcacccgctcctgcacctgaatactgatctgacggcacgagagtatgatcttgaaatgtttggggagttcatcacggggcaactgctacatcctcgaagcggccgatgaaactttgatcgtcgaggcgggaataccgatgcgcgacatcaaaaagggtctcggctggcagctcggcaaggtggtaggatgcctcgtatctcaccgacacgaagatcatgcaaggtcgttgaacgactttctcacctgcggcatccgcgtactggctctcgccgatgtattcgacgccgccaatccgagaaatcgcgtattctgcaagataatcgaaccgatgcacggctacaaagtgggaggcttcaaggtcttcgtactgccggtcgtccacgatgtgccgtgcgtcgggttcgtcatcgagcatcaggagatgggacgcctgcttttcatcaccgatacgatgatgctggaataccggctgccgaacctgaatcacatcatgatcgaggcgaactactccgatgcaatcttgcagcgcaatatcgacagtgggcggatgcctcccgccatgcggggacggctgctgggttcgcacatggaattgcagacgacgaaagagattttgcggacgaccgacctatcggcggcaaatgaggtgattttactgcatctctccgacggcaacagcaatgccaaaggattcgccgaagaagttcggcaaatcgccggaaaaccggcatatatcgcccgtgcaggattggaggtcaatctcgataaaatgccctactgatatgcgacccgtgccgaacgatatagtttcaacgctgatccgctacctgccgcagatactcgaaaacgtgcagatagacagcggaaatacgcggctcatcaatgccgtaagactgacaaaaaggattattccacgattaaagaaaattgagaatgaaaaaaataccaaaccctaacggaaacaaattcgtcttgccaaagggatatactgacctcggatggcaactcgattttaatgcttccgaactaaaaaaatgtagggaagccgggcatatccggcggaagttcgataattccaaatacctgtatcggtgtaacgatgtggtatatatctgcgatcaatgcaagaatgtacaccatgtcgatatgagtgattaaaaaatcgaatgcaatgctgatagtaaagcaggacaagacccgcaaggaggaagagggacagatattcgtcgaactcacgatttaccgtgatgtcaggaatatcgcagactgcaaccgcctcggatattggtgcgacaaagcgcatctgtcgcacttcatcatggaatgcgcgaaatgttttacgcaagacgaattaaaaaacatactgaaaatgaacggaaacaatatttacatcgagaaaaacaacctgctcgatgcctacaagaaaggcaatgccgataacaagaagatgctcgaaaatctcttcggcaaggagatgttccgcccgaaaaacatcatggagcgcatcaagacctttgatgacgcattcaaggaactcggcgagcaccatccgctcgtaaaagaataccacaaacggcatctgttcctcgaagacgattcggatattagctccgatctcgtagcctacctcaaactccgcatcattaccgccgctctcaacgagggttggacaccgcagttcaccgaggacgaataccgctacttcccgtggttttggctctacaccaaggaggagatcgccaagatggacaaggaggagcgcaagaaagttgtcctgttcggcggtnntgcgnntnacggctcgnntgccggttttgcgtntgcgnattcgnntnacgcgccctcgnatncgnntgcgnatntcgggtctcgcctttgcttcaaatcgtccgcgctggcgaaatacgcaggtgaacaattcgctgaaatctactttgctttcgtggggaaatagatgatgggaggatggataaaaatatatcaaaccattcgggagcattggatatggaatgatccgcgaaaattgaagtggtggatcgacctgctgatgctcgccgaatggagagatagcaaacgccttgttggatcagacctcgtaaccatcaaacgggggcaattgatcgcatccgtccactatctccgcgagcggtgggcatacaaagatgacaacggggtgcagcgcaagccgtccgagcataccatcctcaaatttctatctctcctcgaagcagatcagatgataagccgcgcgaaacaccctgccacccgtgcaacgatgattacgatagttaattacgatgattaccagcagaatagcncagcaggatgcaacgagggcagcaacgacccctgcaacgacgggtgcaacgatccctgcacagaagataagaataataagaatataaaagacaatagagaggggaaaagtggaaaaagcgaaaaacgcttttccccgccctctatcgaggaggttgattcttatatcagggaaaaggggtacacggtggatgccgagcgattcgtgaacttctacgagagcaagggatggtatgtcggcaaaaacaagatgaaaaactggcgtgcggcggtggcaacatggcaaaaagaagacaacaaacgaaatgggatcaatcaacaaagatcatgtgataaacgtcgagggactgaggcgacagctactcgcccggaagactacgaggggaaattttaagtggtcggtgagcttgaagcaggcagcggacattctgctggcagcatatcaggcggaagtcgaataccgccaccgcaggttcatcgaggacaaggcgaccaaaaccaacatcgaacggctggccgcattcctgatccgcgacgatgccaagttcggggtaatgctctgcggcgtacccggcaatggtaaaacaactctcctgtatgcctttcagtcggcggtgaattggctcaacgacatagggcatttcgagggcaaacgggccggtattcggatcgtcgatgcaaaggaggtagttatgctcgcaaaggatttcgaggcattccgtaacctacgcaatatgccgatgatcgccattgaggacatggggcgcgaaccgatagaggttctcgactatgggaacatcctcaatccggttgtcgatatgctcgaatatcgctacaacatgcagctcttcacgttcatcacgaccaatctcacgaaatcgcaaatccgcgagaagtacggcaaccgcatcgcagaccgattcaacgagatgctcgaagtcatcattttcaagaatgagacctatcgggacaaatgaaattaaggcgatttgccgcgagtttcaggtaacggcgataagatggtcggataatccgaaataatgcggcatatcgcagaaaacagagcaaagacacaaaattcaacgcaatggggacagaagtaaaattaaaacgggaggcaatcgagcgacgcatcgccgaattggagggcaagatgcccgacatccaagcctccaaagagggagccgaagcgcgggcaacgatccgcaggctgaaagcgcggctcaaaacctatccgcaagagccgaaaaagcggatttacaaagtcaaggcccgattcattttcgacggcgttttcgagattcgcgcccacactcgcaaagaggccgtgcagatggcaaaaatcggatgcgggatgaacatcggagaaatccacacctgctacgggactgacgtagattgggaatttgattgcaaaccggataaaatcgtgaaataaccgataccatgacacaagacgaatttgacgcactacgattttgcgcagg

SEQ ID NO: 118 - DNA, 4000 bp, Escherichia coli
  misc_feature (750)..(750): n is a, c, g, or t
  misc_feature (753)..(753): n is a, c, g, or t
  misc_feature (755)..(755): n is a, c, g, or t
  misc_feature (757)..(758): n is a, c, g, or t
  misc_feature (760)..(761): n is a, c, g, or t
  misc_feature (763)..(763): n is a, c, g, or t
  misc_feature (765)..(767): n is a, c, g, or t
  misc_feature (769)..(770): n is a, c, g, or t
  misc_feature (774)..(774): n is a, c, g, or t
  misc_feature (776)..(777): n is a, c, g, or t
  misc_feature (780)..(780): n is a, c, g, or t
  misc_feature (785)..(787): n is a, c, g, or t
  misc_feature (789)..(789): n is a, c, g, or t
  misc_feature (792)..(792): n is a, c, g, or t
  misc_feature (794)..(794): n is a, c, g, or t
  misc_feature (798)..(800): n is a, c, g, or t
  misc_feature (802)..(805): n is a, c, g, or t
  misc_feature (808)..(812): n is a, c, g, or t
  misc_feature (1085)..(1086): n is a, c, g, or t
  misc_feature (1089)..(1089): n is a, c, g, or t
  misc_feature (1092)..(1092): n is a, c, g, or t
  misc_feature (1096)..(1096): n is a, c, g, or t
  misc_feature (1110)..(1110): n is a, c, g, or t
  misc_feature (1145)..(1145): n is a, c, g, or t
  misc_feature (1149)..(1149): n is a, c, g, or t
  misc_feature (1169)..(1169): n is a, c, g, or t
  misc_feature (1175)..(1175): n is a, c, g, or t
  misc_feature (1179)..(1182): n is a, c, g, or t
  misc_feature (1185)..(1185): n is a, c, g, or t
  misc_feature (1206)..(1206): n is a, c, g, or t
  misc_feature (1212)..(1212): n is a, c, g, or t
  misc_feature (1221)..(1221): n is a, c, g, or t
  misc_feature (1251)..(1251): n is a, c, g, or t
  misc_feature (1254)..(1254): n is a, c, g, or t
  misc_feature (1281)..(1281): n is a, c, g, or t
  misc_feature (1283)..(1283): n is a, c, g, or t
  misc_feature (1290)..(1290): n is a, c, g, or t
  misc_feature (1295)..(1295): n is a, c, g, or t
  misc_feature (1298)..(1299): n is a, c, g, or t
  misc_feature (1302)..(1302): n is a, c, g, or t
  misc_feature (1304)..(1306): n is a, c, g, or t
  misc_feature (1311)..(1311): n is a, c, g, or t
  misc_feature (1317)..(1317): n is a, c, g, or t
  misc_feature (1323)..(1323): n is a, c, g, or t
  misc_feature (1555)..(1555): n is a, c, g, or t
  misc_feature (1624)..(1624): n is a, c, g, or t
  misc_feature (1758)..(1758): n is a, c, g, or t
  misc_feature (1773)..(1774): n is a, c, g, or t
  misc_feature (1798)..(1798): n is a, c, g, or t
  misc_feature (1811)..(1811): n is a, c, g, or t
  misc_feature (1830)..(1830): n is a, c, g, or t
  misc_feature (1955)..(1955): n is a, c, g, or t
  misc_feature (1957)..(1958): n is a, c, g, or t
  misc_feature (1960)..(1961): n is a, c, g, or t
  misc_feature (1963)..(1964): n is a, c, g, or t
  misc_feature (1969)..(1970): n is a, c, g, or t
  misc_feature (1978)..(1979): n is a, c, g, or t
  misc_feature (1984)..(1985): n is a, c, g, or t
  misc_feature (1987)..(1988): n is a, c, g, or t
  misc_feature (1994)..(1994): n is a, c, g, or t
  misc_feature (2008)..(2009): n is a, c, g, or t
  misc_feature (2012)..(2012): n is a, c, g, or t
  misc_feature (2020)..(2021): n is a, c, g, or t
  misc_feature (2023)..(2024): n is a, c, g, or t
  misc_feature (2030)..(2030): n is a, c, g, or t
  misc_feature (2041)..(2042): n is a, c, g, or t
ccgcgtttcacacggttagacccgcttgctgatttctaccccagatggatcgtgataacaaagtgctgtgcgcatagccgatgaatcccatcctgctgcgtgtgctttggtacaagacctctgcgcatattttcccttgtatatatgcatgttcggttttttctatccctttcaggcagcgtttcaggttttcacggcgtatccgcaatagcttgggaaagatacgataacctaagtagggaatgccgtgagtaactctattgatttgcaaagatttgggtttgatgcgcagctcaagttgctgctgcacatagtgctctatttgcttgagagcctccttcaactcttgtgagtcatctgaaaacaggataaaatcatccatatagcgtacatacgctcgaaacccaagagtctgctttacaaagtgatccaactgattcagatagatattggcgaagaattgcgaagtcaagtttcccaccggcagtcccttgttctcttccattcccatgctcactgtctggttgctcagtattatccggcagagtgacatcaccgcagggtctttgatcttgcggtttatcaatttgagcagtatctcgtgattgacactggtaaaaaacttctcgatatccagcttcaaataccatttatagcggcaggcatacttttgggcagcactcactgctagatgcaagcccttttcctttctggtggcataggaatccttgataaaagctgcttcaaaanacngntnnannanannnannaaancnngangcacnnncntancncgannngnnnnaannnnnataatgcgctctttgggttctctgatggtgaaatatttgtaaggttgtggatgataacgctgctcaatcagttctgcttgcaactccaacagatacttctcgcagtgatacatccattctgtggtttcacttttgctctttttatgcttacaagcctttttgtaggccagatagagattggaccagcttgtaaggctatcatagagatatccaatgcgtttaggcacttttgagccagcctcccaccattttgccgctttccagcagttcccnnctnatntatncatactggctttcnctgaggtgccgcatcttgaatgccatctggatcanggcncgcagaacatccagtttcangttgancttnnnnagnggttcccgttttgcctggctntagatngcctgtacnatcagttccagaatctccaggcagatgttntcnatcttctgagccagcgaatagcgcagntncttgggnaatcnctnngtncnnnccatnatccanggcacngtgtccagccatttcacatagaggggataattattcttctggctcaagtgctgcttcttgcaatagcttgattatctgctcaccgtatttatccgctttgcctttcatccccttgatcgctgcgaaatctgccttagcttgaggttgtcgcttgattatctcatagatctgggaattatacattatgatgtaagccgggatgccttcgttggcagccaactcattgcgccantcccgcagtcggttgtattgctccagttccctttcactcagtttggccatgtcgggcttttcatttccngctttacgggagtggtattctataaagaaagaatagtagatctcgccacccgtgtttataaattccttctcgatccgcacgatgttttgctctgcacaaaacttattgaattcatcatcttcaaagcgtccggnatcccggtcgaaacnnactaggattaatttgaacatcatnctcccttaaaaanatccggcgggcaggggganaaatccccctgcacccccaccttgtcgtaagctcataaccttattccttagccctgaaattttcaaaaggcaaaaagaacaaaaaacaaaaatcaaggggaaaccctgacacagcggaagcctananngnngnngctgnnggtcgcanngttgnngnnccgatnggaaacggtgcagnngtnggcattgnngnnccagcnaccgccgcgtnncacacggtaagacccgctatttgctcccgtaggattattctgtgaaccactgggatagctaccataaatgtcccacacccattcccatacgtttccactcatatcaaaagtgccaagctcattggcggctttggtacctacggtgtgtgtggttgaaccggagtttgatgtataccacgccacatcaccaatgctattactgccgctataggtgtaaccctggctctggttaccacccttggccgcaaacatccattccatctcagtcggcaggcggtagccattggcagtccagttacagtttacattggtatgattggtattgctggaattccatcccgcaggccagttatcaggattcgtgccgtaggtgctatagctgtagcagggagttaatccttcctgcaggctgcggcgattactgtattcaatggcgttgaaccaagaaacataatagacaggataattgctgcctaccccatatccagaagctggattaactcccatcaccgcctgatattctgcctgggtgatctcgtatttatccatgtaaaatgaggacagagtcacatcagaggtgccgttgttaaatgtgccaccctctaccagaataaagtcatccacagcaacaggattgggattgtctctggcgattactttggctttgtaatctgtgcctactgccattccgtcaccggcaggatgccagatgatttgtttgccgttaccaacggtgacgctattacctatatcaccggatacggctgtgggaggaatgtcattgtagctgacgccattatcggcagaaattagcagggttacggcacagtctgtatcagcagcaaggtcataggaaatagttacttgaccggcagaaggggtggctaccacattgcttaccacgggtgcggcggcaatggcatatcctgccaatgcgatcaggctcagggtgattaatagttgtttcatcttgtcctcccttacttcatcagcactattttttgagttgagctgtgtttaccggcggtcatgaccacatgatatactccactcgagagcgtgtttccatgtgtatccttcccttcgaactgcacagaataaatccctgctgtgttatgtgaccggctaatagtttgcactatctgaccacgggtattgtagatgctgagagtcacagcttccggggtcttgatctgatagctgatcgtggtgctgggattgaagggattggggtagattgccctcagtccggtttccaagggtattccgggaatgtcaggattgccaccatccagattgaccagaatggaggcgggaccatggaagcttccgtggccatccatctccatgctgtaaagccaatagtaatactgcccgctttgatagatttcactatcgaggaaagaatagctttgctggctggaagtattggtgggttggatcagaccggatacaatactggcagaacttaaattagcggctgtgcagcgatatacgtagtagccttgcaggttggtctcggattgggtaacccaattcaactgcacatagttattggctgtaagggtagccgaaaaggaagacatctccacggggagagtttcttcggtaatgccaaaagtgttggattcaccgaatccggtgagagcaaaaatgctgcctgcgcataaaagcagaaaggcagccacaagtagtttgtgtctcatgtttttctccttgttttttggagttattttgttcggacgcagtccaggtgatatcattggtatcacctatataccagctttttcgacgttggggctgagagaagaacctgcctgatcgacggtgtcattcactacgggtgcggatgtgccatagctggacagagccagcagcccggtagcgaaggcaaacaggatgccaatcagcagtgttgttttcattagttactccatttcgcagttttttgttatgcg

SEQ ID NO: 119 - DNA, 4000 bp, Escherichia coli
  misc_feature (490)..(490): n is a, c, g, or t
  misc_feature (498)..(498): n is a, c, g, or t
  misc_feature (1017)..(1017): n is a, c, g, or t
  misc_feature (2667)..(2667): n is a, c, g, or t
  misc_feature (2925)..(2925): n is a, c, g, or t
tgttgtataacctgaaccacctgaaattaagaatatgtctgtaatatcaccaacaccggtatttctttcttgtacaattttatcaccggcataactatctccttcggaggttgcttcttctaaaacaatatggtcttcttcttcaacattggcgccaagagctctaaccatctgatagacggaatccctatcagcgatagttgtttcatctacaccctctctattaataccaacaccctctctaccaaagtcatctcttaaagtaaagttgtatgttgaactatctgaagcagttacagttacaacttcaccttttttaaatggtgttgtaccaacatatgtaatgtataaaactgtttcattaaaatctgttttcttatcataaaccttaccagagattgtttctgtagtacgctgtaatgttgtaccatcaatattatatcttactgttgccgttgcacctgaagtttgacctgtaagtaacagaacngcatttgntgtactgtcatcggcatcattaatagaacctctaatatttccaaatgattgtccacccgttacagaaccaggttttacagatataactggacctgataagtattttgttaatgggtctgttgatgttgaattttctggaaataatgtattaccactttcaagtcctaattcagcagaaaacccaccgtttacaactgatacaaatgcttgagcacctgcacctgaagtattgccagcattaaaagttaaattatctcctatttcaaagtcaaaaccaccatcatcaataatagtttctgtgattgcaccaccacctaattcgccaacttggaaagaagcaccttgtccaccaccagttaatctaattgtagcattactatcatacaatgcaccatcgttgttaattatttttgtaccaggaataccagtgattgtagattttatgaatacatcattaatatcggattctgtacctcgtattacttcaccaatttgaaaagtgcctgttactgtttctgnatcaacaataaattctgttacattatttgcaccaaaactaaatctaaaaacattttctacaacagcagttgcacttgatgtttcaccagtaattgttctaccaataagttttgatgtatcaccgataacatcaataccacgaataatctttcttgtaccccattgaccatctgatactcttaaaatattttctctaggatataatgtttctgatttttcaccaaatagtaaattaaagaaaattctatgtccttcagccgtaccttttaattgatacagtgctttaatgtttttaataagttttcttttatcaacacctgtagccaaattttctggcattgtgtgtaagaattcatttctaaactgagataagaacctatcaattactctgtcaggatccttatactctactaagttagaaatgttttcaattggatttggtttgtaacctttaataatagctcttgcatttgaagaactaccattgattgtttcaccagtaataaatttattttgtgatgtaacaaaaagtctagtattatctaaatcttcggccacaataactgctgtcgcacctgaagtggcacctgttattgtttctgagttttgaaatttaccaaatgctgtatcttctgtaagaactttgtcaccagcatctaactgtgttcttgtagaacctaatctaccagcatctaatattaataagttttcttggttggtttcagtttctaatagaataccatcagtggtttctatttgttcaacttgtaactctgcactttctaataattgataatatgtttttaaaaatgttgcaaacttagggtgttgctcaactacgaattcaggtagttgtgcatttataagggtagaaatcttgtcattaaattttgccatttatcactctaataacttgttgttggtgtataacctacacctgcatcatttgaaccacctgtgaaaccatctgcttcaactgtgaaacctgaattcgtaacatctatttctacaactgaatttctaactggaacaatatcatttgaatttggtacagtagttaattctataactgtagaagcggccgctctaatattagatattgatgaaatatttaatgagttaattgttatttggcctgttgtgtaattaatagtaccttgtgtttcgtttgcatatgttttaacaccaccagcatcaaagtaatatcttcttacaacacctgaaccattatcatctaaaaacatttcatttgtatttcctgaaactttgaaacctgaagaagataaaataccaccacttgttgacatatgacctgtatgtggattatataatgcatttctaaaataaatgtcgtatcttgctgatgtatttaattgtggtgtaaatgattttctcattttaacagaagtaatatttgatacaatactattatcaacaccatcaataataccaattaattttgaatatctaaacacaccatcaaatctttgtagtgtatttgtattataatttgtaactgctgtgataatttctgtctttaatgtttctgctgttttagaagtaacttttgtatcgtatctagcatttgatgtaagtattacactagtagtttctgcatcaacaacttctggtctaactgaagctacattntattgttttaattgtgttgctatatcttttttagtttgtgttgttagtgtagaaccagatgccggtttaattgcaatttttacaacaccatataccggtatctcatcatcttctccaccccacgcactaactgacaatgcgtttggatacatttgtttaacaaaagtttcatagtcagaagaagtcactgctctgttttgagctgcataggataatggtgcattaaatttaatactttcatctgcttctgcctctgcnccgccttgtgaaactgagtttactgtgattgttacatctgtaaatccaccaatattacctgaaagagtaaatgaacttgcgccattggattctgttgtattagtaacaatatattccatgattacaatattaccgtcttgtaattttgcacctgttataccgtcaccaaaataaatttcatatctaccatcttggccttcttgtaaaaaatatgctttagatgtactagttacatttgaatagttactagaaaatgagtaagtcgatactgttgcatctgaagttgaattttgtacagttacttttaatgtagatgtatcagctctgttacttggtattataaacttttggtcggggtcatttacatcaactgtatatttaaatgtaactaaagtaccctcatataaagtacaatttgaaaatttataaacaccatttacaggcgtgattgtaatgtctgcgttgtttacatattgataagatgtttcatcaactgtagttgtaaacaccgtacctttgttcattgtgatagaagtacctgaagcattattaatttgtacatcaacatcagctttaggtgctcttggtgaagttggtgtataaccaaccatctttgcaagtgacacaatgttattacgaatatctgcactatctaagtaaacttcatttgttgacatgttcgccaaaaaggaaagataatgtgtattgtatgataacgcatctaatagaatagaaaggcctgagccttcaaagttgtaatcttggaattctgtttgactttgtaaaaatgtttttaaatttgacttaatttggtcaaagtctaaatcagatacatttaatttatgttttgccattctatcttaacctctgtaaaaatgccgttactgtaactggatccataacaccttgtatataaaaatagatatcacatactaatctgttgccatcttggtcttcatcaattctaatactttcaagtgatgctctaggttcataatttgctatgacttcttctatttttctttgtagaaaaactctagtcaatggtgtaaagttttcaaataacaaatctctc

SEQ ID NO: 120 - DNA, 4000 bp, Escherichia coli
  misc_feature (1991)..(1991): n is a, c, g, or t
actgttggtattattagctcctggaacataaagcccttcaccagcctgactgccaattgcagttgctgctgcacggtttactcctggaggacgataaccatcagaccatgacgcatatactaataagtcatcagtcggagtccatgatccagtgaatttaagaaggacgtcatcacgatttaacggggtcaaatcattataaacgttatcatatgcacgaccgccagtaagactaggtctaatgtcatttgatggatcattatcatccacaaacaatggacggttaccatatctccaagctccaatgcccgtgaaattatattctaaatcataataacgcgcaccagcctcaagattaaactcatctgttacatcccagctaactgaaccataaagtgccatttgtttttcagatctatcattgtcatttctaaactgagtagcatcatttatctcaaatgtgttcaatgtttcctgaggaaaatcagaacgagtagtcacatcaataggtgcaaaacctagatctgctggagctgaatagttaaatcgaccaacgtgctcaattttgaagtcttcatagtaaccaccaactgtaaagttaactggcccatcaaaatctgaaaccacacggaattcttgggtaaaccttgaatttttgttggtaatatgagcactattagaaggatcaccgcattcaatcacttccggatctccgccaattgttgggtcaagtccatatactgtagaagcattgctacctacaccattataatatgaaccaacaagatactcgcaagcatatcctggaataaaaccaccaatgttggtataaccagtgtaatcaatttttgcttcaacatcacgatctaaataggcaccagtataaactaaatctaactgacccatgcgaccattaacagtccaagctgtttgattaaacgcatcattattggagtcttcagcaaatcgggaaacattcaaatcaccctttgttggatcatagtcccaaacaccagtagtgtctaaagtttgacgcgaatgctgcaacaaaacgtcccagtcatcattaatattatacttcgctccaattctcattccggtataagtagcatcattgaagtcatcttcaatcagtgctgcattatttgctgtaacaaagttaaccggaacagttactcctccagccggaacaactgttccgttaacaaatacagtaccttctggataagttacactactagctggaaatgctggatttatagcattactagcagtaaatgttccagccacgttgtcgatatatccaccttttctatcagtgtaaaatacaccacgtaaagctaacttatcttcaataacaggaacattaagtaccgcctctaaagcagtgctatcttctccaccttttgtaaatgcataactagcagatgcacttgctgaatattcattcattactggcttattagtaataagacgcacggtacccgccattgagctagcgccatataaagtaccttgtggtcctggaagaacctctatgcgctccatatcagcaatgtatacatctaaatttcgtccaccttgagtaacaggctgctcatctaagtataatgcaacgttaggggcagaaccttgtgattcagcaactgtaatattgatagcgtcaattgcagcaccgcgaatgtataattcgttctgtcctggtcctctgccacctgcgtttacacttgggagatatttaacataatcttcaaaactatcgatattttgctcttcgagttgttcggcgttaaaagcctgaacagcaatcgcaatatcttgcatgctttgtgacttcttagtcgcagtaactattacttcatcatcgagttgtgcaaatgcaggagacgacatccctatagccgcaatagctcctatcgcagtacaacttagtagatttagttttttcattttattccccttcagtgagatatagtttgattcattgatcntactttaagaaaagtttcactaacatcaataataatttagtatttggtttactaatgttacaatcttatttgctaagtgtgacataaacacaacaaaaagagtaaaattctatgtaaataggattataatcttataaatatcagtattttataaagattaaataaactttatttattgatcaacagagatctaactaacgctatagacataaatgccattacaattgaaaaaggtaatgctccaatgatcataacagatttcaacgcctccataccaccacttgccaacaaagcgcctgtagttgctgtcaaaattaacccccaaacaacaatatgcttaacatgttttttctctgaattaccagcagatgtaatagtgttaattattaatatagctgaatcagcagaagtaaccaaatatgttagaagcagtattacaattaaaagagacattaaagcagaaaaagttggcgacaatattaaatttattgtttcatataattgtgcagatatatcagcattaactattgctccttttgcaacacccaaaagctctaaattaattgcagttcctccaacaagagcaaaccaggtaagcgccattaaagttggaactaacatcgctccaagtatgtattcccttacagttcttcctctagaaacccgagctaaaaacaaacctacaaatggagcaaaaccaatccaccaagcccaataaaaaacagaccaagcagattgccaagaagctaatgctttctcagtttcatctccatttgggctccaaacagaaagtgacattgaaggaagggcaattaaataatccattatcgtagtaaaaaatgatttaaatgcaaagaatgtagcgccaaaaaaaacaaaaaaagataacaacaaaattgaaaaaatcatatttatatttgacagccactttataccttttttcactcctgaaactgcagacagtgttgatgccagcattataataattaaagcaattagttgagcatttaaggttggcttaccatttgaatcacttatccattcggccccagatatattgaatataccggcagcaaactgtgatactccaaaaccgatagtaacacccacacctgatattgtggctatgatagccactacatcaactacatgaccaaaagttccatttagacgattgccaaaaattggaaataatccagaacgtattgttaaaggcaaacccttattataagcaaaataacccaatgataggcctacaattccgtagcatgcccaaggcgtaagcgcataatgaaacgcagcccatttatatgcatatctaacattttctaccgattgactttcaactaatccttttattacatcaggattgttggcaaaatggaatattggttctgcggtcgaataagtcatcattccaacaccaataccagcgccaaacatcatggaaaaccaagaaaaattagaaaactcaggcttttcatcaatatcacccaatctaacagttcctgatttaggtagtattgctaggcccaaacaaactagaacaaaaaagaaagttatatacatgtaccacgcactaaaaatatgcacggtatctgtttggattactgatagaatttcattggcattttgtggttttagcacaacccaagttgtgaataaaattaacgcaatcattgcaccaaatgtaatcaccttattgaatccagaatagtatccatccttggatactttaatttccaataattttgagtttatcattaatacatatccatttataaataattagcagtaaattctacttagtaatatttatttggctagccttcatccagcaggcatgaaaaccaactgggattgcgtgtggcatggttactcttgccactggccctaaagatatattttgggcatcaaaaatttgaagctcttgaatttgtattttatcattccacataaaacatataaggtaaccatggtcttccaataattgattatccgctggcgca

SEQ ID NO: 121 - DNA, 4000 bp, Escherichia coli
  misc_feature (108)..(108): n is a, c, g, or t
  misc_feature (1873)..(1873): n is a, c, g, or t
  misc_feature (1970)..(1971): n is a, c, g, or t
  misc_feature (1976)..(1977): n is a, c, g, or t
  misc_feature (1985)..(1986): n is a, c, g, or t
  misc_feature (1988)..(1989): n is a, c, g, or t
  misc_feature (1991)..(1991): n is a, c, g, or t
  misc_feature (1995)..(1995): n is a, c, g, or t
  misc_feature (2000)..(2001): n is a, c, g, or t
  misc_feature (2006)..(2007): n is a, c, g, or t
  misc_feature (2010)..(2010): n is a, c, g, or t
  misc_feature (2013)..(2013): n is a, c, g, or t
  misc_feature (2018)..(2019): n is a, c, g, or t
  misc_feature (2027)..(2028): n is a, c, g, or t
  misc_feature (2117)..(2117): n is a, c, g, or t
  misc_feature (2250)..(2250): n is a, c, g, or t
  misc_feature (2498)..(2498): n is a, c, g, or t
  misc_feature (2939)..(2939): n is a, c, g, or t
  misc_feature (3139)..(3139): n is a, c, g, or t
  misc_feature (3433)..(3433): n is a, c, g, or t
  misc_feature (3542)..(3542): n is a, c, g, or t
  misc_feature (3620)..(3620): n is a, c, g, or t
  misc_feature (3636)..(3636): n is a, c, g, or t
  misc_feature (3653)..(3653): n is a, c, g, or t
  misc_feature (3669)..(3669): n is a, c, g, or t
  misc_feature (3676)..(3676): n is a, c, g, or t
  misc_feature (3690)..(3690): n is a, c, g, or t
  misc_feature (3706)..(3707): n is a, c, g, or t
  misc_feature (3725)..(3725): n is a, c, g, or t
  misc_feature (3741)..(3741): n is a, c, g, or t
  misc_feature (3800)..(3801): n is a, c, g, or t
  misc_feature (3814)..(3814): n is a, c, g, or t
  misc_feature (3882)..(3882): n is a, c, g, or t
  misc_feature (3957)..(3957): n is a, c, g, or t
  misc_feature (3996)..(3996): n is a, c, g, or t
tcaataccgttggtaactatatcagaaattgcctttttaattgccggcacaagaacatccatcacaatatacgatttcacattgttgacatcctcagaaatgaatacntccgcaaacttctgcatttctgacttcttcttaggcttcaccgttccggaaattactttctctacatgtttttctggaatagattcttttcgttcctcctttgacctatgggaatttggcttatattcctccattaagttatctcctttccactcactagactaatttttccaggtaatataatctttgtacccggaagtcgattgtttttctttttaaattgatatgtaagattcgatcgtgctttcttttcagaaaccgctcgtgtagaagcagtccaacgattggcaacacagttatcgaactccatcaccggtccatcatataaatataaattcataaaaatcacctccggataaaagaaaaaagggaaagtaccttgttacagatactctccctcgtgttgaaacacagttttctctttagatttcttcggattcctctttctcactctcgatgttcggttcatctgaatcttcccactcagcatcgataatctgctgttccttctgagctttgattttggcaatcatcggtttacccacatacttgtagattacaacacctgcaagtacagctaaaccaacaccggccgcaaccttaaaccctttaccagaactcgatttaacgatttcctcagtagttgtctccataacctcttcattgttcatgatctcattagtttccataaatattctcctttcattttttgaaaatgtgtgattcttcttccattaaagccattgtttttttcgcgcggttatctcaaattacgaaagtcgtatctcggtgcaattgtgtaatcgatcaccagacaaggtgttccatcactggctaattgtgaactgaaggataagtcgatatatccgtcatcaatattccaaccaagttcatcccccagcttaatattatccaaaccaatttcatagtaaaaatcattcagggatatatacatttcatccctcatctgtcgattcagctcacattcagctttcttaattttctcgatatctcccttgaaatacctcccagacaccgcatcatagcaaagtgtatttcctttttctgtaatgattacttctcgtgtaaccaccggatttttctcaactttgtcttttgcaatagcatcctttacagcttcgtttttcttctctccaaacatctctattactttttcctgatagtctttgagagccgattccgataaggtgtaggctgttgcgagtgctgcgtttcgacgaacgtttaccgaactagcgccgattaaacatgcaatggaaagtgtccccgtaagtgctgccggaacataacacatccatgttgtttttatcaaatctacggcctcgagctgattaacaccgatttcctcttttctttcttcgataagaataagagcctttggtgttgcacgaaccgccataacagttgtcgtaatcatgccggcaataccaatgcctgtaagaatttctggactatgttttttaatcgatgttttaagcaataaaaagctttttgataattcttttttcattatcttcctcctccgagaatcgtttttgatagctccattaccatctgaaacgcctcgtctttcgtaaatccggcctgaatataactatccatcacttttttcgtttcacgagccgcctgttccatagcctctttctcttccagatttttgatttcctgtttgagaagcttgatctcgttctctttttcaaaaacctcctcctgtaaggattcttttgttacctcttttgagttncttcccccacagtaatttctataagaaaccttgctttcacggggcacagggcccctggattcctgcttaaccaaccagaattccggacgaaccccannagagnncgaagcgnngnngnagtncgtanngccanngtngtncacannagcgaaannagccgaagaaacttcttcttttgttgcatttctcagccagccccatgatgaatcatttttaaaataagcaaccctgttctttcgttccntcatcaacggaagctgctcgtcagtatcgggttctaaattgttattatcccattcgtcttcatgccccacaatctgtccaacagtaggaagcgtaagaccataaatcttatcacgcagttcctccgggaatgncataagcagaaccgtatccatccactttttcagttcagacttttcaaagccgcctttgtttgtatttttgctattcatcggacgacgagtaatatactcatcaaatataaacatgattccttcatccgtaaccttgtgagcagttgcgctaaactcgccaatctctgctaatggaataattacctgatctcctacctgaatgttagctgtttcaatttcctgttttcttaataccttcatgatgtttntcctttcgaaaatataaaatttgtggttataaaataagaccaagaagtgcctcagccgtattttctgcaacttgaaatataagattatttgcctgatttcccgacatatgaagaaaaaattccatttttaaaataaatccttctatcacaaagtcggcttcggtcaatggatgatccataatagttaaaagaatctcatcaactgcccatctttcatatgagcgttccataatggcttgtttagaccaatttgacctcggttcgaataaatattcgtttgcatagcttataattttttgaatcgcttcatcgttcatatgcacctactccaaactaaaaagaaagagcccttgttaggactcctcttcgttttcgctatctcgtttggcaagtgcctcatttactttctcttcgattctctcatccattttcttttcgttnacccaatcggtaaggatattcactccaaacccaattacggtaaccgcaataccaatagttttgataatttttccattcgtcataaagcattagcctcctttcataatacggtttgtaatttttgcgaatcactcaaatttactcaatgccatcgtatcaatgatgatacattccagcccatcttccaaagtcgttttatnattatcaaaatccaaccagtaacaatccatttcttcaatcatataacatatatcccaaccaattacatcacctccgtccacctcatccagaccaagaaaggacaaatattcattcaacggacaaacccctcttactgaaagattacgatttacatggtattgagcatttaatacagcagccatcgttgttctaaaatatttctttgaagcaagatcgtagaaaagtaacctctcgctatcggaatccatatccatgttgtaaacctgatatccccagtcatatgtcgataccancgcgtctttcgccatttccgcatggattttatcatccgcatcctccccataaactgtcttggctgcctttcgatattgcttataagattcgttaagcatggcataggcnctcatcaaagatgcttgtttcttttgatttaatgcgtttgccccaaagatacatgcgatggttgaaactcccagtagnacagaaggaatataantcggtccagccgctcgnataatttctaatttgnttaaatnttcccctttctctnactccgcttctttcannatttttattgcctttggngttgctcgaacagccntaatagttgttgtaacaactccaacggaagccactacagttaatatggtcggcgaaganngatacaattgccncccaactctttttgagattttaactttttgcatgatattctcctttcgttttgtcttactccatagcntgtagtaaatcttgaatactttctccgatcagttttgcagtcatgaaaatggaactattctttttgttcatagangcaaacatttccatctttttcgcaaatgtacaagccatntctc

SEQ ID NO: 122 - DNA, 4000 bp, Escherichia coli; identical to SEQ ID NO: 1
  misc_feature (189)..(190): n is a, c, g, or t
  misc_feature (1175)..(1175): n is a, c, g, or t
  misc_feature (2014)..(2014): n is a, c, g, or t
  misc_feature (2742)..(2742): n is a, c, g, or t
  misc_feature (3182)..(3182): n is a, c, g, or t
  misc_feature (3739)..(3739): n is a, c, g, or t
  misc_feature (3844)..(3844): n is a, c, g, or t

SEQ ID NO: 123 - DNA, 4000 bp, Escherichia coli
  misc_feature (1)..(148): n is a, c, g, or t
  misc_feature (150)..(290): n is a, c, g, or t
  misc_feature (292)..(1800): n is a, c, g, or t
  misc_feature (1808)..(1809): n is a, c, g, or t
  misc_feature (1877)..(1877): n is a, c, g, or t
  misc_feature (1990)..(1990): n is a, c, g, or t
  misc_feature (2887)..(2887): n is a, c, g, or t
  misc_feature (3147)..(3147): n is a, c, g, or t
  misc_feature (3708)..(4000): n is a, c, g, or t
nnnnnnnnnnnnnnnnnnnnnnnnnnnnnnnnnnnnnnnnnnnnnnnnnnnnnnnnnnnnnnnnnnnnnnnnnnnnnnnnnnnnnnnnnnnnnnnnnnnnnnnnnnnnnnnnnnnnnnnnnnnnnnnnnnnnnnnnnnnnnnnnnnnnannnnnnnnnnnnnnnnnnnnnnnnnnnnnnnnnnnnnnnnnnnnnnnnnnnnnnnnnnnnnnnnnnnnnnnnnnnnnnnnnnnnnnnnnnnnnnnnnnnnnnnnnnnnnnnnnnnnnnnnnnnnnnnnnnnnnnnnnnnnnannnnnnnnnnnnnnnnnnnnnnnnnnnnnnnnnnnnnnnnnnnnnnnnnnnnnnnnnnnnnnnnnnnnnnnnnnnnnnnnnnnnnnnnnnnnnnnnnnnnnnnnnnnnnnnnnnnnnnnnnnnnnnnnnnnnnnnnnnnnnnnnnnnnnnnnnnnnnnnnnnnnnnnnnnnnnnnnnnnnnnnnnnnnnnnnnnnnnnnnnnnnnnnnnnnnnnnnnnnnnnnnnnnnnnnnnnnnnnnnnnnnnnnnnnnnnnnnnnnnnnnnnnnnnnnnnnnnnnnnnnnnnnnnnnnnnnnnnnnnnnnnnnnnnnnnnnnnnnnnnnnnnnnnnnnnnnnnnnnnnnnnnnnnnnnnnnnnnnnnnnnnnnnnnnnnnnnnnnnnnnnnnnnnnnnnnnnnnnnnnnnnnnnnnnnnnnnnnnnnnnnnnnnnnnnnnnnnnnnnnnnnnnnnnnnnnnnnnnnnnnnnnnnnnnnnnnnnnnnnnnnnnnnnnnnnnnnnnnnnnnnnnnnnnnnnnnnnnnnnnnnnnnnnnnnnnnnnnnnnnnnnnnnnnnnnnnnnnnnnnnnnnnnnnnnnnnnnnnnnnnnnnnnnnnnnnnnnnnnnnnnnnnnnnnnnnnnnnnnnnnnnnnnnnnnnnnnnnnnnnnnnnnnnnnnnnnnnnnnnnnnnnnnnnnnnnnnnnnnnnnnnnnnnnnnnnnnnnnnnnnnnnnnnnnnnnnnnnnnnnnnnnnnnnnnnnnnnnnnnnnnnnnnnnnnnnnnnnnnnnnnnnnnnnnnnnnnnnnnnnnnnnnnnnnnnnnnnnnnnnnnnnnnnnnnnnnnnnnnnnnnnnnnnnnnnnnnnnnnnnnnnnnnnnnnnnnnnnnnnnnnnnnnnnnnnnnnnnnnnnnnnnnnnnnnnnnnnnnnnnnnnnnnnnnnnnnnnnnnnnnnnnnnnnnnnnnnnnnnnnnnnnnnnnnnnnnnnnnnnnnnnnnnnnnnnnnnnnnnnnnnnnnnnnnnnnnnnnnnnnnnnnnnnnnnnnnnnnnnnnnnnnnnnnnnnnnnnnnnnnnnnnnnnnnnnnnnnnnnnnnnnnnnnnnnnnnnnnnnnnnnnnnnnnnnnnnnnnnnnnnnnnnnnnnnnnnnnnnnnnnnnnnnnnnnnnnnnnnnnnnnnnnnnnnnnnnnnnnnnnnnnnnnnnnnnnnnnnnnnnnnnnnnnnnnnnnnnnnnnnnnnnnnnnnnnnnnnnnnnnnnnnnnnnnnnnnnnnnnnnnnnnnnnnnnnnnnnnnnnnnnnnnnnnnnnnnnnnnnnnnnnnnnnnnnnnnnnnnnnnnnnnnnnnnnnnnnnnnnnnnnnnnnnnnnnnnnnnnnnnnnnnnnnnnnnnnnnnnnnnnnnnnnnnnnnnnnnnnnnnnnnnnnnnnnnnnnnnnnnnnnnnnnnnnnnnnnnnnnnnnnnnnnnnnnnnnnnnnnnnnnnnnnnnnnnnnnnnnnnnnnnnnnnnnnnnnnnnnnnnnnnnnnnnnnnnnnnnnnnnnnnnnnnnttttttgnngtgtgccttgcggcgcacgtttctaaagggtgaaagtccctaatccgccctagtagtgggaaggatanagccgaagacaagggtgtccatcgtgaggtggaatctgaaggaagtcggatggcaaatctccggtctgacgaatagaaatcacatcaggctatggctaaggataaggttgctncacaaactgaagtccaataactactcggaattagctatggtaaatgtggcagataggtggggagaaagaaacgtgtggtaccgagggaggtcttgccagtggtggaaacagagtaagaagccatagtaacaacgaatggcaagaagtcagcaaaagtcatagtaccattacggttgcaaacataatgggaaggactgaactttaggaggtgttagtaaatgaatgtaaccaatgatggagttaaggacagacaacttcatatagaggactatctgcaaatggtatctgcggaacagaaagagtatgcagaagtgtccgaccatcagaggattactgaaagaaacgacaccatcacagattttcagacggacaaactgatggaagagattttatcaaacgataaccttaacaaagcgtacaaaaaggtaaaatcgaataaaggagcaggcggagtggatgggatgaacgtagatgaacttctagcgtttctcagaaacaacggaaagcgacttaaacagcagttgatggaagggaaatataaacccaatcctgtccgaagggtggaaataccgaaagaaacaaagggtgagtttagaaaactgggagtgccaacggttgttgacagagtttttcagcaggcaatcgcacaggtgctaactcctatttacgagaaacagttttcagaagacagctacggatttcgtccaaacagaagggcacacgatgcactaaagaggtgtcagacaaacgtaaatgatggatatgtatatgtggtagatatggatttagagaagttctttgacacagtatgccaaagtaagcttattgaagtactatcacgaaccatcagagacggaagggttatatctcttattcacaagtatctcaatgcaggantgataagcagaggagtatttgaaaggaccgaggtaggagtaccgcaaggtggtccacttagcccgttgcttagcaacataatgctaaatgagctagataaggaattggtgcgaagaggacacagatacgtcagatatgcagatgactgtatgatattttgtagaagcagaaagagtgcagagagaaccttacgcaatatcacgccatatatagaaggtaaactgtttcttaaagtaaacaaggagaaaacctgcgtggancatatcagcaaggtcaaatacctagggtacagcttttataggtacaagggggaatgcagactgaggatacacccaaagtcagtagctaagatgaaagacagaataagggaactgacaaaaagaagtaacggatggagtaattcatacagggcaatgaaacttacgctttatatacgtggatttgtcaattactttgggcttgcagatataaagagtatccttcttagaactgacgaatggctgagacataaaataaggacaatctactggaaacaatggaagaaagtaaagactaaattcaaagaactaaagaagttaggtgtagatgaagagaaagcgtggatatgcgcaaatatgcgaaatggaaactggtattgtggtggatacttcgtattacagactgcatttaacaataagaaactccgtgaactcggctatccgacattcacagagtactatatgaaaatatgtgaaaactaaagaaccgccgtgtaccgaacggtacgcacggtggtgtgggaggtcggtagataaaataattatctacctcctacccgattnnnnnnnnnnnnnnnnnnnnnnnnnnnnnnnnnnnnnnnnnnnnnnnnnnnnnnnnnnnnnnnnnnnnnnnnnnnnnnnnnnnnnnnnnnnnnnnnnnnnnnnnnnnnnnnnnnnnnnnnnnnnnnnnnnnnnnnnnnnnnnnnnnnnnnnnnnnnnnnnnnnnnnnnnnnnnnnnnnnnnnnnnnnnnnnnnnnnnnnnnnnnnnnnnnnnnnnnnnnnnnnnnnnnnnnnnnnnnnnnnnnnnnnnnnnnnnnnnnnnnnnnnnnnnnnnnnnnnnnnnnnnnnnnnnnnn

SEQ ID NO: 124 - DNA, 4000 bp, Escherichia coli
  misc_feature (1976)..(1976): n is a, c, g, or t
  misc_feature (1979)..(1980): n is a, c, g, or t
  misc_feature (1982)..(1982): n is a, c, g, or t
  misc_feature (1988)..(1988): n is a, c, g, or t
  misc_feature (1994)..(1994): n is a, c, g, or t
  misc_feature (2015)..(2015): n is a, c, g, or t
  misc_feature (2024)..(2024): n is a, c, g, or t
  misc_feature (2036)..(2036): n is a, c, g, or t
  misc_feature (2043)..(2043): n is a, c, g, or t
  misc_feature (2049)..(2049): n is a, c, g, or t
caagctggaagaacttgaggcccgcggtacgcaggtgcagagcgtggtgctagccaagggttctcccgtgacgctgctccaccttcccggtacactgaccagcctccgtctggaatatctgggcagactgaccaccggcgggctgacattggaaagctacagcaaggtgaagaccttcatctttgacagttgtccaggtattgactgggaaaccctgctgggccgttgcacgggtgtggaacgtatcagagtaaccggtattgaccgcgaggatgacggtacgtggctggataagtttgtcgggatgggcggtgtggattccgatggcaacactacggacacgtgcgccttggtgggtacggtacagctcacgcgctacattgatgacgatacgtacagcgctctgaaggcgcacttcccggaactgaatatccggcagccggaatacacgatgatcgagttcgacgacgaggtatcggatgacgcgaacgtgagcaaccttgacaacggtaccggctacaagtatgacaacgcgtatgaggtgagcggtcatatttccgccatcctgaagcagcgtcaccgtgtacttgctaaagtgactaaaaaagcgacgacgcggggtgtgaacatggcgaacgttgataccacggtgaacaacctggacggtgagatgacctactacccgctggacgacacggacagcaacaagtacgccgacggcacggctgccagactggacggcactgaaggtgactggatgatgtacgagcccttcttctggagcaagggtatcaatgattacctgaacggcaagcattactcctgttacagcagtaacggttcggataacatgccttccgttccggatgctgacgtccttacgcttgacgacattaagggcacgagtggcggttatctttccggtcgtaagatcatgagcggaaaggatacgctttcgaacagctacagtactgacagtacgtattcggtatgcaaggtgaacgtggacggttacaagcgtgtgcgtttcccgagcgttcccggtacaagccttgtcggaagcattttcacagacgattccggcacggtcatcagttcaatcgtcgtccctaccttgagcaacaagttcgaggccggtatgtacctgattgccgatgttccggagggtgccactgctcttcacttctccattctgaacacggcagagttcgataaggttgtcctttctaacagtgacaggatcgaggatatggaacccgaatgggtgcctaatgacgagcacttgtgtgccgttgtgggcagcagtgttgtcggttccaaacttcgcgcctgcattaccggcgggagcactacggcgagcatgacctgggctgatttccactattacagtgtccagcgcggtatgcagcagattgatgcccttatgcactcgcgcatcgcgaatcttttctacgcgaagtacggtcgtcgtgacagccaggaacaatgcggcgcgggctctcacacgaacaaccgtactacgggtggtactgccagccgcggtatgacggacacgatcggctacgaggaagcctcctcaatcaaccctaatgtgacgaacagcctgatagaaaactccgtccaccagtatgcgtggtaccgtgagaaggatgactacggcggggccacggttacgcaggtgaataatatttgctgccttggctacgaggacatctatggtcataaatatgacatgatggacggcgtggatcttcctaatgacacgggcaattccgggaagtggcgcatctggatgcctgacggcagtacccgcctggttaagggttccgtgagctccggtatctggattaccgccgtggcgcatggcaaatatatggacgtgattccggtgggttccgtttcgggttcctcctcgacaaattactgcgacatctactacatatccactgcctccagccgtgtggtctatcgtggcnacnncnacgcgnacccgnatggcggtgtttcgatgtcgnatgcgagcnacgattcctcgnatacgancacgancatcggttctcgtctggccttccgcggccggctcgttaaggcgtcgagcgccgtggcgtttaaagcgataagcgaggttgcatgatcggccgcgtaaagcgtcaaagcgggagcgaagcgacaaaacatccggtgttccccgagcaggggaacgccgttcattacgggcgtcagcccgtcgaaaaatatttttttgacgtcaggttttgtatctgtttgttaaataataatttgaaaatagtacttttgcatttgaaaggtggcgcctccccataggccgtgtggtctatcgtggcaacaacaacgcgaacccgaatggcggtgtttcgatgtcgaatgcgaacaacgattcctcgaatacgaacacgaacatcggttctcgtctgaacaacaatcgaaaggaaattttaatcggcgtacaacaccggggacttgtccccaccgtggtgccgaggggggcaagccgcagtaacagcggtccgtaagggccggaaaactgaaaaataaagtgtcgggtagggtttggtaggccggaaacggttcgaagaagccgggcccgggggattgaaggccccgtattaaaagcaataaacagtaatttatgcgcagggttgggtatatcatcgaggagatcgtggagccttccaacatggaggcttccttccggcaggtccttcgcggcagcaagcgtaaacgcagccgccaggggtgctatctgctcgcgcataagcccgaggtgttggaggagctggtcgcgcagatcgcatccggtactttccgcgtgaaggactaccgtgaacgcgagatcatcgagggcggcaagctacgccgcattcaggtgatcccgatgaaggaccgcatcgccgtgcatgccatcatggcggtggtggaccgccatctgcggaaacgtttcatccgtaccacctccgccagtatcaagagacgggggatgcacgacctcctggcgtatgtccgccgtgacatggccgaagaccctgatggtacacgttactgttacaagtttgacatcaccaaattctacgagagcgtgaagcaggattttgtgatgtattgcgtcagccgggtgttcaaggacgcaaagctcgtgaccatgctggagagctttatccgcctgatgcctgaaggtctgagtatcggcctgcgcagctcgcaggggctgggcaatttgcttttgtctgtgtatctggaccattatctgaaggacaggtatgccgtgcgtcatttctaccgctattgtgatgacggcgtcgtactgggtaaaacgaaagcggaactgtggaagattcgtgatgccgtccacgggcgcatggagtgtgccggtctcctggtgaaggggaacgagcgcgtgttcccgccgggcgagggcatcgactttctggggtatgtgactttcggtgcggaccatgtccgccttcgcaagcgcatcaagcagaagttcgcccgaaaaatgcacgaggtaaaatcgagaaggaggaggcgtgagctgatagcgtcgttctacgggatggccaagcacgccgactgtcatacgttgtttaaaaaattaacaggcaaagacatgagatcatttaaagacttgaacgtttcctacaagccggaggacggcaagaaacgttttcccggggtggtggtaagcatccgggagctggtgaacttaccgattgtggtgaaggacttcgagacgggcatcaagaccgaacagggcgaggaccgctgtatcgtggccattgagatgaacggtgaaccgaaaaagttctttaccaacagcgaggagatgaagaacatcctcttgcaagtgaaggatatgcccgacggcttcccgttcgagaccaccatcaagacggaaaccttcggcaagggtcgaactaaatacatatttacatgaaacgggtagaaggaacatccgggataaaactgatcgagtgcgtga

SEQ ID NO: 125 - DNA, 4000 bp, Escherichia coli
  misc_feature (193)..(193): n is a, c, g, or t
  misc_feature (199)..(199): n is a, c, g, or t
  misc_feature (397)..(397): n is a, c, g, or t
  misc_feature (460)..(460): n is a, c, g, or t
  misc_feature (1303)..(1303): n is a, c, g, or t
  misc_feature (1474)..(1474): n is a, c, g, or t
  misc_feature (1677)..(1677): n is a, c, g, or t
  misc_feature (1990)..(1990): n is a, c, g, or t
  misc_feature (2143)..(2143): n is a, c, g, or t
  misc_feature (2157)..(2157): n is a, c, g, or t
  misc_feature (2361)..(2361): n is a, c, g, or t
  misc_feature (2658)..(2659): n is a, c, g, or t
  misc_feature (2773)..(2773): n is a, c, g, or t
  misc_feature (2776)..(2776): n is a, c, g, or t
  misc_feature (3324)..(3324): n is a, c, g, or t
  misc_feature (3462)..(3462): n is a, c, g, or t
  misc_feature (3654)..(3654): n is a, c, g, or t
  misc_feature (3879)..(3879): n is a, c, g, or t
  misc_feature (3900)..(3900): n is a, c, g, or t
  misc_feature (3924)..(3924): n is a, c, g, or t
  misc_feature (3930)..(3930): n is a, c, g, or t
  misc_feature (3963)..(3963): n is a, c, g, or t
  misc_feature (3993)..(3993): n is a, c, g, or t
tgacggtgaacctatgatgatcaagggtgatactcagatacaggcatacgatcatgttgtcgtattctgcttggatacggctatgcgtaagctggaggactactttaactagttgatagttatgttgaacgtacgttttatagtgaagatgctaggggtgatgttcatccttgagactttttttatgctggcngctacngtcgtagccttcctttatcgggggagtgatgtatatccgcttcttatttcaagcggaatcttattcgggaccggttttttgttctactctatgggctttaaggcgaatgaacactcggccggccggcgggaaggaatgttgatcgtgacattgacttggattttattctctttatttggaatgttaccattctatatnggaggatatatagataatgtgaccgatgcctttttcgagaccatgtccggatttacgactacnggctctactattttaacgaatatagaggcgttgcctaaaggtatcttattctggcggagtcttacacagtggcagggaggtatcggtatggtcgtattcaccgtggctttgatgcctattttcggaggtggtgcctcgcagatgtttgatgccgaaacgcccggtataacccatgaacgttttcgtcctcgtattacgcaagtcgctaaacgcctgtggggggtgtatgtttttctgacactttttttagtcggccttttatgggctggtccgatgaatttgtatgatgcggtaaatcatgcgttcacggctatatctactggtggatattcaaccaaaaacgcaagtatcgcttattggaattcctcttatatagagtatgtaataactattttcatgtttatcggagctaccaatatgacattggtttatttctgttttaatggaaatgtgaagaaattgattaaagatgaggagtttcgctggtttttcttttttgttttaagcgctattatcgttgtcatggtgtggatcttgtaccttggattcgcctcggatgtagagaatgcgttccgtaaggcggctttccaagtggtgaccttggtttctacctgtggattcgctacggatgactatattccttggggaccgtttttctggtttatcgcattgatcttgatgtttatttgtggatgcgccggatctacttgcggtggcttgaagatgggacgcttcgttattttaacgaagaatctctccaatgaatttaagaaacagacacatccccatgcggtgattccagtacgaatgaacgggcatgtcgtatctggtgatatcgtacancgtgtgttagcttttgtgttcgcttatattacgttaatcgtggtgagctgtttggctttatctttggatgggatgggattttcggaggcgattggtgccgctgtttctgctataagtaacgtagggcccggcttgggaacgcttggtccggtaagtaattttgcggatgtncccacggtgtcgaaatggtttctgtcttttttgatgttaacagggcgtctggagatatttacggtattaacgatattagtccccggtttttggaaacagtaaaattattgaaaatgaaaagtatacaggtcattgctagtctgctgtgtggtattctgtattgtgggatttctttaaatgcccagaatgtattgaaagcaacnggttggatgccagagcacacatttacttccggaatagaaggtccggctgtagatagcgaaggaaatttatatgccgtaaattataagaaagaagggacgatcggtattgtacgcccagatggtagccatggctgttttctcgttttgccggaaggatctaccgggaatagtatccgcttcgggaaagacggaaatatgtacgtggcggattatacagggcataatatcttaaaagtggatatgaaatctaagaagatcagcgtattcgctcatgagccaaagatgaatcaaccaaacgatattgtatttgccnccaatggaaatatctatgcgagtgacccggattggccgaatcaaaaaggccaactttggttgattaccccggatgcgaaagtctccttattggagacgaatatgggaacgactaatggcatcgctgtgagtgaggatggtaaacgcttgtacnttaatgaatctgcncaattaaaagtctgggtatatgatatatgcccggatggtactttaaggaataaacgtctatttcatacttttgaggggtacggtatggatggtatgaagtgtgacgagaaaggaaatctttatatttgccgttatgataagggtactatagctttgttaaatccgcaaggagatttagttgaagagattcaattgacaggaaancagccgtctaacttaacatttggaggacctgatcatcgtcaatgttatgtgacattgcaggatcggggttgttttgaaacctttaaggttccttatccgggaaaagaatggtaacccgatatacgtttttgattaattttgcgttataataggtacggaatattaaaaagatatatagatgatagaatatataaagggtgaaatcgtggaacttacacctacacgtatgattttggagtgtggtggtataggctacgagctgaatatatccttgaatacatatagtgcgtttgggannaagactaccggaaaaatatatatatatgaggtaatccgggaagatgctcatttactatttggctttgccgagaaaatcgaaagggagttgttccttttgcttacttccgtttcnggngtgggaccgaataccgcacgcatgatcctttcttctctaccgccatccgaattggttcaagtgatcggttcgaagaatgaggccgcattgactgccgtgaaagggattggtttgaagacggcccagcgtatcttggtagatttgaaaaataaggtgaaacctatggagagtatggccggaaacttgccggaggcatcagtctctaatggagcggtaaccgaggaggccgtagccgcattggttatgttgggtttccagaaagcggcttcgcaaaaagcggtatccgctattttgaaaggctcgcccactttagctgtggaacaagtaattaaaactgcgcttagaatgctttgataattgacaattgaggattaacgattaacaattgacaattaaatgagaaaatgagaaaacgaatactgaaatattccatatggatcgttgtattattgtttggtgtcggcttgtattcgctgaatgctgattaccttgcgtatacatcatctttgccggaattggagttgctggaagctccggaggatacgatncctccccgttatccggtagctaaaactacaccggaggaatatcaagatatcgtgaaacaatcacctgccgatttgcgtgatccggagaatgtcaagactacgattgagtatgatttaaagacgaatacgtatattgtncgtacgaaattaggcgatatggagattggtacgccgatgagtttaaccccagcggaataccaagattattctatgcaacaatcacttcgttcctatttccgccaaaagaacgaggaagaattccaaaaagctacgaataaacagtttaacttaaccgatatgcagtttaatatcggtgcggcggaacgtatnttcggccccggtggagtacgtgtaagaacacaaggttcggccgagatcacgatgggattgaagacgaataagaataatgatccttctcttccggagcgttcccgtaaacgtactttcttcaattttgacgagagtgtgcagttgaatgtacaagcctcggtgggtagcaaggtgaatttcggaatgaattacaataccgagacctcttttgatttcgattccaanaaattgaagttggcgtatacnggcgaggaggatgagattatcaantcgttngaagccggtaacgtgagcatgaataccagcaantccttgattaatggaggtgcggctttattnggtatga

SEQ ID NO: 126 - DNA, 4000 bp, Escherichia coli
  misc_feature (162)..(162): n is a, c, g, or t
  misc_feature (1988)..(1988): n is a, c, g, or t
  misc_feature (1993)..(1994): n is a, c, g, or t
  misc_feature (2000)..(2000): n is a, c, g, or t
  misc_feature (2012)..(2012): n is a, c, g, or t
  misc_feature (2015)..(2015): n is a, c, g, or t
  misc_feature (2021)..(2021): n is a, c, g, or t
  misc_feature (2026)..(2026): n is a, c, g, or t
  misc_feature (2051)..(2051): n is a, c, g, or t
  misc_feature (2053)..(2054): n is a, c, g, or t
  misc_feature (2059)..(2059): n is a, c, g, or t
aatatcttcattcaaggattcggtttcctcaaagtccattacctcgttcataagtccatcggtatattataggtttcacaatcggcatccaccatttcacggatagccaaacggtctttcaaaaagttctcatagggggatttcgcactttcggcaagcaancccagcatggcagactgatattcgtttaccagcttactttctgtcttagccgggtatcttgcagtaagcaacgtgctgaaaatattatcagccgtttttggatattccaccctcacgctgtcatattggaacatcgtgcctgtggcacgttccgcatcagtcgtaatctcaatgccaccctctttgtctgcaataaccttaacctctttgatgttatggttataaaggaacgttccctgcccgttattaagagaatctatcacctccggcttagtcttagccagcagccctgtagtcaaaacatttgcttccatcgttcaaacaattattaaaaatgaatttactgtgttcctccgagcatctgattatccagccatattcagatgggaagaagtgtttaatatccgtttcatctttgatttcgtatttattgatggtgcggtggaatttcttataaaaccttttcagaataccgcttcttagcaatatgccgtaatggttttgtttgaatcccacataatcaatgctacgagcatcaaccgggaatatctgccaattgcttttaatctctactttcaattcgccacccaagtaaagccccatcatgtcgagtacgaaatgcagtgcctctttgtcagcgcatagtatcaccatatcatccatatagcgatagtagtagattttcaccccaaaacgcttcatcactatcttagccagttcttctttaacccaatggtcgaaatatgctaaatagagattagccaaatattgacttgtgaaattgcctattggcagccccttgtctttaccgttactatctattatcttatccaacagccttaacagttgttcatccgctatagtgtagcggattatccttttcaatgctgcgtggtctatgttatcatagaacttcttgatgtcaatcttcaaacagaaccttgtaccttttctgtctatgattaaagccgtatgcacatcctccatacatttatgaataccacgccctttgatacaagcgtatgtattcgcaatgaagaagttagtccagtaacgccccaacacattgataatgcaatggtgtactatcctgtccgggaagaacggggcaatcataatcaccctttctttcggctcatatataaccttaatccgatattcaccgggggtataagtttcattgcgcaagtcccagtacaagctatccaaattctccaaaatgttctcattgaacttggatatttcggtacgctctcctttgccttgctgtgccttatattgcgcccgtatgaggttggagcattcatatatcaggtgataaacattcttaattttcttagcttgggaaatgaatatctttcctgtatcaccgacatataaaccgcaatcctcaaaatccgagtattgataaaagcaggtatcagccgtataacataacccgtattcagtctttactacacccatttgtgccgttgttctaaaacagagctttcaattacttacttgcaccgtcctaatccatattattttaccaactatcagacgtgccgatagtctctgtgaggtaagggcgtggcagcaacagttataagttgaaaccacggtaaaagcggaacccaatgttcgcattcgcattcgaggaacgattattcgcattcagataaccgaaacccgcagtcgcaccattattcgcattagcagacaaaagggcaccagccgccacaaccctgtaatgtttttatttttttcaatccaacgccattttcgttgctccgttcaccgagttttgcagtccgtcaaaaacggcacaagcggaacccaatgtncgcanncgcatncgaggaacgatnatncgcatncaganaaccgaaacccgcagtcgcaccatnanncgcangagcagacaaaagggcaccataccagcctacagcagaccacgtactaccacctgtgggagtccaatagtaatcgcaatagcctttattacttgaacctcctactttttcggcaaaggaataacctttagtggaatgagccatagaaagcacatagccctcagttcgtggaagctccgtaatggcttcatatccgataggtacggtagtagcactatctgaatgagaggtgaattttgtcgggtcttcgcatacataggcaatagatacatccgctttatgccaaattagtacatcatcagcaagcatccacaagtattcataaggagtttccaaaccacggtaagaggttacttgtaccaccttatcgccaccagtccatcccttgatagtgtaggacaccttacccgtgttgtttcccagcgttgcagtaacaccgcaagggacaaacggtttgtaacctccccatgtattccactccgtaccattaacaaccggaccactccctaagcctccttgatggaatccgtcagcagtcagcgtttcggtgtaagcatcttggcagtgcaatgaggcatattccacacgttgcaaccaagcaatttcattgtacaccctgtacgccccgtggtgtgttccgttcttgcaaagaggacgaacaccagcctttgaaatggaagtacgaggcatacccaacatggagttgtaagtaccatccttagcggcatcaccagcacccgaaccacctctgaattgtgcggcattcgctttgagtataacaaatccgtctgaatcccttgcaatttcatcgccattccaagtgagccaacatcccgaaacggctacagagttggtaatatccaccgttgcataccacgggcttaccgtctttcgttccatcttgataaagccgggcaacggatattcggaataggcacgaatccatttcgtcccctctatttccaacttgaagtaatattccggcttttcaagcattacattaccgtccgtgctgtcaatcacagccgttgcacccgaatcctttttacggctgtcattttggttaaggtaatacttaaccgagccgtcagggttttccacaaagcgtttcagcttcgcttgaatgggtaatgtacggtgtaaatccaaattacccacacgctttagtttgtagtcctgtgagttgaaatcaccttgcaccccataccattggtcgtaaggatattgcggtttcgtgtttccgcttcccaataataatcccatagctataagttatttaatagtttcaccagcaccccaatacacatcatataccgaaaggtcgataccgtttggggatattacggttatcgctccgggcgtccaatccccgataggtacggggaacatactaaattccttatcacaaatgagcttgcatttaagcagcgtacttgtttccatcgtaacctctttaggtcgtacaaagacggtaaacggaacaccacccaaagcaaaaccattggaaaggtctgtaaccttacctttggaaagaatccgtaggctgtacatcgttgtttccataattcactgagtaaatcaagtttatttaactgcaaatataatcataaatgtgttcaacaaacacatttatgattataattaaagtatatcatcagataatgaggtataacgtgcttcaagttcattgattttatctcttagcaactgcctttcattatgcaatgcctttatctcatacggcattgcataccccattagggcggcttcgtagcatttgattatcttataatcgctacttgccaacacctcctttgagcgttcaatctcatgtgccaccttttgaaagtcggggacttctatgtatctgaatgaaatcctgtccccggcatcgtatggcacaatgcgcacaacatagccctccttatctgtgttttgtttac

SEQ ID NO: 127 - DNA, 4000 bp, Escherichia coli
  misc_feature (27)..(27): n is a, c, g, or t
  misc_feature (36)..(36): n is a, c, g, or t
  misc_feature (56)..(56): n is a, c, g, or t
  misc_feature (487)..(487): n is a, c, g, or t
  misc_feature (565)..(565): n is a, c, g, or t
  misc_feature (814)..(814): n is a, c, g, or t
  misc_feature (848)..(848): n is a, c, g, or t
  misc_feature (1985)..(1985): n is a, c, g, or t
  misc_feature (3082)..(3082): n is a, c, g, or t
  misc_feature (3418)..(3418): n is a, c, g, or t
  misc_feature (3569)..(3569): n is a, c, g, or t
  misc_feature (3571)..(3571): n is a, c, g, or t
ttgtcagcaattgcttttactggaacngctacaccnggagagtaagcaagtgctangtctctctttgtcgtcattggttttgaggaattaatctcaatttttccaggtttatttaaactatgaaattctagagcttctttatcagtgtaatggtctattttagtttttttcatttttggtaattaggtatacaattgaagcgaatttaagactaatatgatttatgaatcttctcaagtcaacaggtacgtttagtttttttacgataattagtagattattaggttatttaagagatattttaatagcaatttttcttggaacaggattgctagctgatgcattttttgttgcatttagaattccaaatacttttagaagattattctctgaaggaacatttaatgctgcgtttgtcccaagctattcctctttattaaataataaaaaaaaatcacaagcttttgctaatagtatttttaacttnttaattttaggattgttttttttagtacttcttattgaaattttaatgccagtattcgtctttctaatagcacctggntttgagggcgatcttaagaaaatggaaatagccgtaactctaacaagaattacatttccttttcttttatttattagtttagcatcttttttttctgctattttaaactcacataataaatttgctgtagcatcagctgcaccaattattttaaacatacttttaattagtgttttatttttgggtaaaattttagatgatcaattggtgtattatttatcttatgctgtgacaatctcaggtattttncagcttatttttttatatttttatgtaaaaaaanatttttcacctatagtaaatttttcaatcaagattgataaaaaagtaaaaaatttctttaaaaaattattaccaagtattttttcatctggtgttacccaaataaatattttagttggaacaattattgcctcatttcaaactagtgcagtttcttatctttattatgcagatagagtttatcaaataaatttagcaattgctggaattgcaattggtacagttattttgccccaattatctaagtatgttcaaaatcaaaataaagataaaatgaatttaattcaaaataaagctttagaattaagtttgtttttaagtatccctgctgcaattgcattgttaattgcttcagaagaaattatatcgtcattatttggttatggatcttttgatgaattaagtgttaaaaattcagcaaaggctctattttattttgctattggcttacccgcattttcattgataaaagttttttctgctttttttttcgcaagacacaatacaagattacctttttatatttctctaatctcagttttattaaatatatttataagtgttattttttttaaggaaataggatttattattttacctatagcaactacaatatcatcttggtttaatgcaatttgtttatttgtttttttaaaaaaagataatttgtttaaatttaatttagttttcattgatagatttatcaaaattatagtagcctctattctaatgggtattttttttaattttttgattaatttttttaatgaacaattaatgtattccgaaaattttaaagcaatatatttaatctcaacagtaattgttggatttacattctatatttttatagcactcttaatcaaagcttttaaaaaaagtgatattaatctaaactattaacatgagtaaaaaaattttttcaggtgttcagcctacaggcaatcttcatttgggaaactatcttggcgctataaaaaattttgtagagcttcaaaatgacaagggaaatcattgcattttttgtgttgtagatcttcatgcaatcacagttaagcaagatcctaaggaattaaaaaataatataagagagacagctgctacatttattgcaagcggtatcaatccagataacaanattatctttaaccaatcaatggtgtcagcacattcagaagctgcttggattttaagttgtgtttcaaggattggctggcttaatagaatgactcaatttaaagaaaaagctggaaaagataaagaaaaagctagtattggtctttattcatatcctgttttgatggctgctgatattttgctttatgatgcaacacatgtgccagtaggagacgaccaaaaacagcacctagaactttgcagagatattgcgcaaaaatttaataatgattttaatgcacctgagtttttaaaagtgccagagccattgatacaaaaacaattttctagaataatgagtttaaaagatggattaaaaaaaatgagcaaatcagatccttcagatcttagtagaattaatcttactgacagtaaagatgaaatagttaataagattaaaaaagcaaaaactgacccattgccattaccaaaaaatattgatgagttggttgagcgacctgaagcagaaaatttattaggtatttactctagcttgaaaaatcaaagtttacaaaattcaatagatgaattttcaggaaaaaatttttctgaatttaagatagaactatcagatgttttagttgaaaaaattgaacctatttcaaaaaaaataaaagaattactaaatgatgaaaaatatttagatacaattctgttagaggggtctaaaaaagcagatatagttgcatctaaaaaaattaaggaaataaaagaattagttggtttttaaacaaatatattaattagtttaaatttcataatttatcactatatatataataatgtttatccaaaccgaagctacaccaaatccaaattctttaaagtttcttcctggtaaaagggtatccaataatggatcttttgaagttactaaaaaagaagagactgataacgagttagttcgaaacttgctatctgttaacggcgtgacagctatttttttaggtgcagattttttgtcaattaataagaaagaagaaataagttgggatgatattaaacatatagcaatttctttgattaatgatttctactctacgggcaaagagtttgtcnttgcgaatgaattattcggaggggaaaaagaaaaacatagtgaaatagaaaaacaaattataagtattttagagtctaaaattagaccagctgttgctaaagatggtggagatattaaatttaaagaatttaaagatggtgttgtcaaagtagaactacaaggtagttgctctggatgcccaagctcaacaatgacacttaagcaaggagtgcaaaatcttttgtgccattatctccctgaggtaaaagaggtggtagctatatagttatgagaaataaagaattttcactgttagagataaaaagatttttaaaaaaaaagggacttataataanaaagaatatctacaaaaaaaaatctattaccttaaataccctatcaaaaacttttttatctagtttaattataatctcttttttctttgttttgccacttgccattgatcttacaaataaaaaaatattattttctaaaaactatgagaananttccaaaaataatttgaataaactactagaaaaccaagatccaaaactagatgatggcttagataaaaaatctttatttgaagacattttcacatttgatcaacagccaagagataaagatagtgtgagattaagtgcatctacaattgaagagttatttaaatcaacaaattataatttagaagatgtaagaaaaaataaattagtaaaaccgatttctttaacattattaccggcagagattactaaaatagaaaatgctaaaaaaagaaaagagttatttatccaaattattttaccattagtcattgaagaaaataataatattaaatctgaccgtaataaactttttactattctaaataaaagtaaaaatactaaagcagaacaaaattggctgaactcaaaatttaaacaatatggagttgt

SEQ ID NO: 128 - DNA, 4000 bp, Escherichia coli
  misc_feature (92)..(92): n is a, c, g, or t
  misc_feature (1153)..(1153): n is a, c, g, or t
  misc_feature (1182)..(1182): n is a, c, g, or t
  misc_feature (1187)..(1188): n is a, c, g, or t
  misc_feature (1190)..(1190): n is a, c, g, or t
  misc_feature (1930)..(1930): n is a, c, g, or t
  misc_feature (1948)..(1949): n is a, c, g, or t
  misc_feature (1957)..(1957): n is a, c, g, or t
  misc_feature (1963)..(1963): n is a, c, g, or t
  misc_feature (1982)..(1982): n is a, c, g, or t
  misc_feature (1984)..(1984): n is a, c, g, or t
  misc_feature (1987)..(1987): n is a, c, g, or t
  misc_feature (1999)..(1999): n is a, c, g, or t
  misc_feature (2005)..(2005): n is a, c, g, or t
cgcttgaccgagtaggccgcacggctgaaagcaatgcaccaccaacaaaggaaggtgtttcccttccctgctatccacggcggggataaatncaagattgctgataccgaagcattgcccgcgggcatggcagaggttacgcacggcaaggagttttttaaccatgaacgactttgaaaaagtctggaattttgaaagcctctaccgcgcctatatgaaggcgcggcggggcaaacgctggaagggagcggcggcgaagtttgaagttaatttgctggaagctcttaaccttttaagcgaacagttgaaaagcaaaacgtacaggctttcgccatacaacacgttcaaggtgtacgaaccaaaagaacgcgttgttatgtcgaacagctacaaagacaaggtagtgcaacatgcactttgcgacaacgttttgcaaccgcgcgtcgcgccgtcgttcatcaaagacaactacgcgtcgcaagtgggaaaaggaacgcatttcgggcttgatcggctggaagagttcatgcgccgcttctaccgcaaacacggcgttgacggctgggtgttgaagtgcgacatacgcaaatacttctattccatccagcacgacaccttaaagggcttgatccggaaatatattgacgatcccgaatgcctttggttgctggacatgataattgacagcaccgaaggcaacgtaggaattccgatcggcaatcagtcttcgcagattttcgccctgctttacctttccccgctggatcatttcatcaaggaaaaattgggcgtgaagttctacggtcgatatatggacgatttttatttgatccacgaagaccgcgaatatttgcgccattgctggaaggagattgaagagcatgtaaacaaaatcgggcttgcgctgaacgagaaaacgaacatatacccgttgaagaacggaattgattttttgggctttcacacgtacatttcggaaacgggcgcggtgatccgcaaggtgcgccggaaatcgaagaacaacgtgcgccgcaagttgaagaaaatgcggggcttgttggaggcgggacggatcacgccggaaacggtggaacagtcatataaaagctggcgcggccacgcgtcgaagggaaattgccatcaccttatccgnaacatggatcaatattacaatcaactatncgggnngnccgccgccgttgcgcagaagcgcggcggcggttctgcttcacaaaaggaggaacgcagataatggctaaatctttaagcacgctggccgttggcgcaacgtttgaagttcccgtaaaagcggcgtatcaatcgcttttgggcgcaaccgtcgttttcaaaatggccgacaagaaccattcgggttatccgtctaattcggtgacgctcatttgtgacaaaatcccgattgtgcttgctttcgacgcgaaagagccgagcaacagcaacgcagatcggaaaaactacggcaacaaccgctattcctatgcgaacgtgcttcaatggctgaacagcaacgccacggcggggaattggtacagcgcgaagcatagcgcggatcaatccccttcttccgcgtcttacgtgtcaaacaatccgtattcaagcaaggcgggtttccttgcaatgcttgatgataatttcgttgcggcattgctgaatacaacggtgacggtggcaaaaaacaccgtcacggacggcgggagctatgaaaccgtcaccgcaaaaatgcaccttccttctactacggaagtagggcttgcgaacgaaaacagcattgcagaaggcgcgaagctggcgttgttcagcgacaacacaagccgacttgcttaccctacggcgcaatgcgtgtcgaacagcgactatacaaacagcagtttcaacgcttcggcggcgtggtattactggcttcgcacgccgnattccggctattcgtacnncgtgcgcnatgtcnattcttcgggcgcgttgancnacnacaacgcgtacnacggcnataggggcgtgcgcccgctttgtaatctatcatcttctatcttggtatctgacaccacgaatgcaaacggcaactacgaatttcaatggaacgaagccccgtccacgccgtccggaatttccgtgccgtccagttgttacagcacgcagaatattttggtgtcgtggggagcttccaccgatccggacggcgacgaaatcacttacgttctggaacggtcgtacaacaacggaagctatgcgcaagtggcggcaaccgcggggcggtcgtttacggaagtggtgtccacaagctggaatacggttcgttaccgcgtaaaggcgcgtgacagcttcggcaatgaaagcgcgtatattacttccagcgaagcggcggtgatccacaatcagccgcccgccatttccggacagaacgccgatcttggcacgaagcgcgaaggcttttcccatgcgtacaccgtgaccgatccggacggcgacgcggtgacggtggttgaagcggtggatggaaagaccttgcggagctacacgcctacgcttggacagtcaaataatttgacgctggcaggaaacgacttcaccgccctttcaaacgaggcgcacacgatcaccattacggcgacggacagcgcgggcaattcggcggttcgcacgctgacttttacaaaggcaatcagcggttttgtaatctaccttgaaacgccgcttgaagcggaggcgcagccgaagcgggcgaacattgttgtaacgcgcggcattcccgcgggcggcacgttcaaggttgaggcgacgaacaatccgtttgatcctacgcccgtttgggaggattgcacgaacgcggttgtgcagggcgtggcgcacgtcttcgagaacacggaaaacgccgcggtgcaattcggcttgaacgcccgcgtgacggtggagcgcggcgacgctatttccgaatgctgggtgtcttcgattgggggtaattttgaatgagcgtaacacataggccggacagaccggacaaaacggaagagctgacaaaggaagttgagagcgtaaaggcggcgggcgaaagcaccgccgctttgctttccctttccttcaaagcgcagatcgtacaggatcgcgcggcgggaacgaacgcaatttctgatgaaatgatccttgcttcaacggcggtcgttgaatacgacgacttcaaggacaaccacgcctataacaccgtgggcgaaatcatcaaatcggacgggctgtattttgagatcgtcgcgccgcacacgtccaacgccgccgcttatccggtagcaacaacgttcgcgtattaccgccttgtggagctgacgcacacggggacgcttgatgatccgatcccatatccggaaaccgcgggcgtgctggtaaacgtgaagaacgggttgtattacagctataaaggcgcggtttatctggcgaagctggatatgccgaattgcgtatacccgcccgacacggcgggtatgtggcaatgggaacaagtgtaaaggcggtgaaagcatggaacagattttaacggcaatttccgtcgttagtacaatttgcgcaatcgtcttcggctacgccgcattttcccgcaaccgaacaaaggacaccgaagacgaagtgaagcgggacacaacggttttgtctgaaatcggctatatcaaaagcggcgttgatgatattaaggcagaacagcgcgaacagcgaaagacaaataccgaatttgtgtcgcggctgacggcggttgaagcgtccgcgaagcaggcgcacaagcgtattgacacgctggaaggacacacaacgcgggaataacgaagggagcgaaagacaatggcagttatgaaagcaagcgaattcgtgaagaagctgaaagatgttgcgcagaattacaaaacactttatgtcatggggtgcttcggcgcgccgctgaacggatcgaacgtcacaaggtattgcacgaaccatagctacaacaaggacgcaacgcgaa

SEQ ID NO: 129 - DNA, 4000 bp, Escherichia coli
  misc_feature (1992)..(1992): n is a, c, g, or t
  misc_feature (2121)..(2121): n is a, c, g, or t
  misc_feature (2758)..(2758): n is a, c, g, or t
  misc_feature (2788)..(2788): n is a, c, g, or t
  misc_feature (2797)..(2797): n is a, c, g, or t
  misc_feature (2800)..(2800): n is a, c, g, or t
  misc_feature (2806)..(2806): n is a, c, g, or t
  misc_feature (2808)..(2808): n is a, c, g, or t
  misc_feature (2812)..(2812): n is a, c, g, or t
  misc_feature (2817)..(2817): n is a, c, g, or t
  misc_feature (2820)..(2820): n is a, c, g, or t
  misc_feature (2822)..(2823): n is a, c, g, or t
  misc_feature (2827)..(2827): n is a, c, g, or t
  misc_feature (2829)..(2829): n is a, c, g, or t
  misc_feature (2831)..(2831): n is a, c, g, or t
  misc_feature (2844)..(2844): n is a, c, g, or t
  misc_feature (2848)..(2848): n is a, c, g, or t
  misc_feature (2850)..(2851): n is a, c, g, or t
  misc_feature (2853)..(2854): n is a, c, g, or t
  misc_feature (2856)..(2857): n is a, c, g, or t
  misc_feature (2859)..(2860): n is a, c, g, or t
  misc_feature (2862)..(2862): n is a, c, g, or t
  misc_feature (2865)..(2865): n is a, c, g, or t
  misc_feature (2867)..(2867): n is a, c, g, or t
  misc_feature (2869)..(2874): n is a, c, g, or t
  misc_feature (2876)..(2877): n is a, c, g, or t
  misc_feature (2879)..(2879): n is a, c, g, or t
  misc_feature (2883)..(2884): n is a, c, g, or t
  misc_feature (2887)..(2891): n is a, c, g, or t
  misc_feature (2893)..(2896): n is a, c, g, or t
  misc_feature (2900)..(2900): n is a, c, g, or t
  misc_feature (2903)..(2904): n is a, c, g, or t
  misc_feature (2907)..(2909): n is a, c, g, or t
  misc_feature (2913)..(2915): n is a, c, g, or t
  misc_feature (2917)..(2920): n is a, c, g, or t
  misc_feature (2922)..(2923): n is a, c, g, or t
  misc_feature (2925)..(2926): n is a, c, g, or t
  misc_feature (2928)..(2928): n is a, c, g, or t
  misc_feature (2931)..(2931): n is a, c, g, or t
  misc_feature (2933)..(2943): n is a, c, g, or t
  misc_feature (2945)..(2953): n is a, c, g, or t
  misc_feature (2955)..(2962): n is a, c, g, or t
  misc_feature (2965)..(2967): n is a, c, g, or t
  misc_feature (2969)..(2974): n is a, c, g, or t
  misc_feature (2976)..(2976): n is a, c, g, or t
  misc_feature (2978)..(3004): n is a, c, g, or t
  misc_feature (3006)..(3024): n is a, c, g, or t
  misc_feature (3026)..(3043): n is a, c, g, or t
  misc_feature (3045)..(3048): n is a, c, g, or t
  misc_feature (3050)..(3058): n is a, c, g, or t
  misc_feature (3060)..(3062): n is a, c, g, or t
  misc_feature (3064)..(3071): n is a, c, g, or t
  misc_feature (3073)..(3073): n is a, c, g, or t
  misc_feature (3075)..(3075): n is a, c, g, or t
  misc_feature (3077)..(3089): n is a, c, g, or t
  misc_feature (3091)..(3091): n is a, c, g, or t
  misc_feature (3094)..(3096): n is a, c, g, or t
  misc_feature (3098)..(3103): n is a, c, g, or t
  misc_feature (3105)..(3106): n is a, c, g, or t
  misc_feature (3108)..(3108): n is a, c, g, or t
  misc_feature (3112)..(3120): n is a, c, g, or t
  misc_feature (3123)..(3127): n is a, c, g, or t
  misc_feature (3130)..(3141): n is a, c, g, or t
  misc_feature (3144)..(3147): n is a, c, g, or t
  misc_feature (3149)..(3150): n is a, c, g, or t
  misc_feature (3154)..(3156): n is a, c, g, or t
  misc_feature (3158)..(3160): n is a, c, g, or t
  misc_feature (3162)..(3162): n is a, c, g, or t
  misc_feature (3164)..(3164): n is a, c, g, or t
  misc_feature (3166)..(3166): n is a, c, g, or t
  misc_feature (3168)..(3169): n is a, c, g, or t
  misc_feature (3171)..(3174): n is a, c, g, or t
  misc_feature (3176)..(3178): n is a, c, g, or t
  misc_feature (3181)..(3184): n is a, c, g, or t
  misc_feature (3186)..(3192): n is a, c, g, or t
  misc_feature (3194)..(3195): n is a, c, g, or t
  misc_feature (3197)..(3197): n is a, c, g, or t
  misc_feature (3199)..(3200): n is a, c, g, or t
  misc_feature (3206)..(3206): n is a, c, g, or t
  misc_feature (3208)..(3208): n is a, c, g, or t
  misc_feature (3210)..(3212): n is a, c, g, or t
  misc_feature (3217)..(3217): n is a, c, g, or t
  misc_feature (3225)..(3228): n is a, c, g, or t
  misc_feature (3230)..(3233): n is a, c, g, or t
  misc_feature (3239)..(3239): n is a, c, g, or t
  misc_feature (3242)..(3243): n is a, c, g, or t
  misc_feature (3248)..(3248): n is a, c, g, or t
  misc_feature (3251)..(3251): n is a, c, g, or t
  misc_feature (3257)..(3261): n is a, c, g, or t
  misc_feature (3263)..(3263): n is a, c, g, or t
  misc_feature (3275)..(3275): n is a, c, g, or t
  misc_feature (3277)..(3279): n is a, c, g, or t
  misc_feature (3281)..(3282): n is a, c, g, or t
  misc_feature (3286)..(3286): n is a, c, g, or t
  misc_feature (3288)..(3288): n is a, c, g, or t
  misc_feature (3290)..(3291): n is a, c, g, or t
  misc_feature (3294)..(3294): n is a, c, g, or t
  misc_feature (3297)..(3299): n is a, c, g, or t
  misc_feature (3302)..(3303): n is a, c, g, or t
  misc_feature (3311)..(3312): n is a, c, g, or t
  misc_feature (3317)..(3317): n is a, c, g, or t
  misc_feature (3326)..(3326): n is a, c, g, or t
  misc_feature (3330)..(3330): n is a, c, g, or t
  misc_feature (3333)..(3333): n is a, c, g, or t
  misc_feature (3335)..(3337): n is a, c, g, or t
  misc_feature (3339)..(3339): n is a, c, g, or t
  misc_feature (3341)..(3341): n is a, c, g, or t
  misc_feature (3344)..(3350): n is a, c, g, or t
  misc_feature (3352)..(3359): n is a, c, g, or t
  misc_feature (3361)..(3361): n is a, c, g, or t
  misc_feature (3363)..(3365): n is a, c, g, or t
  misc_feature (3367)..(3373): n is a, c, g, or t
  misc_feature (3375)..(3376): n is a, c, g, or t
  misc_feature (3378)..(3382): n is a, c, g, or t
  misc_feature (3384)..(3385): n is a, c, g, or t
  misc_feature (3387)..(3387): n is a, c, g, or t
  misc_feature (3390)..(3390): n is a, c, g, or t
  misc_feature (3392)..(3396): n is a, c, g, or t
  misc_feature (3398)..(3399): n is a, c, g, or t
  misc_feature (3401)..(3402): n is a, c, g, or t
  misc_feature (3404)..(3408): n is a, c, g, or t
  misc_feature (3411)..(3413): n is a, c, g, or t
  misc_feature (3416)..(3420): n is a, c, g, or t
  misc_feature (3423)..(3424): n is a, c, g, or t
  misc_feature (3426)..(3433): n is a, c, g, or t
  misc_feature (3435)..(3438): n is a, c, g, or t
  misc_feature (3440)..(3443): n is a, c, g, or t
  misc_feature (3445)..(3445): n is a, c, g, or t
  misc_feature (3449)..(3449): n is a, c, g, or t
  misc_feature (3451)..(3454): n is a, c, g, or t
  misc_feature (3456)..(3467): n is a, c, g, or t
  misc_feature (3469)..(3469): n is a, c, g, or t
  misc_feature (3472)..(3478): n is a, c, g, or t
  misc_feature (3480)..(3484): n is a, c, g, or t
  misc_feature (3486)..(3488): n is a, c, g, or t
  misc_feature (3490)..(3490): n is a, c, g, or t
  misc_feature (3492)..(3496): n is a, c, g, or t
  misc_feature (3498)..(3499): n is a, c, g, or t
  misc_feature (3501)..(3503): n is a, c, g, or t
  misc_feature (3505)..(3506): n is a, c, g, or t
  misc_feature (3508)..(3514): n is a, c, g, or t
  misc_feature (3516)..(3523): n is a, c, g, or t
  misc_feature (3525)..(3525): n is a, c, g, or t
  misc_feature (3527)..(3527): n is a, c, g, or t
  misc_feature (3529)..(3532): n is a, c, g, or t
  misc_feature (3534)..(3546): n is a, c, g, or t
  misc_feature (3549)..(3549): n is a, c, g, or t
  misc_feature (3552)..(3556): n is a, c, g, or t
  misc_feature (3560)..(3560): n is a, c, g, or t
  misc_feature (3564)..(3565): n is a, c, g, or t
  misc_feature (3567)..(3568): n is a, c, g, or t
  misc_feature (3571)..(3575): n is a, c, g, or t
  misc_feature (3577)..(3577): n is a, c, g, or t
  misc_feature (3579)..(3579): n is a, c, g, or t
  misc_feature (3582)..(3584): n is a, c, g, or t
  misc_feature (3586)..(3589): n is a, c, g, or t
  misc_feature (3591)..(3599): n is a, c, g, or t
  misc_feature (3601)..(3602): n is a, c, g, or t
  misc_feature (3604)..(3608): n is a, c, g, or t
  misc_feature (3610)..(3615): n is a, c, g, or t
  misc_feature (3618)..(3623): n is a, c, g, or t
  misc_feature (3625)..(3625): n is a, c, g, or t
  misc_feature (3627)..(3633): n is a, c, g, or t
  misc_feature (3637)..(3638): n is a, c, g, or t
  misc_feature (3640)..(3643): n is a, c, g, or t
  misc_feature (3645)..(3648): n is a, c, g, or t
  misc_feature (3650)..(3658): n is a, c, g, or t
  misc_feature (3660)..(3660): n is a, c, g, or t
  misc_feature (3663)..(3664): n is a, c, g, or t
  misc_feature (3666)..(3666): n is a, c, g, or t
gcaccgagatgctgttgtggtggcccgccacgtcgagttccagaaacggaaagctgacggcggcgatcatcaaaataaacgcagagatcgcgaggcttaaaactgttgcgagggccgttggccgttctgtggcgatcaccccgccacagcgtttacaatgggcgcgcacattctcgggcaacaccgacgcacggtgcagcgtatcgcaatgcggacaagccacaagctgagacaacgggggcaaatcgcttggcagcacgacatcctcagggttcaatccgttcgcagtgaacgtttgggcatgcatagccctaagaagtcgaagttgctacggcaaatttgggttttaactccgcggttgaccatccagcgtcaggtcgcaaggcagcgcgaaatcaatgaccgcctgcgcgttaggaatgtcattgccttccgcacgccgggttgccaccagacggctatggttgagcgatagccagcgctgaataagccgcgcacgcagttcgggcagcgggacatccagccgcgccgtaatatcccaaagaggcgcaagatcacgccatccctcggcgtcaaacatcagataattaccttcaacaatcaccacaggcagatcggcagacacatgcattgcgcctgcaatcgacagatcgcgggggcggtcaaagaggggcacatatacatcaactccgctctttattgccttgataagacgtgtgaatccaccaacgtcaaatgtctctggcgcacctttgcgtgccatcaaattgaggtcttcaaggatcgcattatcgaggtggaacccatccattggaacaacaatacaagggcacttttgtaaagaaatccgccgcgcgacctctttggctaaggttgactttccactgcccggagcgccggcgattgcaacgatgagcctgccgccctccgcccgcttttcatggatgagagatgcaagcgcatcaacgtgatctgttaaactggacaatttttgcgccctttcacggccttttttgaaactataatcgcaaatgaaaaatcggcaattcaattcaaaacaaagtccaaaaacggtctccattgttgctctggcaatcggggctcgctcaacataggttactccacattcttgaaggggctgcagaatgacgggatttggctggctgttacggctttggcggttgctttatgcgacgtggctcttgtcgggtcgcaagcaaaccagcttgatcgcggcaggcgttgccttctttgggatgtttgccgtctttccagctatcgctgcggtcatcgcactctttgggcttgtggctgatcctgcggttgtgggcacgcagttggagttgttgcaaaacataatccctgaggacgcctattcgcttttctccagccagatcaatcgattgctgcgcgcgcagacccatacgttgggttgggcgacatttgtgtctattgtcttggcgttgtggtcgtcgcgggcaggggtggcggctttgatgggcgggcttgatgccattgcaggcggcatgccgcgtaacgggatttggcacgcggtcgtggcgttttggctgacgatatgtctggtctcgctggcgattgtcgctctctttgcggtagttgtaacgccgatcattttggcgttcctgccgatcgctgcatcaacagcgtggatgttagaggcattgcgctggcttatcgcgctgacctcactcttgctcgcgcttggcttgttgtaccgctttggccctgcgcgtggtgaggggcgcatccgctggtttacagtcggagctgtcgcagtggtcattttgtgggtcgcagcgtcggttggcctctcttattacctcacaaatttcggcgcctacaatgaagtctacggatccatcggcgcggtaattggcttgatgctctggctctatgtcagcgcctatctggtattgctcggggcagcgctcaacgaacaggttcacagaaataccgctggaaaatcaagcncttaaataacgtgactctcctgcaacaaccctagaaaaatcgtgattgtggcggcaatgcggcgcttaaatgacgtttgaaagggcattttcccactagaatttgagcaaatccccagatagtgtggtntcaattaaagtaagcacacgtccatgatggcggtgcaatgaggcggagttagtattatatcagcgattgagttcgttgtcagcgatggcgcgggcgcagttacacgtgggtcgattgcaggagcaagcggcgacaattctattatagtcggtgcgggtcaggatatctcgctgaacctcgatagaaataacattctttcctatgtgcgtcagggtcaggccttgcaggttactttggttgatggccggatggtcacaatcgaagggttctttagtcctgagggcgcgattgagaacgacttgatgatctctgcaaatggctcgctttccaaggttgatttgaccgcgggtgagggaaacctcctttacgcgcaatatgtagacgcggactcctttggtaagtggagccccgacgatgatctctacttcgtgcgtggctcggaggttatggttgccggcgtagaggctgctgacgcagaagcgggtatgttgttcacgccacttctgggtggtcttggtggtttgggtggtcttggcgcggggcggcagcggctgttgctgcggcggctatcgttgccggttctggtaaaggcgacggtgacccaaccgatccagttgacccaaccgatcctgttganccaaccgatcctactgacccaaccgatccnactgacccnacngatccngntganccagntgntnntgcnancnctggtggcgttgngagngnngnngnngnngnaantngnnnnnntnntnaagnnggnnnnnannnngaangtnntgnnncaannngnnnnanngnnanaancnnnnnnnnnnntnnnnnnnnngnnnnnnnngtnnntnnnnnngntnnnnnnnnnnnnnnnnnnnnnnnnnnnannnnnnnnnnnnnnnnnnngnnnnnnnnnnnnnnnnnnannnnannnnnnnnnannncnnnnnnnnangncnnnnnnnnnnnnnangcnnnannnnnngnnanggtnnnnnnnnncgnnnnngtnnnnnnnnnnnntcnnnncnntgannncnnncncntngnngnnnncnnngannnngnnnnnnncnncngnngtacangnannngatangctggtgnnnntnnnnttgagngtnncgacngtnacgacnnnnngnctggtgagtctngnnnanntggncngnntgntcnnnctnntgggcagnncgcgnacggcttgnacgnttntnnngntnatnnnnnnncnnnnnnnnancnnngnnnnnnngnntnnnnntnngncgntnnnnntnncnncnnnnncannngcnnnnngcnngnnnnnnnngnnnntnnnngngacngnnnngnnnnnnnnnnnnancannnnnnngnnnnncnnngntnnnnntnncnnnannannnnnnncnnnnnnnntnanannnngnnnnnnnnnnnnnacngtnnnnncaancgcnnanngcnnnnngncngcnnnannnngnnnnnnnnngnngnnnnnannnnnnctnnnnnngncnnnnnnngcgnntnnnncnnnngnnnnnnnnnanacnncnatggcgaatggtccgcaacatttagcgcatctgaggtgccaacaggtacgcttgatgtgcctgtgactgcgatttccactgatgcagtgggcaacactgcaacggcatctggcacggtccacattgatacagagctcagcactgcgatcgacacctctggtgtagaagcggacggcattgtgaacgctgtagagcatgctgatggcgtcacactgaatggtactgctgatgcgggcgctcaggtcactgttacatttggcacaggcacgcgcgttgtgacggctacggcgaatggcacatggtcggctgattgggcgacgtccgaagtgccaac

SEQ ID NO: 130 - DNA, 4000 bp, Escherichia coli
  misc_feature (1)..(4): n is a, c, g, or t
  misc_feature (6)..(12): n is a, c, g, or t
  misc_feature (14)..(15): n is a, c, g, or t
  misc_feature (17)..(20): n is a, c, g, or t
  misc_feature (22)..(27): n is a, c, g, or t
  misc_feature (29)..(31): n is a, c, g, or t
  misc_feature (33)..(37): n is a, c, g, or t
  misc_feature (39)..(39): n is a, c, g, or t
  misc_feature (41)..(51): n is a, c, g, or t
  misc_feature (53)..(56): n is a, c, g, or t
  misc_feature (61)..(61): n is a, c, g, or t
  misc_feature (63)..(87): n is a, c, g, or t
  misc_feature (89)..(89): n is a, c, g, or t
  misc_feature (91)..(94): n is a, c, g, or t
  misc_feature (96)..(103): n is a, c, g, or t
  misc_feature (105)..(108): n is a, c, g, or t
  misc_feature (111)..(111): n is a, c, g, or t
  misc_feature (113)..(114): n is a, c, g, or t
  misc_feature (116)..(124): n is a, c, g, or t
  misc_feature (126)..(144): n is a, c, g, or t
  misc_feature (146)..(147): n is a, c, g, or t
  misc_feature (149)..(153): n is a, c, g, or t
  misc_feature (155)..(164): n is a, c, g, or t
  misc_feature (166)..(170): n is a, c, g, or t
  misc_feature (172)..(174): n is a, c, g, or t
  misc_feature (176)..(177): n is a, c, g, or t
  misc_feature (179)..(198): n is a, c, g, or t
  misc_feature (200)..(208): n is a, c, g, or t
  misc_feature (210)..(216): n is a, c, g, or t
  misc_feature (218)..(230): n is a, c, g, or t
  misc_feature (233)..(233): n is a, c, g, or t
  misc_feature (235)..(236): n is a, c, g, or t
  misc_feature (239)..(244): n is a, c, g, or t
  misc_feature (246)..(248): n is a, c, g, or t
  misc_feature (250)..(253): n is a, c, g, or t
  misc_feature (257)..(268): n is a, c, g, or t
  misc_feature (270)..(274): n is a, c, g, or t
  misc_feature (276)..(282): n is a, c, g, or t
  misc_feature (284)..(288): n is a, c, g, or t
  misc_feature (290)..(294): n is a, c, g, or t
  misc_feature (296)..(302): n is a, c, g, or t
  misc_feature (304)..(320): n is a, c, g, or t
  misc_feature (322)..(324): n is a, c, g, or t
  misc_feature (326)..(334): n is a, c, g, or t
  misc_feature (336)..(337): n is a, c, g, or t
  misc_feature (339)..(342): n is a, c, g, or t
  misc_feature (345)..(347): n is a, c, g, or t
  misc_feature (349)..(354): n is a, c, g, or t
  misc_feature (356)..(356): n is a, c, g, or t
  misc_feature (361)..(364): n is a, c, g, or t
  misc_feature (366)..(368): n is a, c, g, or t
  misc_feature (370)..(373): n is a, c, g, or t
  misc_feature (375)..(377): n is a, c, g, or t
  misc_feature (379)..(388): n is a, c, g, or t
  misc_feature (391)..(394): n is a, c, g, or t
  misc_feature (396)..(396): n is a, c, g, or t
  misc_feature (398)..(398): n is a, c, g, or t
  misc_feature (401)..(403): n is a, c, g, or t
  misc_feature (405)..(408): n is a, c, g, or t
  misc_feature (410)..(411): n is a, c, g, or t
  misc_feature (413)..(413): n is a, c, g, or t
  misc_feature (415)..(418): n is a, c, g, or t
  misc_feature (421)..(447): n is a, c, g, or t
  misc_feature (449)..(450): n is a, c, g, or t
  misc_feature (452)..(457): n is a, c, g, or t
  misc_feature (459)..(462): n is a, c, g, or t
  misc_feature (464)..(464): n is a, c, g, or t
  misc_feature (466)..(472): n is a, c, g, or t
  misc_feature (475)..(478): n is a, c, g, or t
  misc_feature (480)..(481): n is a, c, g, or t
  misc_feature (484)..(499): n is a, c, g, or t
  misc_feature (501)..(504): n is a, c, g, or t
  misc_feature (508)..(508): n is a, c, g, or t
  misc_feature (510)..(511): n is a, c, g, or t
  misc_feature (514)..(534): n is a, c, g, or t
  misc_feature (536)..(537): n is a, c, g, or t
  misc_feature (539)..(539): n is a, c, g, or t
  misc_feature (541)..(543): n is a, c, g, or t
  misc_feature (546)..(546): n is a, c, g, or t
  misc_feature (549)..(558): n is a, c, g, or t
  misc_feature (561)..(567): n is a, c, g, or t
  misc_feature (570)..(572): n is a, c, g, or t
  misc_feature (574)..(575): n is a, c, g, or t
  misc_feature (578)..(582): n is a, c, g, or t
  misc_feature (585)..(614): n is a, c, g, or t
  misc_feature (616)..(619): n is a, c, g, or t
  misc_feature (622)..(626): n is a, c, g, or t
  misc_feature (628)..(637): n is a, c, g, or t
  misc_feature (639)..(649): n is a, c, g, or t
  misc_feature (651)..(651): n is a, c, g, or t
  misc_feature (656)..(656): n is a, c, g, or t
  misc_feature (661)..(665): n is a, c, g, or t
  misc_feature (668)..(668): n is a, c, g, or t
  misc_feature (670)..(673): n is a, c, g, or t
  misc_feature (676)..(677): n is a, c, g, or t
  misc_feature (703)..(703): n is a, c, g, or t
  misc_feature (710)..(711): n is a, c, g, or t
  misc_feature (718)..(719): n is a, c, g, or t
  misc_feature (721)..(721): n is a, c, g, or t
  misc_feature (724)..(725): n is a, c, g, or t
  misc_feature (727)..(728): n is a, c, g, or t
  misc_feature (730)..(730): n is a, c, g, or t
  misc_feature (732)..(734): n is a, c, g, or t
  misc_feature (736)..(736): n is a, c, g, or t
  misc_feature (738)..(738): n is a, c, g, or t
  misc_feature (741)..(743): n is a, c, g, or t
  misc_feature (746)..(750): n is a, c, g, or t
  misc_feature (752)..(755): n is a, c, g, or t
  misc_feature (757)..(758): n is a, c, g, or t
  misc_feature (761)..(762): n is a, c, g, or t
  misc_feature (764)..(766): n is a, c, g, or t
  misc_feature (768)..(781): n is a, c, g, or t
  misc_feature (784)..(799): n is a, c, g, or t
  misc_feature (801)..(805): n is a, c, g, or t
  misc_feature (807)..(809): n is a, c, g, or t
  misc_feature (812)..(813): n is a, c, g, or t
  misc_feature (816)..(816): n is a, c, g, or t
  misc_feature (830)..(837): n is a, c, g, or t
  misc_feature (839)..(839): n is a, c, g, or t
  misc_feature (842)..(846): n is a, c, g, or t
  misc_feature (848)..(851): n is a, c, g, or t
  misc_feature (853)..(855): n is a, c, g, or t
  misc_feature (858)..(858): n is a, c, g, or t
  misc_feature (860)..(865): n is a, c, g, or t
  misc_feature (868)..(868): n is a, c, g, or t
  misc_feature (871)..(875): n is a, c, g, or t
  misc_feature (877)..(878): n is a, c, g, or t
  misc_feature (880)..(881): n is a, c, g, or t
  misc_feature (1533)..(1540): n is a, c, g, or t
  misc_feature (1544)..(1545): n is a, c, g, or t
  misc_feature (1985)..(1985): n is a, c, g, or t
  misc_feature (1989)..(1989): n is a, c, g, or t
nnnnannnnnnnannannnntnnnnnntnnnannnnnantnnnnnnnnnnntnnnntttanannnnnnnnnnnnnnnnnnnnnnnnntnannnntnnnnnnnnannnnaantnntnnnnnnnnntnnnnnnnnnnnnnnnnnnntnntnnnnntnnnnnnnnnntnnnnntnnntnnannnnnnnnnnnnnnnnnnnntnnnnnnnnnannnnnnnannnnnnnnnnnnntancnnttnnnnnnannnannnnaaannnnnnnnnnnntnnnnntnnnnnnnannnnnannnnntnnnnnnntnnnnnnnnnnnnnnnnnannntnnnnnnnnntnnannnnaannnannnnnntnatttnnnntnnnannnntnnnannnnnnnnnnttnnnntnantannntnnnntnnantnnnnttnnnnnnnnnnnnnnnnnnnnnnnnnnnanntnnnnnntnnnnanannnnnnnttnnnntnnttnnnnnnnnnnnnnnnntnnnntttntnnttnnnnnnnnnnnnnnnnnnnnntnntntnnnatnttnnnnnnnnnnaannnnnnnttnnnannttnnnnnttnnnnnnnnnnnnnnnnnnnnnnnnnnnnnntnnnnttnnnnntnnnnnnnnnntnnnnnnnnnnnanttttnttttnnnnnttntnnnnttnntttttttttttttttttttttttttnttttttnnttttttnnanttnntnnantnnntntnttnnnacnnnnnannnntnnttnnannntnnnnnnnnnnnnnnttnnnnnnnnnnnnnnnntnnnnntnnnttnnatntttttttttttttnnnnnnnnanaannnnntnnnntnnnatnannnnnntanatnnnnntnntnnttttttttttttttttttttttttttttttttttttaatatcgcctcctcgatctacatctgttataaattataaattcctcttttccattgtatataattttatattctttggtatactataaatatttaaatatattcattaccatatgccagtctgagattgttggattttcagcacttcttgacactttattaactgtaaaggcaatatctgaacttgaacttctggctaaagtaaattagggaccttaatgtactttaataaattatttttattaaatggttcattattttcatttttgctatctccgctacctagtgtctttgttttcttaacattattaactctaaatcttactagtatattttctatgtaactaatttaagaaatggattgtcaaattcaacattaataaattaagttaaataattatcaataaattttaaataaaaaaattttgttttaaaatatatatatttattttatttaaaaaaaaatattataattttcgattatttaatttttataaataaaaaaaattttttattaatatattgtattatattatttgtattacattaatactaaatatatatactttattctatatttaatagtacaaatgagctttcaatataaattcaatttnnnnnnnntttnnaaaaaaaaaaaaaattatatacaatctggttgtatctatatttatattttaaataattataaaattaataataatgttttttaaaaaaaaataatttattttacttaatttacatctattaatgtaaaaaggaactaatactcacaaatccattactacgagaactatccctcatatattcacaataaatagaatattggattatttctataaattactactcagatacactttgctcttggtactaaaatttatgttaatattgcttcacctgtaaaaattcttccatttttttagatttttagatattcatcatctgtataaataaagatttaattctaataaatataattgttgttgataaatagaagatattgttgtagaaatgaatataaataaaatggaattataattaaactaatgtttttttttattatttnaganattttaaaaaaaaaaaaaaaaaaaggcttttataaaaatacattaacaaataatagtataatgtttatggaaaatattttttataattattaataatacagtatctaaatttttaatttcattttttttgtataaaattatttattttaaataaaagaatatattaatttaaaaatttaataatattaaatataattatgaaattgtaatttttttctaaaaaaaaatatatatatatatattttaaattaatttttgataatattttattaattattataataaaattttaaaatctcttatttaaaataggtattaggattagtttttaactttttaatttttattaaaattaatcaaatagttaatatattaattatgtatatacaatattacatgaaatcaatactccatgattttaagtaaattaaaaaaaattttttgaactgttaaatgagaaattttaaaacaaagatttttaaatagaatttctagtacaatatgatagtaatttaaattattttaaaattattaataattaataattagtaaatattaaattgtgtagtaaatataaagttatatagttttttttaacaattaagttattaattattattaattattaattatttttagaatattataattagtatgtaatttttttttttttttagaattatatcattactactggtttaaaaataataaattagaattattatcattactattatttgaatataaaaagataagaagcgtttattatattgaagagtcaaaccgagttagaaaaaaatatttttatattttgataaatttcaaagaatcaagtatatcttcagagctatagtccataagctctaatgggttattagttgaactatcacagttaagagaagtggatatttcagagtcactataaatatccattacttcttgaaagcgtgggtaggggcattgttgactttagcaatgtggagatgattgaatttgtgtcctcaaaggtgggttctgtttcttttaagagttcagaaattacttttgaactcttgagacttaagtggaccaccagggttagtagatttattagtagtaagggccttagataggccgattatattaccctgttttaatgcaagggtaaagggcagaaaacctgctaaggatcgaaaggaagagatggttacttcaatggtcgagccgggagaatactatgaaatttattacaacgagtttaaattatagatgtaatacaacaaaaaacataaagaaaaacattttttttaaatttaagtttcaatttatttaaatcataaaataatatatatgtcaaaatctttgtttgctaacattctcctctcaaacttaattttttctgttttgtcaaaaattatgtttgtgaattttatcatttttggtccgataatatttttagttagagtgttgacaaacatatatttgagtgctattattttattttttaagttatctttattaaaagagaattttatattaatatggttgagttttgaatttaattcacagtttactattgttgtcatgcttgataaactgtctgtaaaaatagttatttgctttttaatgtttaataatttaattataatacttcttatccaaagtacctttttcacacattctgaagagctgatatatttagcttcctgagtctaagttgtcatagtagttttttttttttttatttagaattccaacatattgaattttttcccataagaattatttgtcctgaagttgactttttatcttttaatatctcctcttaggtcgagattgtaaaagcaatggtttcgcctattccgttgtaaattattttattgtttttagtagagtgtaagtatttgaatatatttgttacccttttccaatcagtgatggtgggttcttgtcttattaaaacttgagaagtttctttaggattgttaatgtatttacctttgtctgtagtattattgaagcaataatttgt

SEQ ID NO: 131 - DNA, 4000 bp, Escherichia coli
  misc_feature (1986)..(1986): n is a, c, g, or t
aacgagcccatgttcgcctttttcccataaaacactttgtgatcgttcaaaagcgccgcgatgccgtgatcgtcggttcgtcccggatgcaacgctcgtcgactccgctccaccacctccgccttgtctgtctccttactcacgctcgaaggatcgtttaagtcctccttgagcgcgttcgcatcggagagaagctgcttcggcacgctttgcttccctcgcgtctccttcaccagcgctggatgcttcaacagcgtcccgtttggcaccgtcagctttagcctcaccggcggcgtcgctcgcacgtccaacgaccaccctccgtcttcctgcccgtgtaaaaccccatcgtccagcaacaaattcccccactgcaacagcgacatcgcgtccgtcgcgcccggtggcaactgcacgcacgcctccacgagcgctcgtcccgtgacgctctcgctcacctcgatcgcgacgtccgcgcactgcggcgtctccgcgaacaactcattcgagcgtccccgcgtgcgcgacagccactcgaccgtgagatatatcgttcccgtctcgctggctctcgagtcgtcgtcgttcgcgctcttatcgccgtcgtcgcgcgcgcgcttgcgcgacttggctttcgattgcccagccggattcgcgtcgtcgttttgacgcgcgcgcgcgcgcgcgctcagcgcggcgaacatcgagccgcgcgagggcgacggtttcgccgctcgcgccgcgggcgctcgcgatcgcgcgacgctcgccgcgcgcgggtgtgcgacttccagagggctgattactacaatcttcgggacgcgcggagagattgggaaagcgaatatctatgtatgtgacgacgcgccgtcgattcgatcgaacgccaacgcgctcggtgatgctcgcgcgtcgcgatgacgcgcgcaccgagcgaacgcgcgcgatggaaccgacgacgcgacggggcgcgctcgagactcgttcgggcggcgcttacaacccggaacgaccccagacgaccaaggcgagggagaaggaaaacgtcgccatgatggcggcccacgccacttgcacgatgaacggttcaccctcagccacttggccgaccgcctcgacgacggcggcggacgccggcgccgcggacacgatttgcgcggcgacgctcgccgcggcggcgctcagcgcaacctacgcattcaaacgcgacgtcgcgctctcgtcagtctctcgcgcacaccgcgcgcgccacggcgcatcccacgccccgttcccatcgatcccaaacctcggcgcgaccgcgatcgaggcccctcgcctcgcgtcgcgccgccgcgccgttccttatccaccgccgcgccgcgtccccccccgcccgcgcccgacgcccgcgcgcccgacgccgcgcgccgccgaatccaacgcgcgcgcgtttcctccacccatcgatcgcgcgcggtcgtcctcgtcgccctcgcgcgcgtccccccgtcgacgcctcgtcccgcgcgcgccgatcgcgacccgatcgagggctcgcgtcgcgccttcatcgccccccccgatcgcgtccgtcccgcgcccgccctctcgagcgcccgcgtccgcgcgatcaaaatcctccccatcgcgcgcgcgcgcttcgagccctccatcgacgtcgcgcgcgcctccgcgcgtccgcgcgcgcgccgccccccgatcgcgtcgtcgcgtcgcggtcgcgcgcgtcgtcctcgtcgcggtcgcaccttttgttccgtctcgacgcgcttcgcgctcggcgcggccgcgcaccgaacggtgcgttggttcttcgtcgcgcgcgcgctcgaggcgcgcgcggtgacggtcgggcgtgcggtcgcggcgtgcatcggggcgtcgtgtgcggcgcgcgcgcgtcgatcggatcgggcgccgatgcgcgcgcgcgcgccatctttttatgcgacattcttcccgccttttattcaatttaagganatacgacgccaccccggatcggacgacgcgtgacgcgttcgaagatctagggctttttgtacgtacagtacgatatacatagtcgtactcgcgcccttgaattcgggatcgatcgcgcgaggggaacgaacggcgattcgcgcgccgacgcgcgagaccgcgacgcgcgacggcggcgacgacggcgcgcgcgaccgacgcgtcgcgtcgcgacgggattcgcgcgcgatcgcgtcgattcgtcgcgacgggatcggcgcgacgcgcgcgatggcgcgcgaggacggcgcgttgacgccgcgggatacgaatcgcatcgcgcgcgacggcgacgtcgagttcgcgtgggagcacgcgaaggagaacgtgcagccggcgcgacggggacgggatgggtgcgcgctgcgggacgcgctgcgggcgacgacgcgaggcggggatcgagaggcggaggcgcgggaggcgacgagggcgaagatgtgggcggcggcgacgagggcgcggggcgcggacgacgacgcgttgggggcgtggtgcgggttgatcaagtggacggagcagacgtacgcgacgggaaacggacgggagagagagcttttgccggtgctggagcgatgcacgcgagagctgcaggaggtggaggcgtataaggaggacgcgcggtatttgcgagtgtggatcaagtacgcggattgttgcgccgagccgggggatattttcaagtttttgaaggcgaacgcgatcgggcagcgacaggcgctgtattacgaggcgtatggggcgtttttagaggttcgtcaagcgtacggggcggcgaatgagcagtacgagcgcgggattgagatgcgcgcagagccgctcgagcgcctgcgcgcgtcgtacgccgcgtttcagcatcgaatggttcgtcgaacgcagaagcgcatcgagagcggcgagatcgacgagaacgaaggagaagagatcgttcgtaactttggagacacgctcaaggcgcgatcacgaagcggagggggagtgagctctcgtagaggcgagtcgacgacgggcgcgcgccaggcgcgcggcggcttatcaggaccgacgcgcggcgcgactcaatctacaccacaagctcagacttcgaacgcgcaaggaaacgttggcggtttagacgtttacgatgacgccgaaaacggtgcgcccactcccggagaggcgacgacgacggggcgatggaaaaacttgggcgggtacaaggatgtgcgcaaggaaaacaccgcgcaggcgacgacgtgggccggtcaacgagcgacgcaaagcaaacgaaaagtgacggtgcccagcgatgagattgcggtttttgaagacactgagtgcttgaaggcgagcgacgtgaaggcagccacggcagcaacggagcgcgacgttggttcgttgcgacagcgcgttgacggtgaggtcgatttgagtcgaaatccaatgctgtaccactctggtggccagcctccgctagcgcctggcgagcgaccgaagagcaagtatcgtggattcaaacctgcgcacctacgatcggaggatggcgaggagttgtgctacgaggaaattcgagcagcagcgtgggtgcgcgccaacggtccgacgcacaagccacgtacgaccgccgaggcgctcgtcgaactagaaccgacgatggagatggatatggacgtcgatatggatggaaacgtcactgaaataagtggtgatcttccacagctcgccacgcaggcgacgcgagatcacgcgacatcactcgtgaagcccgcgaaggcggcaaaggacgatgaaatcgtctccaagcgaacgtacgtggctccaccgccacccgttggatctcgcactgggtcgtgcgcgagtgagccatcagaagctggatcggtgatttctcgcgaaaagtcgccgcaggcaaagaggccggcgttggtgaacaaggtacgcgctggcgcccgatggacggcggacgaggagggcacgcgttcggcgaaccacgatc

SEQ ID NO: 132 - DNA, 4000 bp, Escherichia coli
  misc_feature (248)..(248): n is a, c, g, or t
  misc_feature (349)..(349): n is a, c, g, or t
  misc_feature (564)..(564): n is a, c, g, or t
  misc_feature (568)..(568): n is a, c, g, or t
  misc_feature (570)..(570): n is a, c, g, or t
  misc_feature (573)..(574): n is a, c, g, or t
  misc_feature (576)..(577): n is a, c, g, or t
  misc_feature (579)..(580): n is a, c, g, or t
  misc_feature (583)..(583): n is a, c, g, or t
  misc_feature (586)..(589): n is a, c, g, or t
  misc_feature (591)..(591): n is a, c, g, or t
  misc_feature (594)..(597): n is a, c, g, or t
  misc_feature (599)..(599): n is a, c, g, or t
  misc_feature (601)..(606): n is a, c, g, or t
  misc_feature (609)..(609): n is a, c, g, or t
  misc_feature (611)..(615): n is a, c, g, or t
  misc_feature (617)..(630): n is a, c, g, or t
  misc_feature (632)..(634): n is a, c, g, or t
  misc_feature (637)..(640): n is a, c, g, or t
  misc_feature (642)..(646): n is a, c, g, or t
  misc_feature (651)..(655): n is a, c, g, or t
  misc_feature (657)..(657): n is a, c, g, or t
  misc_feature (660)..(662): n is a, c, g, or t
  misc_feature (664)..(664): n is a, c, g, or t
  misc_feature (666)..(666): n is a, c, g, or t
  misc_feature (668)..(668): n is a, c, g, or t
  misc_feature (670)..(673): n is a, c, g, or t
  misc_feature (676)..(678): n is a, c, g, or t
  misc_feature (680)..(681): n is a, c, g, or t
  misc_feature (683)..(683): n is a, c, g, or t
  misc_feature (687)..(688): n is a, c, g, or t
  misc_feature (691)..(695): n is a, c, g, or t
  misc_feature (697)..(697): n is a, c, g, or t
  misc_feature (699)..(699): n is a, c, g, or t
  misc_feature (701)..(701): n is a, c, g, or t
  misc_feature (703)..(705): n is a, c, g, or t
  misc_feature (707)..(709): n is a, c, g, or t
  misc_feature (711)..(712): n is a, c, g, or t
  misc_feature (714)..(714): n is a, c, g, or t
  misc_feature (716)..(719): n is a, c, g, or t
  misc_feature (721)..(722): n is a, c, g, or t
  misc_feature (724)..(730): n is a, c, g, or t
  misc_feature (733)..(736): n is a, c, g, or t
  misc_feature (738)..(738): n is a, c, g, or t
  misc_feature (740)..(740): n is a, c, g, or t
  misc_feature (742)..(744): n is a, c, g, or t
  misc_feature (747)..(747): n is a, c, g, or t
  misc_feature (749)..(750): n is a, c, g, or t
  misc_feature (752)..(755): n is a, c, g, or t
  misc_feature (757)..(758): n is a, c, g, or t
  misc_feature (760)..(765): n is a, c, g, or t
  misc_feature (767)..(768): n is a, c, g, or t
  misc_feature (770)..(776): n is a, c, g, or t
  misc_feature (778)..(778): n is a, c, g, or t
  misc_feature (780)..(782): n is a, c, g, or t
  misc_feature (784)..(784): n is a, c, g, or t
  misc_feature (786)..(787): n is a, c, g, or t
  misc_feature (789)..(792): n is a, c, g, or t
  misc_feature (794)..(794): n is a, c, g, or t
  misc_feature (796)..(796): n is a, c, g, or t
  misc_feature (798)..(798): n is a, c, g, or t
  misc_feature (800)..(800): n is a, c, g, or t
  misc_feature (802)..(804): n is a, c, g, or t
  misc_feature (806)..(806): n is a, c, g, or t
  misc_feature (809)..(809): n is a, c, g, or t
  misc_feature (811)..(811): n is a, c, g, or t
  misc_feature (813)..(818): n is a, c, g, or t
  misc_feature (820)..(826): n is a, c, g, or t
  misc_feature (829)..(829): n is a, c, g, or t
  misc_feature (831)..(831): n is a, c, g, or t
  misc_feature (834)..(834): n is a, c, g, or t
  misc_feature (837)..(839): n is a, c, g, or t
  misc_feature (841)..(842): n is a, c, g, or t
  misc_feature (844)..(858): n is a, c, g, or t
  misc_feature (860)..(862): n is a, c, g, or t
  misc_feature (864)..(865): n is a, c, g, or t
  misc_feature (867)..(867): n is a, c, g, or t
  misc_feature (869)..(871): n is a, c, g, or t
  misc_feature (873)..(873): n is a, c, g, or t
  misc_feature (875)..(878): n is a, c, g, or t
  misc_feature (880)..(880): n is a, c, g, or t
  misc_feature (882)..(883): n is a, c, g, or t
  misc_feature (885)..(890): n is a, c, g, or t
  misc_feature (892)..(899): n is a, c, g, or t
  misc_feature (901)..(902): n is a, c, g, or t
  misc_feature (904)..(908): n is a, c, g, or t
  misc_feature (910)..(912): n is a, c, g, or t
  misc_feature (914)..(915): n is a, c, g, or t
  misc_feature (917)..(925): n is a, c, g, or t
  misc_feature (927)..(930): n is a, c, g, or t
  misc_feature (934)..(935): n is a, c, g, or t
  misc_feature (937)..(939): n is a, c, g, or t
  misc_feature (941)..(946): n is a, c, g, or t
  misc_feature (948)..(952): n is a, c, g, or t
  misc_feature (954)..(954): n is a, c, g, or t
  misc_feature (956)..(956): n is a, c, g, or t
  misc_feature (958)..(962): n is a, c, g, or t
  misc_feature (965)..(967): n is a, c, g, or t
  misc_feature (969)..(972): n is a, c, g, or t
  misc_feature (974)..(974): n is a, c, g, or t
  misc_feature (976)..(976): n is a, c, g, or t
  misc_feature (980)..(980): n is a, c, g, or t
  misc_feature (982)..(984): n is a, c, g, or t
  misc_feature (987)..(987): n is a, c, g, or t
  misc_feature (989)..(995): n is a, c, g, or t
  misc_feature (999)..(1008): n is a, c, g, or t
  misc_feature (1010)..(1011): n is a, c, g, or t
  misc_feature (1014)..(1017): n is a, c, g, or t
  misc_feature (1020)..(1023): n is a, c, g, or t
  misc_feature (1025)..(1030): n is a, c, g, or t
  misc_feature (1032)..(1049): n is a, c, g, or t
  misc_feature (1051)..(1054): n is a, c, g, or t
  misc_feature (1056)..(1058): n is a, c, g, or t
  misc_feature (1060)..(1063): n is a, c, g, or t
  misc_feature (1065)..(1065): n is a, c, g, or t
  misc_feature (1067)..(1078): n is a, c, g, or t
  misc_feature (1080)..(1080): n is a, c, g, or t
  misc_feature (1082)..(1092): n is a, c, g, or t
  misc_feature (1094)..(1097): n is a, c, g, or t
  misc_feature (1099)..(1101): n is a, c, g, or t
  misc_feature (1103)..(1105): n is a, c, g, or t
  misc_feature (1108)..(1109): n is a, c, g, or t
  misc_feature (1111)..(1115): n is a, c, g, or t
  misc_feature (1119)..(1119): n is a, c, g, or t
  misc_feature (1121)..(1126): n is a, c, g, or t
  misc_feature (1129)..(1131): n is a, c, g, or t
  misc_feature (1133)..(1135): n is a, c, g, or t
  misc_feature (1137)..(1146): n is a, c, g, or t
  misc_feature (1148)..(1150): n is a, c, g, or t
  misc_feature (1153)..(1160): n is a, c, g, or t
  misc_feature (1162)..(1168): n is a, c, g, or t
  misc_feature (1170)..(1177): n is a, c, g, or t
  misc_feature (1179)..(1183): n is a, c, g, or t
  misc_feature (1185)..(1185): n is a, c, g, or t
  misc_feature (1187)..(1188): n is a, c, g, or t
  misc_feature (1190)..(1191): n is a, c, g, or t
  misc_feature (1193)..(1194): n is a, c, g, or t
  misc_feature (1196)..(1198): n is a, c, g, or t
  misc_feature (1202)..(1207): n is a, c, g, or t
  misc_feature (1211)..(1218): n is a, c, g, or t
  misc_feature (1221)..(1221): n is a, c, g, or t
  misc_feature (1223)..(1226): n is a, c, g, or t
  misc_feature (1228)..(1232): n is a, c, g, or t
  misc_feature (1234)..(1236): n is a, c, g, or t
  misc_feature (1238)..(1239): n is a, c, g, or t
  misc_feature (1241)..(1244): n is a, c, g, or t
  misc_feature (1246)..(1247): n is a, c, g, or t
  misc_feature (1251)..(1255): n is a, c, g, or t
  misc_feature (1257)..(1259): n is a, c, g, or t
  misc_feature (1262)..(1262): n is a, c, g, or t
  misc_feature (1264)..(1265): n is a, c, g, or t
  misc_feature (1269)..(1270): n is a, c, g, or t
  misc_feature (1272)..(1272): n is a, c, g, or t
  misc_feature (1274)..(1274): n is a, c, g, or t
  misc_feature (1276)..(1278): n is a, c, g, or t
  misc_feature (1280)..(1280): n is a, c, g, or t
  misc_feature (1282)..(1283): n is a, c, g, or t
  misc_feature (1285)..(1288): n is a, c, g, or t
  misc_feature (1290)..(1291): n is a, c, g, or t
  misc_feature (1293)..(1300): n is a, c, g, or t
  misc_feature (1302)..(1302): n is a, c, g, or t
  misc_feature (1304)..(1307): n is a, c, g, or t
  misc_feature (1309)..(1313): n is a, c, g, or t
  misc_feature (1315)..(1315): n is a, c, g, or t
  misc_feature (1317)..(1321): n is a, c, g, or t
  misc_feature (1323)..(1325): n is a, c, g, or t
  misc_feature (1327)..(1327): n is a, c, g, or t
  misc_feature (1330)..(1332): n is a, c, g, or t
  misc_feature (1334)..(1335): n is a, c, g, or t
  misc_feature (1337)..(1337): n is a, c, g, or t
  misc_feature (1340)..(1341): n is a, c, g, or t
  misc_feature (1343)..(1347): n is a, c, g, or t
  misc_feature (1350)..(1352): n is a, c, g, or t
  misc_feature (1355)..(1356): n is a, c, g, or t
  misc_feature (1359)..(1359): n is a, c, g, or t
  misc_feature (1365)..(1371): n is a, c, g, or t
  misc_feature (1374)..(1380): n is a, c, g, or t
  misc_feature (1382)..(1388): n is a, c, g, or t
  misc_feature (1390)..(1390): n is a, c, g, or t
  misc_feature (1392)..(1394): n is a, c, g, or t
  misc_feature (1396)..(1400): n is a, c, g, or t
  misc_feature (1404)..(1408): n is a, c, g, or t
  misc_feature (1410)..(1413): n is a, c, g, or t
  misc_feature (1415)..(1424): n is a, c, g, or t
  misc_feature (1428)..(1428): n is a, c, g, or t
  misc_feature (1430)..(1431): n is a, c, g, or t
  misc_feature (1433)..(1434): n is a, c, g, or t
  misc_feature (1436)..(1436): n is a, c, g, or t
  misc_feature (1439)..(1441): n is a, c, g, or t
  misc_feature (1443)..(1445): n is a, c, g, or t
  misc_feature (1447)..(1449): n is a, c, g, or t
  misc_feature (1454)..(1454): n is a, c, g, or t
  misc_feature (1456)..(1461): n is a, c, g, or t
  misc_feature (1463)..(1463): n is a, c, g, or t
  misc_feature (1466)..(1467): n is a, c, g, or t
  misc_feature (1469)..(1472): n is a, c, g, or t
  misc_feature (1475)..(1477): n is a, c, g, or t
  misc_feature (1479)..(1481): n is a, c, g, or t
  misc_feature (1485)..(1489): n is a, c, g, or t
  misc_feature (1491)..(1491): n is a, c, g, or t
  misc_feature (1493)..(1498): n is a, c, g, or t
  misc_feature (1500)..(1500): n is a, c, g, or t
  misc_feature (1502)..(1504): n is a, c, g, or t
  misc_feature (1506)..(1507): n is a, c, g, or t
  misc_feature (1509)..(1511): n is a, c, g, or t
  misc_feature (1513)..(1515): n is a, c, g, or t
  misc_feature (1517)..(1528): n is a, c, g, or t
  misc_feature (1530)..(1531): n is a, c, g, or t
  misc_feature (1533)..(1540): n is a, c, g, or t
  misc_feature (1542)..(1542): n is a, c, g, or t
  misc_feature (1544)..(1544): n is a, c, g, or t
  misc_feature (1546)..(1548): n is a, c, g, or t
  misc_feature (1550)..(1554): n is a, c, g, or t
  misc_feature (1556)..(1558): n is a, c, g, or t
  misc_feature (1561)..(1568): n is a, c, g, or t
  misc_feature (1570)..(1570): n is a, c, g, or t
  misc_feature (1572)..(1575): n is a, c, g, or t
  misc_feature (1577)..(1582): n is a, c, g, or t
  misc_feature (1584)..(1584): n is a, c, g, or t
  misc_feature (1586)..(1586): n is a, c, g, or t
  misc_feature (1590)..(1590): n is a, c, g, or t
  misc_feature (1592)..(1593): n is a, c, g, or t
  misc_feature (1595)..(1597): n is a, c, g, or t
  misc_feature (1601)..(1606): n is a, c, g, or t
  misc_feature (1608)..(1614): n is a, c, g, or t
  misc_feature (1616)..(1616): n is a, c, g, or t
  misc_feature (1618)..(1619): n is a, c, g, or t
  misc_feature (1621)..(1622): n is a, c, g, or t
  misc_feature (1624)..(1625): n is a, c, g, or t
  misc_feature (1627)..(1628): n is a, c, g, or t
  misc_feature (1976)..(1976): n is a, c, g, or t
  misc_feature (1997)..(1997): n is a, c, g, or t
  misc_feature (2337)..(2337): n is a, c, g, or t
  misc_feature (2340)..(2341): n is a, c, g, or t
  misc_feature (2343)..(2348): n is a, c, g, or t
  misc_feature (2350)..(2351): n is a, c, g, or t
  misc_feature (2355)..(2358): n is a, c, g, or t
  misc_feature (2360)..(2363): n is a, c, g, or t
  misc_feature (2366)..(2367): n is a, c, g, or t
  misc_feature (2369)..(2373): n is a, c, g, or t
  misc_feature (2376)..(2376): n is a, c, g, or t
  misc_feature (2378)..(2378): n is a, c, g, or t
  misc_feature (2380)..(2384): n is a, c, g, or t
  misc_feature (2386)..(2386): n is a, c, g, or t
  misc_feature (2389)..(2390): n is a, c, g, or t
  misc_feature (2392)..(2393): n is a, c, g, or t
  misc_feature (2395)..(2395): n is a, c, g, or t
  misc_feature (2397)..(2399): n is a, c, g, or t
  misc_feature (2401)..(2417): n is a, c, g, or t
  misc_feature (2419)..(2419): n is a, c, g, or t
  misc_feature (2421)..(2425): n is a, c, g, or t
  misc_feature (2427)..(2429): n is a, c, g, or t
  misc_feature (2431)..(2434): n is a, c, g, or t
  misc_feature (2436)..(2437): n is a, c, g, or t
  misc_feature (2439)..(2446): n is a, c, g, or t
  misc_feature (2448)..(2448): n is a, c, g, or t
  misc_feature (2450)..(2458): n is a, c, g, or t
  misc_feature (2460)..(2464): n is a, c, g, or t
  misc_feature (2466)..(2474): n is a, c, g, or t
  misc_feature (2476)..(2481): n is a, c, g, or t
  misc_feature (2483)..(2490): n is a, c, g, or t
  misc_feature (2492)..(2494): n is a, c, g, or t
  misc_feature (2496)..(2497): n is a, c, g, or t
  misc_feature (2499)..(2508): n is a, c, g, or t
  misc_feature (2510)..(2524): n is a, c, g, or t
  misc_feature (2527)..(2531): n is a, c, g, or t
  misc_feature (2534)..(2541): n is a, c, g, or t
  misc_feature (2544)..(2544): n is a, c, g, or t
  misc_feature (2546)..(2555): n is a, c, g, or t
  misc_feature (2558)..(2560): n is a, c, g, or t
  misc_feature (2562)..(2610): n is a, c, g, or t
  misc_feature (2612)..(2628): n is a, c, g, or t
  misc_feature (2630)..(2646): n is a, c, g, or t
  misc_feature (2648)..(2675): n is a, c, g, or t
  misc_feature (2677)..(2678): n is a, c, g, or t
  misc_feature (2680)..(2680): n is a, c, g, or t
  misc_feature (2682)..(2684): n is a, c, g, or t
  misc_feature (2686)..(2687): n is a, c, g, or t
  misc_feature (2689)..(2690): n is a, c, g, or t
  misc_feature (2697)..(2697): n is a, c, g, or t
  misc_feature (2699)..(2708): n is a, c, g, or t
  misc_feature (2710)..(2717): n is a, c, g, or t
  misc_feature (2719)..(2721): n is a, c, g, or t
  misc_feature (2723)..(2723): n is a, c, g, or t
  misc_feature (2725)..(2726): n is a, c, g, or t
  misc_feature (2729)..(2732): n is a, c, g, or t
  misc_feature (2734)..(2737): n is a, c, g, or t
  misc_feature (2739)..(2741): n is a, c, g, or t
  misc_feature (2746)..(2748): n is a, c, g, or t
  misc_feature (2750)..(2750): n is a, c, g, or t
  misc_feature (2754)..(2754): n is a, c, g, or t
  misc_feature (2757)..(2758): n is a, c, g, or t
  misc_feature (2760)..(2761): n is a, c, g, or t
  misc_feature (2765)..(2766): n is a, c, g, or t
  misc_feature (2769)..(2769): n is a, c, g, or t
  misc_feature (2771)..(2771): n is a, c, g, or t
  misc_feature (2776)..(2776): n is a, c, g, or t
  misc_feature (2781)..(2782): n is a, c, g, or t
  misc_feature (2784)..(2784): n is a, c, g, or t
  misc_feature (2786)..(2786): n is a, c, g, or t
  misc_feature (2790)..(2792): n is a, c, g, or t
  misc_feature (2799)..(2799): n is a, c, g, or t
  misc_feature (2802)..(2802): n is a, c, g, or t
  misc_feature (2806)..(2806): n is a, c, g, or t
  misc_feature (2811)..(2811): n is a, c, g, or t
  misc_feature (2813)..(2814): n is a, c, g, or t
  misc_feature (2816)..(2816): n is a, c, g, or t
  misc_feature (2823)..(2823): n is a, c, g, or t
  misc_feature (2826)..(2826): n is a, c, g, or t
  misc_feature (2832)..(2833): n is a, c, g, or t
  misc_feature (2837)..(2837): n is a, c, g, or t
  misc_feature (2840)..(2840): n is a, c, g, or t
  misc_feature (2842)..(2842): n is a, c, g, or t
  misc_feature (2845)..(2845): n is a, c, g, or t
  misc_feature (2847)..(2847): n is a, c, g, or t
  misc_feature (2852)..(2852): n is a, c, g, or t
  misc_feature (2856)..(2859): n is a, c, g, or t
  misc_feature (2861)..(2865): n is a, c, g, or t
  misc_feature (2870)..(2870): n is a, c, g, or t
  misc_feature (2874)..(2874): n is a, c, g, or t
  misc_feature (2876)..(2878): n is a, c, g, or t
  misc_feature (2882)..(2882): n is a, c, g, or t
  misc_feature (2884)..(2885): n is a, c, g, or t
  misc_feature (2892)..(2894): n is a, c, g, or t
  misc_feature (2900)..(2900): n is a, c, g, or t
  misc_feature (2903)..(2903): n is a, c, g, or t
  misc_feature (2905)..(2905): n is a, c, g, or t
  misc_feature (2912)..(2912): n is a, c, g, or t
  misc_feature (2915)..(2915): n is a, c, g, or t
  misc_feature (2920)..(2920): n is a, c, g, or t
  misc_feature (2923)..(2923): n is a, c, g, or t
  misc_feature (2926)..(2941): n is a, c, g, or t
  misc_feature (2945)..(2945): n is a, c, g, or t
  misc_feature (2949)..(2965): n is a, c, g, or t
  misc_feature (2967)..(2969): n is a, c, g, or t
  misc_feature (2972)..(2974): n is a, c, g, or t
  misc_feature (2976)..(2981): n is a, c, g, or t
  misc_feature (2983)..(2990): n is a, c, g, or t
  misc_feature (2992)..(2994): n is a, c, g, or t
  misc_feature (2996)..(2997): n is a, c, g, or t
  misc_feature (2999)..(3003): n is a, c, g, or t
  misc_feature (3005)..(3005): n is a, c, g, or t
  misc_feature (3007)..(3008): n is a, c, g, or t
  misc_feature (3010)..(3012): n is a, c, g, or t
  misc_feature (3014)..(3025): n is a, c, g, or t
  misc_feature (3027)..(3029): n is a, c, g, or t
  misc_feature (3031)..(3031): n is a, c, g, or t
  misc_feature (3033)..(3033): n is a, c, g, or t
  misc_feature (3038)..(3039): n is a, c, g, or t
  misc_feature (3041)..(3046): n is a, c, g, or t
  misc_feature (3048)..(3051): n is a, c, g, or t
  misc_feature (3053)..(3054): n is a, c, g, or t
  misc_feature (3056)..(3059): n is a, c, g, or t
  misc_feature (3061)..(3061): n is a, c, g, or t
  misc_feature (3063)..(3064): n is a, c, g, or t
  misc_feature (3066)..(3068): n is a, c, g, or t
  misc_feature (3072)..(3078): n is a, c, g, or t
  misc_feature (3080)..(3085): n is a, c, g, or t
  misc_feature (3087)..(3088): n is a, c, g, or t
  misc_feature (3090)..(3092): n is a, c, g, or t
  misc_feature (3095)..(3100): n is a, c, g, or t
  misc_feature (3103)..(3103): n is a, c, g, or t
  misc_feature (3105)..(3110): n is a, c, g, or t
  misc_feature (3112)..(3113): n is a, c, g, or t
  misc_feature (3115)..(3115): n is a, c, g, or t
  misc_feature (3118)..(3120): n is a, c, g, or t
  misc_feature (3124)..(3124): n is a, c, g, or t
  misc_feature (3126)..(3127): n is a, c, g, or t
  misc_feature (3129)..(3129): n is a, c, g, or t
  misc_feature (3131)..(3133): n is a, c, g, or t
  misc_feature (3137)..(3138): n is a, c, g, or t
  misc_feature (3140)..(3140): n is a, c, g, or t
  misc_feature (3142)..(3149): n is a, c, g, or t
  misc_feature (3151)..(3151): n is a, c, g, or t
  misc_feature (3153)..(3157): n is a, c, g, or t
  misc_feature (3159)..(3160): n is a, c, g, or t
  misc_feature (3163)..(3164): n is a, c, g, or t
  misc_feature (3166)..(3166): n is a, c, g, or t
  misc_feature (3168)..(3169): n is a, c, g, or t
  misc_feature (3171)..(3172): n is a, c, g, or t
  misc_feature (3176)..(3177): n is a, c, g, or t
  misc_feature (3181)..(3182): n is a, c, g, or t
  misc_feature (3184)..(3198): n is a, c, g, or t
  misc_feature (3200)..(3208): n is a, c, g, or t
  misc_feature (3211)..(3219): n is a, c, g, or t
  misc_feature (3222)..(3223): n is a, c, g, or t
  misc_feature (3225)..(3228): n is a, c, g, or t
  misc_feature (3230)..(3235): n is a, c, g, or t
  misc_feature (3237)..(3240): n is a, c, g, or t
  misc_feature (3243)..(3249): n is a, c, g, or t
  misc_feature (3252)..(3253): n is a, c, g, or t
  misc_feature (3255)..(3259): n is a, c, g, or t
  misc_feature (3261)..(3262): n is a, c, g, or t
  misc_feature (3264)..(3266): n is a, c, g, or t
  misc_feature (3268)..(3277): n is a, c, g, or t
  misc_feature (3279)..(3279): n is a, c, g, or t
  misc_feature (3281)..(3281): n is a, c, g, or t
  misc_feature (3283)..(3285): n is a, c, g, or t
  misc_feature (3287)..(3289): n is a, c, g, or t
  misc_feature (3291)..(3294): n is a, c, g, or t
  misc_feature (3296)..(3301): n is a, c, g, or t
  misc_feature (3303)..(3305): n is a, c, g, or t
  misc_feature (3308)..(3309): n is a, c, g, or t
  misc_feature (3311)..(3311): n is a, c, g, or t
  misc_feature (3313)..(3315): n is a, c, g, or t
  misc_feature (3317)..(3317): n is a, c, g, or t
  misc_feature (3319)..(3320): n is a, c, g, or t
  misc_feature (3322)..(3323): n is a, c, g, or t
  misc_feature (3325)..(3328): n is a, c, g, or t
  misc_feature (3330)..(3340): n is a, c, g, or t
  misc_feature (3342)..(3344): n is a, c, g, or t
  misc_feature (3346)..(3351): n is a, c, g, or t
  misc_feature (3353)..(3354): n is a, c, g, or t
  misc_feature (3356)..(3357): n is a, c, g, or t
  misc_feature (3359)..(3361): n is a, c, g, or t
  misc_feature (3363)..(3363): n is a, c, g, or t
  misc_feature (3365)..(3371): n is a, c, g, or t
  misc_feature (3373)..(3375): n is a, c, g, or t
  misc_feature (3377)..(3386): n is a, c, g, or t
  misc_feature (3388)..(3389): n is a, c, g, or t
  misc_feature (3392)..(3392): n is a, c, g, or t
  misc_feature (3394)..(3394): n is a, c, g, or t
  misc_feature (3396)..(3400): n is a, c, g, or t
  misc_feature (3402)..(3402): n is a, c, g, or t
  misc_feature (3404)..(3408): n is a, c, g, or t
  misc_feature (3411)..(3419): n is a, c, g, or t
  misc_feature (3421)..(3425): n is a, c, g, or t
  misc_feature (3427)..(3442): n is a, c, g, or t
  misc_feature (3444)..(3445): n is a, c, g, or t
  misc_feature (3448)..(3448): n is a, c, g, or t
  misc_feature (3450)..(3450): n is a, c, g, or t
  misc_feature (3452)..(3452): n is a, c, g, or t
  misc_feature (3454)..(3459): n is a, c, g, or t
  misc_feature (3461)..(3463): n is a, c, g, or t
  misc_feature (3465)..(3468): n is a, c, g, or t
  misc_feature (3471)..(3472): n is a, c, g, or t
  misc_feature (3475)..(3477): n is a, c, g, or t
  misc_feature (3480)..(3480): n is a, c, g, or t
  misc_feature (3483)..(3486): n is a, c, g, or t
  misc_feature (3488)..(3498): n is a, c, g, or t
  misc_feature (3501)..(3504): n is a, c, g, or t
  misc_feature (3506)..(3508): n is a, c, g, or t
  misc_feature (3512)..(3512): n is a, c, g, or t
  misc_feature (3514)..(3516): n is a, c, g, or t
  misc_feature (3518)..(3519): n is a, c, g, or t
  misc_feature (3521)..(3541): n is a, c, g, or t
  misc_feature (3543)..(3543): n is a, c, g, or t
  misc_feature (3545)..(3548): n is a, c, g, or t
  misc_feature (3550)..(3555): n is a, c, g, or t
  misc_feature (3557)..(3561): n is a, c, g, or t
  misc_feature (3563)..(3600): n is a, c, g, or t
  misc_feature (3602)..(3620): n is a, c, g, or t
  misc_feature (3622)..(3627): n is a, c, g, or t
  misc_feature (3630)..(3640): n is a, c, g, or t
  misc_feature (3643)..(3643): n is a, c, g, or t
  misc_feature (3645)..(3649): n is a, c, g, or t
  misc_feature (3651)..(3651): n is a, c, g, or t
  misc_feature (3653)..(3665): n is a, c, g, or t
  misc_feature (3667)..(3670): n is a, c, g, or t
  misc_feature (3672)..(3673): n is a, c, g, or t
  misc_feature (3675)..(3675): n is a, c, g, or t
  misc_feature (3677)..(3681): n is a, c, g, or t
  misc_feature (3683)..(3684): n is a, c, g, or t
  misc_feature (3686)..(3689): n is a, c, g, or t
  misc_feature (3691)..(3694): n is a, c, g, or t
  misc_feature (3696)..(3702): n is a, c, g, or t
  misc_feature (3704)..(3707): n is a, c, g, or t
  misc_feature (3709)..(3713): n is a, c, g, or t
  misc_feature (3715)..(3716): n is a, c, g, or t
  misc_feature (3718)..(3726): n is a, c, g, or t
  misc_feature (3728)..(3734): n is a, c, g, or t
  misc_feature (3736)..(3738): n is a, c, g, or t
  misc_feature (3740)..(3741): n is a, c, g, or t
  misc_feature (3743)..(3745): n is a, c, g, or t
  misc_feature (3747)..(3747): n is a, c, g, or t
  misc_feature (3749)..(3749): n is a, c, g, or t
  misc_feature (3752)..(3771): n is a, c, g, or t
  misc_feature (3773)..(3778): n is a, c, g, or t
  misc_feature (3780)..(3780): n is a, c, g, or t
  misc_feature (3782)..(3783): n is a, c, g, or t
  misc_feature (3785)..(3785): n is a, c, g, or t
  misc_feature (3787)..(3793): n is a, c, g, or t
  misc_feature (3795)..(3796): n is a, c, g, or t
  misc_feature (3798)..(3799): n is a, c, g, or t
  misc_feature (3801)..(3801): n is a, c, g, or t
  misc_feature (3804)..(3804): n is a, c, g, or t
  misc_feature (3806)..(3806): n is a, c, g, or t
  misc_feature (3808)..(3815): n is a, c, g, or t
  misc_feature (3817)..(3817): n is a, c, g, or t
  misc_feature (3822)..(3822): n is a, c, g, or t
  misc_feature (3824)..(3825): n is a, c, g, or t
  misc_feature (3827)..(3830): n is a, c, g, or t
  misc_feature (3833)..(3838): n is a, c, g, or t
  misc_feature (3840)..(3840): n is a, c, g, or t
  misc_feature (3842)..(3848): n is a, c, g, or t
  misc_feature (3850)..(3859): n is a, c, g, or t
  misc_feature (3861)..(3862): n is a, c, g, or t
  misc_feature (3864)..(3864): n is a, c, g, or t
  misc_feature (3866)..(3867): n is a, c, g, or t
  misc_feature (3869)..(3874): n is a, c, g, or t
  misc_feature (3876)..(3877): n is a, c, g, or t
  misc_feature (3881)..(3881): n is a, c, g, or t
  misc_feature (3883)..(3888): n is a, c, g, or t
  misc_feature (3891)..(3895): n is a, c, g, or t
  misc_feature (3897)..(3897): n is a, c, g, or t
  misc_feature (3899)..(3900): n is a, c, g, or t
  misc_feature (3902)..(3903): n is a, c, g, or t
  misc_feature (3905)..(3906): n is a, c, g, or t
  misc_feature (3908)..(3908): n is a, c, g, or t
  misc_feature (3910)..(3921): n is a, c, g, or t
  misc_feature (3923)..(3928): n is a, c, g, or t
  misc_feature (3930)..(3930): n is a, c, g, or t
  misc_feature (3932)..(3932): n is a, c, g, or t
  misc_feature (3934)..(3940): n is a, c, g, or t
  misc_feature (3942)..(3946): n is a, c, g, or t
  misc_feature (3948)..(3956): n is a, c, g, or t
  misc_feature (3958)..(3959): n is a, c, g, or t
  misc_feature (3963)..(3963): n is a, c, g, or t
  misc_feature (3965)..(3969): n is a, c, g, or t
  misc_feature (3971)..(3974): n is a, c, g, or t
  misc_feature (3976)..(3978): n is a, c, g, or t
  misc_feature (3981)..(3983): n is a, c, g, or t
  misc_feature (3985)..(3987): n is a, c, g, or t
  misc_feature (3989)..(3991): n is a, c, g, or t
  misc_feature (3993)..(3994): n is a, c, g, or t
  misc_feature (3996)..(3997): n is a, c, g, or t
  misc_feature (3999)..(4000): n is a, c, g, or t
tggcagcgaagcggcccttggacgtaagtccttggtgcacgtcggagcggtctaggccaggagcaaggcgacggacgcgtgggccgtgtagtgggtgtgcggtttgtgccatggggcggccttggattgtatggaccttcgggccccagccttacaaacgcctttatgtgtatgggccaagcatttgctaccgtgaacacgtatagtcctaggtgactgggaatacggtcccttatgccccgtcttgnaacacggaccaaggagtctaacaactgcgcgagtgtgaaggggtaagaaacccacgacatgcgtagggaaaccgataaggtatcaaggcgagcctacgggnaagtctgcagtaccggcccactgacgatagaggccccggcctttgtcatcgatggagcaggagcgctaattgttaggacccgaaagatggcgaactatgcgtggtcggatcgaagccgggagaaatcccggtggaggatcgtagtaggtactgacgtgcaaatcgttcacgagaagtgcgtataggggcgaaagactaatcgagccatctagtanctgntnccnncnnannttnccnnnngnaannnngnannnnnnaangnnnnntnnnnnnnnnnnnnnannnttnnnngnnnnnggggnnnnngnccnnngncnantnnnnaannncnnangggnnaannnnngncngntnnntnnntnnancnnnncnnannnnnnnaannnntncnannnggncnntnnnngnnannnnnnanngnnnnnnngnannnancnnannnngnantnangnnncnaantngnnnnnnannnnnnnaancnaanggnnntnntnnnnnnnnnnnnnnngnnngnngncnnngnannnngnanncnnnnnngnnnnnnnnannannnnncnnncnnannnnnnnnncnnnnaaanngnnngnnnnnnannnnncnancnnnnnttnnncnnnngnancccngnnnttngnnnnnnngggnnnnnnnnnngnnggnnnnggnnnngnnnnnnannnnnnnnnnnnnnnnnngnnnngnnncnnnngncnnnnnnnnnnnntngnnnnnnnnnnnannnntnnngnnnaanncnnnnnaaangnnnnnnccnnnannncnnnnnnnnnnannnttnnnnnnnnannnnnnncnnnnnnnngnnnnncngnncnnanncnnngggnnnnnncccnnnnnnnnaangnnnngnnnnntnnntnnannnnanntttnnnnngnnnaangnnaaanngntnannntncnntnnnnanntnnnnnnnngnannnngnnnnntngnnnnngnnnanccnnngnncnggnntnnnnnggnnnggnnttncccccnnnnnnnaannnnnnngnnnnnnngnannnannnnnaaannnnnannnngnnnnnnnnnngggncnnanngnccnnntnnngnnnggggnannnnnntnggnngnnnnaannntnnngggnnnnncngnnnnnncnannncnnannngnnnannnnnnnnnnnnanncnnnnnnnngntngnnngnnnnngnnnttnnnnnnnntncnnnntnnnnnntngncccntnnannngggnnnnnntnnnnnnntngnngnnanngnnttaaacccataggccttcatcgaagtactcgcttaaccgtacgataatccgcaacaggtctctaaggtgacaagcctctggtctgaccgtgcgaacgtgagtaagggaattcggcaaaatggacccgaaacttcgggataagggttggctctaggggatgggcggttggcgcaagctggcctaaaacatccagcctagaactgaagcgaacaaggggaatccgacggtttaattaaaacacagcgaagcgtagactggaaaatcggtgtagacggttcgtgatttctgcccagtgctctgaatgttaaagcggagagattcgaccaagcgcgggtaaacggcgggagnaactatgactctcttaaggtngccaaatgcctcgtcatctaattagtgacgtgcatgaatggatgaacgagattcccactgtccctattcacatacgggcgaacccactgccaagggaacgggcttggaatacatgtaggggaaagaagaccctgttgagtttcactctagtctggcgatgtgctatgatttgtgaggtatagaataaatgggagccgaggggcaacccggagcgacagtgtaataccattacttgcaatattgtagcactcattgggtaaaatctcgtcatagggtgcacagcttatgctgggcttaaacgcagacccttgcggtccgggccctttgattcaagcgcacnacnnannnnnngnnaggnnnnannnnagnntnnnnngananannnnngnaanngnnanannngnnnnnnnnnnnnnnnnnanannnnntnnnannnnanngnnnnnnnncncnnnnnnnnnannnnngnnnnnnnnncnnnnnngnnnnnnnngnnnannannnnnnnnnncnnnnnnnnnnnnnnnggnnnnngcnnnnnnnngcngnnnnnnnnnnccnnngnnnnnnnnnnnnnnnnnnnnnnnnnnnnnnnnnnnnnnnnnnnnnnnnncnnnnnnnnnnnnnnnnngnnnnnnnnnnnnnnnnncnnnnnnnnnnnnnnnnnnnnnnnnnnnncnncntnnncnngnncaagganannnnnnnnnnannnnnnnncnnntncnnggnnnngnnnncnnngttcnnnangaancgnncnntganngtntnactgnagcanncngngacnnngcggacnagncacntaaananntnagggatntgnagtcgnngcanctncnttntntctcngtcnnnngnnnnnaagancagncnnnagangnngtttccnnnagaagncangncaaggtngangcccngcngtnnnnnnnnnnnnnnnnattnactnnnnnnnnnnnnnnnnncnnngannngnnnnnnannnnnnnnannnanncnnnnnangnnannncnnnnnnnnnnnngnnnancngcaanntnnnnnngnnnnanntnnnngncnntnnnacannnnnnntnnnnnngnngnnntcnnnnnnaantnnnnnncnngnaannnagcngnncncnnnattnncnannnnnnnngngnnnnncnngtnngntnngnnggtnncaanntnnnnnnnnnnnnnnntnnnnnnnnngannnnnnnnnaanngnnnnannnnnngnnnnggnnnnnnntgnnannnnncnncnnncnnnnnnnnnngntngnnnannnannnntnnnnnnannntcnncnannncnannanngnnnngnnnnnnnnnnnannncnnnnnntnnanncnnngnannnnnnnannntnnnnnnnnnncnngtncngnnnnncncnnnnncgnnnnnnnnncnnnnnannnnnnnnnnnnnnnnanngangnanannnnnnannngnnnntgnncannncanagnnnntnnnnnnnnnnncannnnannnggtnannncnntnnnnnnnnnnnnnnnnnnnnncntnnnnannnnnnannnnnannnnnnnnnnnnnnnnnnnnnnnnnnnnnnnnnnnnnngnnnnnnnnnnnnnnnnnnnannnnnnaannnnnnnnnnnggnannnnngnannnnnnnnnnnnnannnncnngnannnnnanncnnnnannnntnnnnnnntnnnntnnnnncnngnnnnnnnnntnnnnnnntnnncnncnnntnanatnnnnnnnnnnnnnnnnnnnnannnnnntncnntnannnnnnncnnanncncancncnnnnnnnngnacaantnnannnnttnnnnnncnannnnnnngnnnnnnnnnnanngnannannnnnntnncttntnnnnnnagnnnnntncnngnntnncnannnnnnnnnnnncnnnnnngncnannnnnnnannnnnannnnnnnnnannagcnannnnnannnnannnagnnnannnannncnncnncnn

SEQ ID NO: 133 - DNA, 4000 bp, Escherichia coli
  misc_feature (87)..(87): n is a, c, g, or t
  misc_feature (96)..(96): n is a, c, g, or t
  misc_feature (99)..(99): n is a, c, g, or t
  misc_feature (117)..(117): n is a, c, g, or t
  misc_feature (171)..(171): n is a, c, g, or t
  misc_feature (210)..(210): n is a, c, g, or t
  misc_feature (237)..(237): n is a, c, g, or t
  misc_feature (291)..(291): n is a, c, g, or t
  misc_feature (537)..(537): n is a, c, g, or t
  misc_feature (561)..(561): n is a, c, g, or t
  misc_feature (684)..(684): n is a, c, g, or t
  misc_feature (693)..(693): n is a, c, g, or t
  misc_feature (696)..(696): n is a, c, g, or t
  misc_feature (699)..(699): n is a, c, g, or t
  misc_feature (762)..(762): n is a, c, g, or t
  misc_feature (828)..(828): n is a, c, g, or t
  misc_feature (984)..(984): n is a, c, g, or t
  misc_feature (999)..(999): n is a, c, g, or t
  misc_feature (1005)..(1005): n is a, c, g, or t
  misc_feature (1020)..(1020): n is a, c, g, or t
  misc_feature (1032)..(1032): n is a, c, g, or t
  misc_feature (1050)..(1050): n is a, c, g, or t
  misc_feature (1104)..(1104): n is a, c, g, or t
  misc_feature (1137)..(1137): n is a, c, g, or t
  misc_feature (1167)..(1167): n is a, c, g, or t
  misc_feature (1172)..(1172): n is a, c, g, or t
  misc_feature (1174)..(1174): n is a, c, g, or t
  misc_feature (1182)..(1182): n is a, c, g, or t
  misc_feature (1986)..(1986): n is a, c, g, or t
  misc_feature (1989)..(1989): n is a, c, g, or t
  misc_feature (1992)..(1992): n is a, c, g, or t
  misc_feature (1998)..(1998): n is a, c, g, or t
catggtttaggtgttactgagcattctcaaggaacaaagactgttatgctaatttctaatttggcaatgatgacaggaaatctaggncgacctggngtnggtgtaaatccacttcgnggtcagaataatgttcaaggcgcagccgatatgggatgtcagccacatcatggnccaggatatttgtggatggatcaaaaagatgttcaaganttttatgaggataagttgggtcttccnacaccaacaactcctggaagaaaaattcctgaaatgttcgatggtgcagttganggctcacttaaagcactttggatttttgctgaggatgttgttcagactgatccaaatacccatcatgtcgttaaggcaatgcaggggcttgatttacttgttgttcaagaaatatttatgagtgaaactgctaagatggcagatgtagttcttccaggaactacttttcttgaaaagagtggaacttttacaaacacagaaagacgaattcaacaagttaatgctgctgttaaacctcttccaggnacaaaaacagatggtcaaattatngttgaaatgatgcgtaaattaggccttgatcagcctgattttgatgcagcagaggttcttaaagaggttgctagtgttgtatcattttttgagggagtaacttgggaaggtcttgcagcaagnccaatgggnctncantggcctgtaaacaaaaaaggtgaagatacacaaatccttcatattggagagtttaagcgtggnaaaggtaagtttcattaccatgactggaaagagagtgaagagcttactaagcataagaatgagtanccatttattcttacaactagtcgtgaacttcaacattacaactgtgcaacaatgactaggagaacttcaaatgttcaaatcctaactaaagatgtcattatgctcaacccaagagatgcaaaagcaaaggatctcatatctggtgatcgtgcaacnttgaagtctgatagnggtcangtcacacttgatgtngaggttacaganagggttaaaaaaggtgtngttagaacaaccttccacttcccagaagtgctaatcaatgaggttactagtggngttacagatgaagagacaaagtgtcctgaatanaaaattgtagctgtagacgtattaaaagcntcctnangaaaatcnataaagtgagtctaaagggctcactttattaaaacctaataccttctctctagtttacttttttgaagtatacgtcccgcaatttcttcgattgagatgtggctggtgtcgatataaggaacatcattttgaacaaacatatcctccgctcttctcacctcttttcgacattgttcaatagaagcataaccgctattagatcttctaacatctcttatgttttggagtctaactgggttaatacttaggccatagagtttatttttaaagcctttaagagcatttggaagtttagaggtatctaaatcttcatcaataagtgggtagtttgcagcatagattccatactgaagtgctaaaaaaagacatgttggtgtttttccagacctagagacccctgtcagaattatgtcagcagtttcataatttttagtagtaagtccatcatcattattaagggcaaaatttatgctatcaattcgacctgaataggtatttttattacccacgccatgagaaagccccatctcatgtgaagattgagtttcaagtattttctccatttttgaaatataagtctcaaaaaaatcaaaaataatcccaccactattttcaagaagatgacgatattcatttgaaacttgagtgctgaaaattagagcagcctgaccatcagtctctgacgcctctttaatcaattgagctgctgtttgtgcctttttttgagtgtcaataaaggcaagattgactcttttaaaatcaatttggggaaactgagtaagaagactatttccaagtgcttcngcngtnattccngttctgtctgaaataaaaaatacggttctcatgctattaaagcgtacccagtttggtccaggtttcaacaacagtatctggattaagagagatacttgtaatttctttttctaaaagccattgagctaaatccatatgatcagagggcccttgtccacaaataccaatatacttgccttcacggtgacaagcatcaatagccatcgtgatcattttcttaactgctgcatttctttcgtcaaaaccatcagcaataaggccagagtctctatccattcctagagtcagttgtgttaaatcatttgagccaatagaaaagccatcgaagtattccaaaaactcttcagcaataactgcattcgaaggaagttcacacatcatgattattctcaaaccatctttacccctttcaaggccattttctttgagaagatcaattacttttgaggcttcagatgtggttcgaacaaaagggatcatgatttcaacatttgttaaacccattacatttctgacattttttatcgccttgcattcaagttcaaaacactctctaaaatctgttgagatgtaccttgaagcgcccctaaatccaatcattggattttcttcattgggttcatagagttctcctgcaaataaatttgaatactcgttagatttgaagtctgacatgcgaatgattacaggggatttagaaaaactggctgctatggttgaaattccttcagtgagtttttgaacataaaagtccacaggtgatttatagcaggatgttctttttttgatttcacttttgagttcagacggcaagctatcaaactcaagtaaagcctttggatgaatgccaatcgtattattgataatgaattcaaggcgagcgagccctaccccagtattgggaatacttgcaaaatcaaatgcgcgagatggatttcctacattcatcataattttgactggaatatcaggaaggttgcttacttcagaaaatgtgtgttcaaaatttaatttaccttcgtagactttgcctgtatcaccctctgcacaagaagccgtgacctcttcagaattttttaatagttcagtcgcatttccagttccaacaatggcaggaactccgagctctctagcaataatcgcagcatggcaagtcctcccaccacgattggtgataattgcagaagctaatttcatgactggctcccagtcagggtcggtcatgtctgtaacaagtacgtcaccctcatggactgagtccatttcagataagtcattaattatcttagtttttcctgtgccaattttttggccaatggctcttccttcaacaatcgtttttgatgtttcaagaagtttatagcgttcaattttttgagaactttgtctgcttttaacagtttctggtctggcttgaacgatatagatttgtccatcaactccatccagtgcccactcaatatccattggtcttccataatggctttcaattttaattgcataatgagcaagctcttcaatttgagaatcatttaaactaaatcttattcgatcatcagaatttacttcggttgtattaactagtgatcccgaatctttttctgcgtaaaccatttttattgatttagagccaaggcttctagatagaattgaaggttttccagattttaaggtaggtttgtgcacataaaattcatctggattgacagagccttgaacaaccgtttcacctaggccataagccgaagtgatgaatactacatcatcaaatccggattccgtgtccagcgtaaacataacaccactagagcctatatcacttcgaaccatctgctgaataccagcagacaatgaaaccatttcatgttcaaagccttgatggaccctgtaagagattgctctatcattgtatagagatgcgtaaactcttcgtattgaggttaagatgtcatcaattccactgacattaagataggtttcttgttgcccagcaaaggatgct

SEQ ID NO: 134 - DNA, 4000 bp, Escherichia coli
  misc_feature (1)..(1): n is a, c, g, or t
  misc_feature (6)..(7): n is a, c, g, or t
  misc_feature (9)..(10): n is a, c, g, or t
  misc_feature (14)..(14): n is a, c, g, or t
  misc_feature (17)..(18): n is a, c, g, or t
  misc_feature (20)..(20): n is a, c, g, or t
  misc_feature (28)..(31): n is a, c, g, or t
  misc_feature (35)..(39): n is a, c, g, or t
  misc_feature (41)..(44): n is a, c, g, or t
  misc_feature (47)..(53): n is a, c, g, or t
  misc_feature (55)..(67): n is a, c, g, or t
  misc_feature (70)..(83): n is a, c, g, or t
  misc_feature (86)..(88): n is a, c, g, or t
  misc_feature (90)..(97): n is a, c, g, or t
  misc_feature (99)..(101): n is a, c, g, or t
  misc_feature (103)..(111): n is a, c, g, or t
  misc_feature (113)..(119): n is a, c, g, or t
  misc_feature (121)..(122): n is a, c, g, or t
  misc_feature (124)..(129): n is a, c, g, or t
  misc_feature (133)..(133): n is a, c, g, or t
  misc_feature (135)..(135): n is a, c, g, or t
  misc_feature (138)..(138): n is a, c, g, or t
  misc_feature (140)..(142): n is a, c, g, or t
  misc_feature (144)..(145): n is a, c, g, or t
  misc_feature (149)..(159): n is a, c, g, or t
  misc_feature (161)..(172): n is a, c, g, or t
  misc_feature (174)..(174): n is a, c, g, or t
  misc_feature (176)..(181): n is a, c, g, or t
  misc_feature (183)..(189): n is a, c, g, or t
  misc_feature (191)..(193): n is a, c, g, or t
  misc_feature (196)..(201): n is a, c, g, or t
  misc_feature (203)..(209): n is a, c, g, or t
  misc_feature (211)..(219): n is a, c, g, or t
  misc_feature (223)..(224): n is a, c, g, or t
  misc_feature (226)..(227): n is a, c, g, or t
  misc_feature (229)..(229): n is a, c, g, or t
  misc_feature (231)..(233): n is a, c, g, or t
  misc_feature (235)..(235): n is a, c, g, or t
  misc_feature (238)..(238): n is a, c, g, or t
  misc_feature (240)..(245): n is a, c, g, or t
  misc_feature (249)..(249): n is a, c, g, or t
  misc_feature (251)..(253): n is a, c, g, or t
  misc_feature (258)..(258): n is a, c, g, or t
  misc_feature (260)..(260): n is a, c, g, or t
  misc_feature (262)..(262): n is a, c, g, or t
  misc_feature (264)..(264): n is a, c, g, or t
  misc_feature (267)..(267): n is a, c, g, or t
  misc_feature (270)..(271): n is a, c, g, or t
  misc_feature (273)..(277): n is a, c, g, or t
  misc_feature (282)..(282): n is a, c, g, or t
  misc_feature (285)..(286): n is a, c, g, or t
  misc_feature (288)..(290): n is a, c, g, or t
  misc_feature (292)..(293): n is a, c, g, or t
  misc_feature (295)..(295): n is a, c, g, or t
  misc_feature (297)..(297): n is a, c, g, or t
  misc_feature (300)..(300): n is a, c, g, or t
  misc_feature (303)..(304): n is a, c, g, or t
  misc_feature (306)..(306): n is a, c, g, or t
  misc_feature (312)..(313): n is a, c, g, or t
  misc_feature (315)..(318): n is a, c, g, or t
  misc_feature (320)..(320): n is a, c, g, or t
  misc_feature (325)..(325): n is a, c, g, or t
  misc_feature (327)..(327): n is a, c, g, or t
  misc_feature (329)..(330): n is a, c, g, or t
  misc_feature (334)..(335): n is a, c, g, or t
  misc_feature (339)..(344): n is a, c, g, or t
  misc_feature (346)..(346): n is a, c, g, or t
  misc_feature (348)..(352): n is a, c, g, or t
  misc_feature (354)..(360): n is a, c, g, or t
  misc_feature (364)..(364): n is a, c, g, or t
  misc_feature (366)..(367): n is a, c, g, or t
  misc_feature (371)..(373): n is a, c, g, or t
  misc_feature (375)..(381): n is a, c, g, or t
  misc_feature (384)..(387): n is a, c, g, or t
  misc_feature (396)..(396): n is a, c, g, or t
  misc_feature (398)..(398): n is a, c, g, or t
  misc_feature (401)..(402): n is a, c, g, or t
  misc_feature (404)..(405): n is a, c, g, or t
  misc_feature (407)..(409): n is a, c, g, or t
  misc_feature (411)..(414): n is a, c, g, or t
  misc_feature (416)..(416): n is a, c, g, or t
  misc_feature (418)..(418): n is a, c, g, or t
  misc_feature (421)..(422): n is a, c, g, or t
  misc_feature (424)..(424): n is a, c, g, or t
  misc_feature (426)..(429): n is a, c, g, or t
  misc_feature (432)..(432): n is a, c, g, or t
  misc_feature (435)..(435): n is a, c, g, or t
  misc_feature (438)..(439): n is a, c, g, or t
  misc_feature (442)..(443): n is a, c, g, or t
  misc_feature (445)..(445): n is a, c, g, or t
  misc_feature (447)..(447): n is a, c, g, or t
  misc_feature (452)..(452): n is a, c, g, or t
  misc_feature (456)..(458): n is a, c, g, or t
  misc_feature (460)..(460): n is a, c, g, or t
  misc_feature (463)..(465): n is a, c, g, or t
  misc_feature (468)..(468): n is a, c, g, or t
  misc_feature (470)..(470): n is a, c, g, or t
  misc_feature (472)..(472): n is a, c, g, or t
  misc_feature (476)..(477): n is a, c, g, or t
  misc_feature (483)..(484): n is a, c, g, or t
  misc_feature (486)..(486): n is a, c, g, or t
  misc_feature (489)..(490): n is a, c, g, or t
  misc_feature (493)..(493): n is a, c, g, or t
  misc_feature (496)..(497): n is a, c, g, or t
  misc_feature (500)..(501): n is a, c, g, or t
  misc_feature (503)..(503): n is a, c, g, or t
  misc_feature (507)..(507): n is a, c, g, or t
  misc_feature (509)..(510): n is a, c, g, or t
  misc_feature (512)..(516): n is a, c, g, or t
  misc_feature (518)..(520): n is a, c, g, or t
  misc_feature (523)..(524): n is a, c, g, or t
  misc_feature (527)..(528): n is a, c, g, or t
  misc_feature (531)..(535): n is a, c, g, or t
  misc_feature (538)..(539): n is a, c, g, or t
  misc_feature (541)..(542): n is a, c, g, or t
  misc_feature (544)..(545): n is a, c, g, or t
  misc_feature (548)..(549): n is a, c, g, or t
  misc_feature (553)..(554): n is a, c, g, or t
  misc_feature (556)..(557): n is a, c, g, or t
  misc_feature (559)..(561): n is a, c, g, or t
  misc_feature (565)..(568): n is a, c, g, or t
  misc_feature (570)..(571): n is a, c, g, or t
  misc_feature (573)..(573): n is a, c, g, or t
  misc_feature (575)..(575): n is a, c, g, or t
  misc_feature (578)..(578): n is a, c, g, or t
  misc_feature (581)..(582): n is a, c, g, or t
  misc_feature (588)..(588): n is a, c, g, or t
  misc_feature (592)..(592): n is a, c, g, or t
  misc_feature (594)..(598): n is a, c, g, or t
  misc_feature (600)..(600): n is a, c, g, or t
  misc_feature (602)..(603): n is a, c, g, or t
  misc_feature (605)..(605): n is a, c, g, or t
  misc_feature (608)..(609): n is a, c, g, or t
  misc_feature (612)..(616): n is a, c, g, or t
  misc_feature (618)..(622): n is a, c, g, or t
  misc_feature (624)..(626): n is a, c, g, or t
  misc_feature (628)..(628): n is a, c, g, or t
  misc_feature (630)..(631): n is a, c, g, or t
  misc_feature (637)..(638): n is a, c, g, or t
  misc_feature (640)..(640): n is a, c, g, or t
  misc_feature (643)..(643): n is a, c, g, or t
  misc_feature (645)..(647): n is a, c, g, or t
  misc_feature (649)..(649): n is a, c, g, or t
  misc_feature (652)..(661): n is a, c, g, or t
  misc_feature (668)..(668): n is a, c, g, or t
  misc_feature (672)..(672): n is a, c, g, or t
  misc_feature (674)..(674): n is a, c, g, or t
  misc_feature (676)..(676): n is a, c, g, or t
  misc_feature (679)..(680): n is a, c, g, or t
  misc_feature (683)..(683): n is a, c, g, or t
  misc_feature (686)..(686): n is a, c, g, or t
  misc_feature (690)..(692): n is a, c, g, or t
  misc_feature (694)..(694): n is a, c, g, or t
  misc_feature (697)..(697): n is a, c, g, or t
  misc_feature (699)..(702): n is a, c, g, or t
  misc_feature (706)..(708): n is a, c, g, or t
  misc_feature (711)..(711): n is a, c, g, or t
  misc_feature (714)..(714): n is a, c, g, or t
  misc_feature (717)..(717): n is a, c, g, or t
  misc_feature (720)..(720): n is a, c, g, or t
  misc_feature (724)..(724): n is a, c, g, or t
  misc_feature (726)..(726): n is a, c, g, or t
  misc_feature (730)..(730): n is a, c, g, or t
  misc_feature (732)..(733): n is a, c, g, or t
  misc_feature (736)..(740): n is a, c, g, or t
  misc_feature (745)..(749): n is a, c, g, or t
  misc_feature (751)..(751): n is a, c, g, or t
  misc_feature (754)..(755): n is a, c, g, or t
  misc_feature (757)..(759): n is a, c, g, or t
  misc_feature (761)..(762): n is a, c, g, or t
  misc_feature (764)..(767): n is a, c, g, or t
  misc_feature (769)..(769): n is a, c, g, or t
  misc_feature (772)..(777): n is a, c, g, or t
  misc_feature (779)..(781): n is a, c, g, or t
  misc_feature (783)..(787): n is a, c, g, or t
  misc_feature (789)..(789): n is a, c, g, or t
  misc_feature (792)..(798): n is a, c, g, or t
  misc_feature (801)..(802): n is a, c, g, or t
  misc_feature (805)..(805): n is a, c, g, or t
  misc_feature (810)..(813): n is a, c, g, or t
  misc_feature (815)..(815): n is a, c, g, or t
  misc_feature (818)..(818): n is a, c, g, or t
  misc_feature (820)..(820): n is a, c, g, or t
  misc_feature (822)..(822): n is a, c, g, or t
  misc_feature (826)..(827): n is a, c, g, or t
  misc_feature (829)..(830): n is a, c, g, or t
  misc_feature (832)..(833): n is a, c, g, or t
  misc_feature (837)..(841): n is a, c, g, or t
  misc_feature (844)..(845): n is a, c, g, or t
  misc_feature (847)..(847): n is a, c, g, or t
  misc_feature (849)..(851): n is a, c, g, or t
  misc_feature (853)..(853): n is a, c, g, or t
  misc_feature (859)..(860): n is a, c, g, or t
  misc_feature (863)..(866): n is a, c, g, or t
  misc_feature (868)..(870): n is a, c, g, or t
  misc_feature (872)..(874): n is a, c, g, or t
  misc_feature (876)..(878): n is a, c, g, or t
  misc_feature (881)..(881): n is a, c, g, or t
  misc_feature (883)..(884): n is a, c, g, or t
  misc_feature (887)..(888): n is a, c, g, or t
  misc_feature (890)..(892): n is a, c, g, or t
  misc_feature (894)..(894): n is a, c, g, or t
  misc_feature (901)..(901): n is a, c, g, or t
  misc_feature (904)..(904): n is a, c, g, or t
  misc_feature (906)..(906): n is a, c, g, or t
  misc_feature (908)..(911): n is a, c, g, or t
  misc_feature (913)..(917): n is a, c, g, or t
  misc_feature (919)..(919): n is a, c, g, or t
  misc_feature (921)..(922): n is a, c, g, or t
  misc_feature (924)..(925): n is a, c, g, or t
  misc_feature (929)..(931): n is a, c, g, or t
  misc_feature (933)..(933): n is a, c, g, or t
  misc_feature (935)..(935): n is a, c, g, or t
  misc_feature (937)..(937): n is a, c, g, or t
  misc_feature (939)..(939): n is a, c, g, or t
  misc_feature (941)..(942): n is a, c, g, or t
  misc_feature (944)..(947): n is a, c, g, or t
  misc_feature (950)..(950): n is a, c, g, or t
  misc_feature (956)..(956): n is a, c, g, or t
  misc_feature (960)..(961): n is a, c, g, or t
  misc_feature (968)..(968): n is a, c, g, or t
  misc_feature (970)..(976): n is a, c, g, or t
  misc_feature (978)..(978): n is a, c, g, or t
  misc_feature (981)..(983): n is a, c, g, or t
  misc_feature (985)..(985): n is a, c, g, or t
  misc_feature (990)..(990): n is a, c, g, or t
  misc_feature (993)..(993): n is a, c, g, or t
  misc_feature (996)..(996): n is a, c, g, or t
  misc_feature (998)..(998): n is a, c, g, or t
  misc_feature (1005)..(1006): n is a, c, g, or t
  misc_feature (1009)..(1012): n is a, c, g, or t
  misc_feature (1014)..(1014): n is a, c, g, or t
  misc_feature (1016)..(1020): n is a, c, g, or t
  misc_feature (1022)..(1026): n is a, c, g, or t
  misc_feature (1028)..(1031): n is a, c, g, or t
  misc_feature (1038)..(1038): n is a, c, g, or t
  misc_feature (1040)..(1040): n is a, c, g, or t
  misc_feature (1043)..(1045): n is a, c, g, or t
  misc_feature (1047)..(1047): n is a, c, g, or t
  misc_feature (1053)..(1054): n is a, c, g, or t
  misc_feature (1057)..(1057): n is a, c, g, or t
  misc_feature (1059)..(1059): n is a, c, g, or t
  misc_feature (1066)..(1066): n is a, c, g, or t
  misc_feature (1069)..(1076): n is a, c, g, or t
  misc_feature (1079)..(1079): n is a, c, g, or t
  misc_feature (1083)..(1084): n is a, c, g, or t
  misc_feature (1086)..(1086): n is a, c, g, or t
  misc_feature (1088)..(1088): n is a, c, g, or t
  misc_feature (1090)..(1090): n is a, c, g, or t
  misc_feature (1092)..(1092): n is a, c, g, or t
  misc_feature (1098)..(1098): n is a, c, g, or t
  misc_feature (1101)..(1102): n is a, c, g, or t
  misc_feature (1105)..(1105): n is a, c, g, or t
  misc_feature (1108)..(1110): n is a, c, g, or t
  misc_feature (1113)..(1113): n is a, c, g, or t
  misc_feature (1115)..(1117): n is a, c, g, or t
  misc_feature (1119)..(1120): n is a, c, g, or t
  misc_feature (1122)..(1123): n is a, c, g, or t
  misc_feature (1127)..(1128): n is a, c, g, or t
  misc_feature (1131)..(1133): n is a, c, g, or t
  misc_feature (1139)..(1140): n is a, c, g, or t
  misc_feature (1143)..(1144): n is a, c, g, or t
  misc_feature (1146)..(1146): n is a, c, g, or t
  misc_feature (1149)..(1149): n is a, c, g, or t
  misc_feature (1152)..(1152): n is a, c, g, or t
  misc_feature (1154)..(1155): n is a, c, g, or t
  misc_feature (1158)..(1166): n is a, c, g, or t
  misc_feature (1171)..(1172): n is a, c, g, or t
  misc_feature (1175)..(1175): n is a, c, g, or t
  misc_feature (1177)..(1177): n is a, c, g, or t
  misc_feature (1179)..(1182): n is a, c, g, or t
  misc_feature (1184)..(1185): n is a, c, g, or t
  misc_feature (1191)..(1196): n is a, c, g, or t
  misc_feature (1198)..(1198): n is a, c, g, or t
  misc_feature (1201)..(1204): n is a, c, g, or t
  misc_feature (1206)..(1206): n is a, c, g, or t
  misc_feature (1212)..(1212): n is a, c, g, or t
  misc_feature (1215)..(1217): n is a, c, g, or t
  misc_feature (1219)..(1219): n is a, c, g, or t
  misc_feature (1222)..(1224): n is a, c, g, or t
  misc_feature (1228)..(1237): n is a, c, g, or t
  misc_feature (1239)..(1239): n is a, c, g, or t
  misc_feature (1242)..(1242): n is a, c, g, or t
  misc_feature (1245)..(1246): n is a, c, g, or t
  misc_feature (1249)..(1249): n is a, c, g, or t
  misc_feature (1251)..(1251): n is a, c, g, or t
  misc_feature (1254)..(1255): n is a, c, g, or t
  misc_feature (1258)..(1258): n is a, c, g, or t
  misc_feature (1263)..(1266): n is a, c, g, or t
  misc_feature (1268)..(1270): n is a, c, g, or t
  misc_feature (1273)..(1273): n is a, c, g, or t
  misc_feature (1275)..(1279): n is a, c, g, or t
  misc_feature (1283)..(1283): n is a, c, g, or t
  misc_feature (1285)..(1285): n is a, c, g, or t
  misc_feature (1290)..(1290): n is a, c, g, or t
  misc_feature (1293)..(1293): n is a, c, g, or t
  misc_feature (1295)..(1301): n is a, c, g, or t
  misc_feature (1304)..(1304): n is a, c, g, or t
  misc_feature (1306)..(1306): n is a, c, g, or t
  misc_feature (1308)..(1308): n is a, c, g, or t
  misc_feature (1310)..(1312): n is a, c, g, or t
  misc_feature (1314)..(1317): n is a, c, g, or t
  misc_feature (1320)..(1321): n is a, c, g, or t
  misc_feature (1323)..(1323): n is a, c, g, or t
  misc_feature (1326)..(1326): n is a, c, g, or t
  misc_feature (1328)..(1329): n is a, c, g, or t
  misc_feature (1331)..(1331): n is a, c, g, or t
  misc_feature (1333)..(1335): n is a, c, g, or t
  misc_feature (1337)..(1337): n is a, c, g, or t
  misc_feature (1339)..(1339): n is a, c, g, or t
  misc_feature (1341)..(1341): n is a, c, g, or t
  misc_feature (1344)..(1345): n is a, c, g, or t
  misc_feature (1347)..(1349): n is a, c, g, or t
  misc_feature (1351)..(1351): n is a, c, g, or t
  misc_feature (1354)..(1357): n is a, c, g, or t
  misc_feature (1360)..(1360): n is a, c, g, or t
  misc_feature (1362)..(1362): n is a, c, g, or t
  misc_feature (1364)..(1365): n is a, c, g, or t
  misc_feature (1370)..(1370): n is a, c, g, or t
  misc_feature (1375)..(1384): n is a, c, g, or t
  misc_feature (1387)..(1389): n is a, c, g, or t
  misc_feature (1391)..(1391): n is a, c, g, or t
  misc_feature (1394)..(1398): n is a, c, g, or t
  misc_feature (1403)..(1403): n is a, c, g, or t
  misc_feature (1406)..(1408): n is a, c, g, or t
  misc_feature (1410)..(1416): n is a, c, g, or t
  misc_feature (1418)..(1418): n is a, c, g, or t
  misc_feature (1420)..(1421): n is a, c, g, or t
  misc_feature (1423)..(1424): n is a, c, g, or t
  misc_feature (1427)..(1427): n is a, c, g, or t
  misc_feature (1434)..(1434): n is a, c, g, or t
  misc_feature (1454)..(1455): n is a, c, g, or t
  misc_feature (1467)..(1467): n is a, c, g, or t
  misc_feature (1473)..(1474): n is a, c, g, or t
  misc_feature (1476)..(1476): n is a, c, g, or t
  misc_feature (1498)..(1498): n is a, c, g, or t
  misc_feature (1567)..(1567): n is a, c, g, or t
  misc_feature (1987)..(1987): n is a, c, g, or t
  misc_feature (1997)..(1997): n is a, c, g, or t
nttttnnanntaanctnnanaaaaaaannnncatnnnnnannnnaannnnnnnannnnnnnnnnnnncannnnnnnnnnnnnnttnnntnnnnnnnnannnannnnnnnnntnnnnnnngnnannnnnntctntncgntnnncnntgannnnnnnnnnnannnnnnnnnnnntnannnnnngnnnnnnnannnaannnnnnannnnnnnannnnnnnnnaaannanntnannncnaancnnnnnnccangnnnagagntnanancanaannannnnnattgnatnntnnntnncnanganatnnanttaatnnannnngnacacnangnnacgnnatgnnnnnntntnnnnntnnnnnnnttcntnnaagnnntnnnnnnncgnnnnttaggttangnganncnncnnntnnnntnanaanntncnnnncgnctnganntgnnananaatgntttnnntnttnnnttnananattnngttttnntnttnnttnagnnatnntnggtntnncnnnnntnnntannatnntannnnnatnntnncnnaanntcanntnnannncatnnnncnntncnttncannccattncatntnnnnnancnnantannttnnnnngnnnnnannnantnngtttanncnctnannntnaannnnnnnnnnttctctnccancnanaanngcngcngcgnnncngtnannnnaaannncantgnctntgntatnantttnanngtnnnnntctcnnnnnantgnnannntnnannnntnaannnnnntnnnannnnntncgnnnnnnngannggngcgannnnantcnantncacnncnnannccannnnnacnncntnnncntcccannccnnnnannngnnntnnnttnanntgnngnnntnatttaanttnantnnnnannnnngngnntnnactnnntntngngntnncnnnnctngaaatnaatnngatatgntnnnnnnnanaannntntgcgnttnttntnttcatannatnnnntntnnnnncnnnnnannnnttacacncnttnnnancgtatnnttngntacgctnttnnnnnnnntgntgtnngntngncnattccnttnnttnagnnnaangnnntnntnntatnntannnttatcnnatnnantgnttnanntannnnnnnnntctcnnccntnannnnanngttgannnnnnanatnnnntncttcanttnnntntannntatnnnnnnnnnncnatntannaananaanntanttttnnnntnnnttncnnnnnctcnanatctntantnnnnnnnacntncnannntnnnnttnntntanannanannnantntntanntnnntnatnnnnttngntnnaattngattnnnnnnnnnngannngnaannnnnttatnttnnntnnnnnnnanannanntancttatcntatcctcttacttccagaanncctttcattccntttttnngntgactgccaaatagaccttttntattacagtagaattcaaagctaccggtctttgtcggtgtaaaagttattttgatttcttcccctggtncaatatcttggtctatatttaatcctgcttcaggataattgagagtaaaattgtgagggacaatctttgttacactctttaatgtaatttctacaggtttatttacagctactattatttgattgggatcaaacgagtagctatctactataacctctaccctttgaatgccatcttctgagagtttagcttcaaatggtttggattcttcttgagcagcaaaagtcacaaaagacataaaacaatatgtgaatacacaaaatagagatttagaaacatatttcatttcattagcactcctttttgaatcattttgttaatattttatgctctcataatgtttttaccaagtaagtttcttatgccagatataattataaccactaataaacttgtttaatatggtaaactattttattntaataaattnactataatagttttttattttcatagagaactatcttaagttttaatattaataattcatgaataaaaaacttattttgataagaggaggagtgacaacgtggactttaaactcagtggagaagacctattacaagtaaagtgcaatcttttggttctcggaagatttgaaggagaggttattaagggcccggttaaaagggtggatgaggcattaggaggagctcttagcaggatatctcaggaggagaagtttaacggcgaaattgggaaaggcgtgatgataaatacacttggcaaaatccgtgctgaaagggttttacttattggtttaggaaaaaaacagaaattttcttctgatgtgttaagaaaagcaggaatatttacagcaaagagagctaaaccattttctgagagcatagcgtttggttttgcagttgatggaaaaaaagaaaacgcttcagcccttatcgaaggcataatgcttggaggttatgaattcaacaaatataaaacaaatgataaaaagtgggagggcattaaaaacgttaaatttgtctcaagcggtatcagagaaagaaactttaaagaagatctagaatatgcaagcattatctcagaagccaccaattttgcccgtgatttgataaacgaacctcctgtagttttaaccccaacaaaactttcagaaacagcaaaagagattgcgctaaaagaaaaacttgaatgtaaaatctttggcaaggaagaaatggaaaaaaagggcatgggtgggctccttgctgtgtccagaggaagtgatgagcctcccaaatttatccatcttacgtataagccaaaaggtagtatcaaaaaagcagtagcagtcgttggaaaaggaataacatttgacagtggcgggctatgtataaaaccaagggacagtatgcgtacaatgaagggtgatatggcaggagcagcttgtgttctcggggttatgaaggttatttcaaggctaaaacctcctatcaaggttcatggccttatttctgcaactgaaaatatgcccggagcaagagcctataaacctgacgatataattcgtgcattaaacggaaagaccatagaggttatagatacagatgctgaggggagaatcgtgctctctgatgctctttcttatgctatggaactaaaagtagatgaaatagttgacctggcaacactaactggagcttgtgttgttgctttaggggattatacagcgggtgtaatgggaaataatgagcgactgataaataggattataaaggcagcaaaacttgcaggagaaaaggtatggcaactacccatggacgatgagctaagaaaagagatagaaagcgacgtagcagatgtaaaaaacgttggtagccgcttcggtggggctattacagctgcaatgtttcttgagaaatttgtaggagataccccttgggcacatctcgatatcgctggtccagcattcattgagaagggcggtgaatggtatccaaagggcgctacaggctttggagttagaacaataattagataccttctttcgtgaatcgtgaatcgtggttcgtgacttcgcagtaagctcagtcgaacgtttcgatacacgatgtaagatacacgataaccgaaacacgaaccacggaatagattatacaatgccactaaaaatcattgaccctattcgacgatacaattttcttgagattgaactccacggcgaaatctcagaagaagaggagaggtttgttatacccttttttccaattaggagaaaactgacactttgggatttggaaaagatttttttacatgcatcgtctgctccgtctattaaagggattctactaaaaattagagagcttaatatcggtcttgcaagaggagaggcgataagaaggggtattttagagctcagagaaaaaggaaaaaaggttttcgtttacctcgaaaacccaggaaacattgagtatatgataggctcagctg

SEQ ID NO: 135 - DNA, 4000 bp, Escherichia coli
  misc_feature (1115)..(1115): n is a, c, g, or t
  misc_feature (1829)..(1829): n is a, c, g, or t
  misc_feature (1989)..(1990): n is a, c, g, or t
  misc_feature (2163)..(2163): n is a, c, g, or t
  misc_feature (2644)..(2644): n is a, c, g, or t
cctcacccatgaggacggcgaagagcgcgtccgcccctgcggcgtcctcgattgtgacctgtttcaggacacgtcggtcaggatccaacgtcgtctcccaaagttcctccgcgttcatctcgccaaggcccttgtaccgctggtaggtgacgcctttctcgccgagctgcgcggcgaggtcctgccgttgtttctcggtgtaggcgtagaagatttccttgccgcgcttgatcttgtacaggggcggctgggcaatgtacgcgtatcccgcatcgatgagcggtcgcatgtaacggaagaacagggtcaagagaagggtcgtgatgtgctgcccgtcgacgtccgcgtccgcagccgtcacgacgcgatggtatcggaccttcgacaggttgaactcgtccccgatcccccctccgatcgcggtgatcagggtccggatctcctcgttcttcagcatctggtccagtcgcgccttctcgacgttcaggatcttcccgcggaggggcaggaccgcctggaactcccggcggcgcgcctgcttcgccgatccgcccgcggacgcgccctccacgatgaacatctccgccttcgcggggtctctttcctggcagtcggcgagcttcccgggcaggttgaagccctcgaggagccccttccgtcgcgtgagctcccgtgccttccgggcggcctctcgggcctgggacgcgaggacggccttgccgatgcacgtctccgcgaccttcggggtctcgaggaagaactccgtgagcttctcgtacacggccgactccacgatccccttgacctcggagttcccgagcttcatcttcgtctgtccctcgaactggggctcggggatcttcacggacaggatcgcggtgaggccctcccggacgtcgtccccctcgagggactccccctgcttgaggtacttgtgctccttcgcgtagttgttgaacgtccgcgcgaggcccgccttgaacccgacgaggtgggtcccgccctcgactgtgtcgatgttgttcacgaacgtgaagatggactcgttgtacccgtcgtggtactgcatcgcgacctcgacgagggtgctgttggattgcttcgagaacgtgatnggatcgggatggaggggcgtcttcgcgcggttgatccacttcacgtactccgagattccgccgtcgaagcggaacacgtccccgcggccccgggccttgtcgacgatgatgatctccagcccggcgttgaggaacgcgagctcccggaggcgccccgcgaggatgtcgtagtcgaactcgatcgtctcgaacacctgcgcgtccggcctgaacgtcacgatcgtccccgtgccctctgcggggccgaggtcctcgagctcggacgctttcgtcccgcgctcgaagcgcatccgcttctctcggccgtcccggtggacgcggacctcgagccattcgctcagtccgttcacgacgctcaggccgaccccgtggagcccgcccgacacgcggtagagcttccgctcgaacttcccgccgctgtgcatccgcgacaggacgagctcgacggcgggcacgccgtacttcgggtggacatcgacggggatcccgcgtccgtcgtccgcgatggtcacgctgccgtccgggttgagggtcacgtggatcttcttgcagaaccccgccatcgcctcgtcgatcgagttgtcgacgacctcgtggacgaggtggtggagacctctcccgtcgacgctgccgatgtacatcgcggggcgcttccggacggcctggagcccctcgaggacctggatctgttccgcgtcgtacgcggtctctccngccatctaatccgcaaccttctgagacgtgatccggagcgccttccgcaccccatcccgagtgacgtccggagtatggtctgggccgttataaacgttcggaccccgttcgtatggagaaaaacaggggtcgggggacgaccgttttcgatgccgcttgnntaaatactgtagcacggccgctcgacccttcagactctcaactctgagagcatcctcgggacccgcggcgacgacccggctccgcgggccttcagcggcgcttccaccgcacaccgtcccgcgtgtcctcaagcacgattccgaggtccgcgaggcgcgttcgaatcccgtcngacgccgcgaagtcctttcgcttccgcgcctcctcgcgcagctcgacgatgaagtcgaggacgcccgacaggacgcggtccgcgtccgcggcggcccccggaaggatcgcgaggacttggtcaaacgctcggaacgcctcaagggcctcgtggacggcggtcctgcccgcgcccgactcgagcgccttgtttgacgcgcccacgagctcgtacaccgcggccacggcctcccgcgtgttgaagtcgtcgtccatggaggcctcgaagccctcccgcgctttcgcggcggcggcccggagggccgcgtcccccggacccgcgtctttcgcggtggcctccgccgccctcaggttctccaccgcgtcccggattctgcgatgggcggcccgcgcctcgtcgagcgcctcccgggtgaagtcgatcggcgagcggtactgcgcgttgaggaggaagaaccggagctcctcgggggacacgactntgagggcgtccgccacggaccagtagttcccgagggacttgtgcatctcctcccccttgacgatgagcatccccccgtgcatccagtacctgacgaagggcgcgacgcccgtatacgcctccgcttgggcgatctccgcctcgtggtgggggaacgcgagctcacgcccgcccccgtggaggtcgtactgggcgccgaagtggtggatcgtgatcgccgtgtcctcgatgtgccagcccggacggcccttgccccacgggccgtcccacgctggctctccgggcttctgggccttccagagggcgaagtccgcggggttccgcttccgctcgtcgatggccacgcgggccccgggccggtgctcctcgaccttctgcccgctgaggttcccccagcccgcgtacttcgtcgtgtcgtagtacacgctcccgtcctccgcgacgtacgcgtacccgcggtcgaggagtccctggatctgccggacgatctcgtccatgtagtccgtcgccttcgcgtacaggttcacggagtcgcagcggagggcggtcatgccctcgaggtactccgcccagtactcctcgacgagggacgtccagtcccggcccagggtctgcatcttctcgatgatccggtcctcgatgtccgtgacgttctgcacgtagaacacggcgtacccgcggtaccgcaggtagcgcgcgacaacgtcgaacgcgacgtaggtcttcgcgtgcccgacgtgggtcgtgtcgtggggcgtgatcccgcagacgaacatggacacccgtcggccacggagggggacgaactcctccttccgtcgggtgagggtgttgtacacacggaggggcatcgcgcggcccccatgagggcccccgctattaaggttcaccggggagacgaggcgaggccgcagacccttaaggcgggcgggtggcatgaggggtcccgtgacgatccccttcgcgccccggggccgcacggtggagacgatgcgggctctcgcgcggcgacggttcttcctcgcgtcgatcggcctcgcgtttggatctctcctcctgtccctcgcggccgcattcctcctcgcgactttccccgtcggcagcgtcacggtcctcgtcttcggcgcactcctccagatcctcgggtgtgcgatcgcggcccagtccgcggtcgccgtgtcccgcgggttccccctcagcgagcccgcctcgacgtcccggcggatcctcctcgcgtccgtcgcaggcgtcctccccgcggggatcgccctcgcggctgcatggatggccttcgtcgtccgggactccctcctcctgctccccgccctccccctgttctggggaccgctcggggcat

SEQ ID NO: 136 - DNA, 4000 bp, Escherichia coli
  misc_feature (1923)..(1924): n is a, c, g, or t
  misc_feature (1926)..(1928): n is a, c, g, or t
  misc_feature (1930)..(1930): n is a, c, g, or t
  misc_feature (1932)..(1934): n is a, c, g, or t
  misc_feature (1942)..(1942): n is a, c, g, or t
  misc_feature (1945)..(1945): n is a, c, g, or t
  misc_feature (1947)..(1947): n is a, c, g, or t
  misc_feature (1950)..(1950): n is a, c, g, or t
  misc_feature (1956)..(1958): n is a, c, g, or t
  misc_feature (1962)..(1963): n is a, c, g, or t
  misc_feature (1965)..(1967): n is a, c, g, or t
  misc_feature (1971)..(1973): n is a, c, g, or t
  misc_feature (1977)..(1978): n is a, c, g, or t
  misc_feature (1982)..(1982): n is a, c, g, or t
  misc_feature (1986)..(1987): n is a, c, g, or t
  misc_feature (1990)..(1991): n is a, c, g, or t
  misc_feature (1996)..(1996): n is a, c, g, or t
  misc_feature (1998)..(1999): n is a, c, g, or t
  misc_feature (3687)..(3687): n is a, c, g, or t
  misc_feature (3708)..(3708): n is a, c, g, or t
  misc_feature (3729)..(3729): n is a, c, g, or t
  misc_feature (3963)..(3963): n is a, c, g, or t
aattaatgcactagatttcgaaatagagttagaacaaaatctacttatacttcaaaaacagttgatatctcatagatacaaaccttcaagatctatttgttttgctgtgacatatcctaaaataagggaaatatttgctgcggattttaaggatagaattgtacatcacttactagtatcatatttagaaccatattttgaaaaaagattcatctactcttcttttgcctgtagaaaagaaaggggtactctttgtgctacaacatatatacaaagaagtttaagaaaaataactagaaactgtacaaaaaaagcttactacggacagttcgatataaagagtttctttacatgtatagataagggggtgctagaaaatatattaattaaaaatatcagaaagggatataaagataatactcagaaagaattaatatggctaaccaaagtaatactaaaaaacaatccaactcaaaacttttcaattagaggagatagtaatctacttaaacaggtacctactcataaatctctgttctatgtttctaaaaacaagggtcttccgatagggaatctaacatcacagttttttgccaatatatatctaaatgaattagatcaatatgtaaaaagagaattaaaaatcaaatactatactagatatgtagatgatatagtcgtactctctgataaccttgaggatgtgtataggtggagagaacagatagacacctttttaaagagaaaacttaaacttactctacacccaaataaagacaaatatggctctgtatactcaggtatagactttgtaggatatgttattaaacctagatataccctttcaagacaaagggtcgtaggtaatttaaaaaacaaattaaaactttttaatcaaggtcttttactagtatctcaaaatcagaaacaaactgtatttccactacatactccaccttctaaggaagagctttctaaaatgttagctatgattaattcttactatggtcattttagacatgttaactgttttaatttaagaaaagatatatatgagaatcactttggttgcttgaaggaatacttagagcctgtagagcagtattcatattttaaattaattaaataatatatatgggtagtacaaacaatttgcctttgtacagaagtgtgtacaaacttttaatatatctttactctttagttagtaattttaaaaaagagtataaatatacattgggtcagtcaataacagattgtatttgggaggtattagatagtgtaattattgctaataccctacctaatttaaaaaagaaagagtatatattaaaagctagtaatcattttgatatgcttaagactcgtattagggtagcatatgaattaaaactaatagataacagaagatatacattcattgttaatcagtttgaagagattggaaagatgttaagtggttggtataaatggagtactaaagccccaaattaagtaccgggagacacaacgaaccccgttgtttgtatttgtcttattgttgttgttggtatttccattgtttaggtttacgttccatgcgttatttgaattgttagagacctccgagctagaccaacgctaacatctttctactaacttgtttaccactgtaaaactgattaatatttcaactaaaaagttttactgtatattaatacctattaggtgtagtagaacggacttaaatatttgggctttctctactatctattgcctacaggaaggttgaatagtagactccatgcacttagatattacaatttgaaatagataatatcaagagattttaaaacaacccatccactttgtggatgggtaaattaaaaattactaaattaacaaattctaaacactagtcccgggagacacaacgaaccccgnngnnngnannngtcttatngtngncgncggtannnccanngnnnaggnnnacgnnccangcgnnatnngaatngnnagagacctccgagctagaccaataataattatctgtaacaaatgctgctgcagatgcctcgtctatacccgcctggttatatatcccatctatatatgcttgcatcaattctttttgagaaggtaaataccaatctgttcttcctgcaaaatctaatgtcgcacagtagtttattgctaaaccacaatcagaatctgaaccatcatatgaacttctaggaattgaagtaaagtaatcacatgaagccatagtaaaaatatttgacatagtaccttggtgtgcagaccaatatactccagttctctcatctctccatgctatatcctctcctactgacatattactccactctgactcttctccctgatagtcatcagttaatgtccctccccaacccaaataatcaccaccagcataatcatcatatgtactgtattgcatattactaaaatctattggtgttggaggtgtatatgtacctgttaatagagtacctgagttggaatagaatttcttaccctctagaacctgatctactgctgcatctcctagaaatgtccatgtacctgttaatagggttcctgaattagaatagaacttctttccactcattacatctgttactagtgcatcccccctatatgttgtagaacttactaccggtatcttaagtgtacctgttaaaagctctttagtatttgagtaaaactgtttaccttctaatacatcactctgtgaagcattacctaagaaatcaaactcctctggaacatatgtaccagtttgtaaatctctagatttattgtaaaaagtcttaccctctattacatcattagaggtaacagtaccctgaggtatccaattagaagcctcttgtattttttctactaccaactgtatatcatcatccgttaaatcctgtgtatatcctaactctactaacttaccatatatacccctaacatctccctctaactccgaaacattaacttctttatttggattaaagaaaagaaatattactgctaaggtaagtattactcctaagaagaatgtaaggattttattcatttaatatatatataacaaattaaagattttttaatatattaatgttagcagaatattaaaaagaagacaaacaaaaagggactcaaaagagtcccttttacaaccacaaagatccgtattacatcattccaggcattccacccatctcattagcatgagaatgctctttttcatcaggtatctccgcaacaacagcctctgtagttactaacattgaagctacagatacagcatttgttaaaactaatcttgtaacttttactgggtctattattcctgcctctatcaagtcaacaaattcacctgtcttcgcattgaaaccaacattccctttacattccgatgccacaactgccccatctgctccagcattctctgctatctgctttaaaggctcacttagtacagatttaagaatatcaatacccaactgttcatcagaatcctcaagtttaaccttctccaaagactttttggaattatgcaatgcaagtccccctcctgcgacaactccctcttcaattgcagctcgagtagcattaattgcatcctctattctcattttcttttcttttgcctccacctcagaagctgcacccactttaataacagcaacnccaccatcaagctttgccaanctctcctggagcttctccttntcatattccgacgaagtcttctcaatttgcgttttaatttcttttactctttcagaaatactgttttttgcacctttaccttcaacgataattgttttctccttcgtaactacaactctcttcgcagaacctagatctgttaattcaactttgtccaaagttttacctagttcctccgaaatatattctgcacctgttaatactgaaagatctttaagcatctctttttttctntcaccaaatcccggtgcctttattgcaacaacatcca

SEQ ID NO: 137 - DNA, 4000 bp, Escherichia coli
  misc_feature (1991)..(1991): n is a, c, g, or t
  misc_feature (1996)..(1996): n is a, c, g, or t
  misc_feature (2003)..(2003): n is a, c, g, or t
  misc_feature (2015)..(2015): n is a, c, g, or t
  misc_feature (2017)..(2018): n is a, c, g, or t
  misc_feature (2023)..(2024): n is a, c, g, or t
  misc_feature (2029)..(2029): n is a, c, g, or t
  misc_feature (2044)..(2045): n is a, c, g, or t
  misc_feature (2054)..(2054): n is a, c, g, or t
  misc_feature (2056)..(2057): n is a, c, g, or t
  misc_feature (2062)..(2063): n is a, c, g, or t
cgaaaatatcttcattcaaggattcagtttcctcaaagtccactacttcgttcataagtccatcggtatgttataggtttcacaatcggcatctaccatttcacgaatagccaaacggtctttcaaaaagtcctcatagggggctttcgcactttcggcaagcaagcccagcatggcagactgatattcgtttaccagcttactttctgtcttagccgggtattttgcagtaagcaacgtactgaaaatattatcagccgtcttaggatattccaccctcacgctgtcatattggaacatcgtgccagtggcacgttccacatcagtcgtaatctcaatgctaccctctttgtcggcaataaccttaacctctttgatattatggttataaaggaacgttccctgcccgttattaagagagtctatcacttccggcttagtcttagccagcaaccctgtagtcaaaacatttgcttccatcgttcaaacaattattaaaaatgaatttactgtgttcctccgagcatctgattatccagccatattcagacgggaagaggtgtttaatatccgtttcatctttgatttcgtatttattgatggtgcggtggaatttcttataaaaccttttcagaataccgcttcttagcaatatgccgtaatggttttgtttgaatcccacataatcaatgctacgagcatcaaccgggaatatctgccagttgcttttaatctctactttcaattcgccacccaagtaaagccccatcatgtcgagtacgaaatgcagtgcctctttgtcagcgcatagtatcaccatatcatccatatagcgatagtagtagattttcactccaaaacgcttcatcactatcttagccagttcctctttaacccaatggtcgaagtatgccaaatagagattagcaaaatattggcttgtgaaattgcctattggcagccctttgtctttaccgttactatctattatcttatccaacagccttagcagttgttcgtccgctatggtgtagcggattatctttttcaatgctacgtggtctatgttatcatagaacttcttgatgtcaatcttcaaacagaatcgtgtacccattctgtctatgattaaagccgtatgcacatcctccatacatttatgaataccacgccctttgatacaagcgtatgtgttcgcaatgaagaagttagtccagtaacgccccaacacattaataatgcaatggtgtactatcctgtccgggaagaacggggcaatcataatcaccctttctttcggctcatatataaccttaatccgatactctccgggggtataagtttcattgcgcaagtcccagtacaagccatccaaattctccaaaatattctcgttgaacttggttatttcggtacgctctcctttgccttgctgtgccttatattgcgcccgtatgaggttggagcattcatatatcaggtgatagacattcttaatcttcttagcttgggaaatgaatatctttcctgtatcaccgacatataaaccgcaatcctcaaaatccgagtattgataaaagcaggtatcagccgtataacataacccgtattcagtctttactacacccatttgtgccgttgttctaaaacagagctttcaattacttacttgcaccgtcctaatccatattattttaccaactatcagacgtgccgatagtccctgtgaggtaagggcgtggcagcaacagttataagttgaaaccacggtaaaagcggaacccaatgttcgcattcgcattcgaggaacgattattcgcattcagataaccgaaacccgcattcgcaccattattcgcattcgcagacaaaagggcaccagccgccacaaccctgttatgtttttattttttcaatccaacgccattttcgttgctccgttcaccgagttttgcagtccgtcaaaaacggcacaagcggaacccaatgtncgcantcgcatncgaggaacgatnanncgcanncaganaaccgaaacccgcanncgcaccatnanncgcanncgcagacaaaagggcaccataccagccagcagtaaagctggaatcatcagcaggcgtatagtaataatcacaatagcccttattacttgcacctcctaccttttcggcaaaggaatagcccttagcggaatgagccatagaaagtacatatccgtcagttcttgggaactccgtaatagcttcatatccggcaggcacggtagttgcactgtctgaatgagaggtgaatttggtcgggtcttcacatacataggcaatagaaacatcagccttatgccaaaccaacacatcatcagcaagcagccacaaatattcaaaaggagtctccaaaccacggtaagaggttacttgtaccaccttatcgccaccagtccatcccttgatagtgtaggacaccttacccgtgttgtttccaagcgttgcagtaacaccacaaggtacaaacggtttatagccgccccatgtattccattccgtaccatttacagcacatccactacccaaaccgccttgatggaatccgtcagcggtcagtgtttcggtgtaagtgtcttgacaatgcaaagaagcatattccacacgttgcaaccaagcaatttcattgtacaccctgtacgctccgtggtgtgtaccgttcttgcagaaaggacgaacaccagcctttgaaatggaagtacggggcatacccaacatggaattgtaagtaccatccttagcggcatcaccagcacccgaaccacctctgaattgtgccgcattcgctttgagaataacaaagccgtccgaatcccttgcaatctcatcgccattccaagtgagccaacagcccgaaacggctatagaattggtaatatccaccgttgcataccacgggcttaccgtctttcgttccatcttgataaagccgggcaacggatattcggaataggcacgaatccatttcgtcccctctatctccaatttgaagtaatattccggcttttcaagcattacattaccgtccgtgctgtcaatcacagccgttgcacccgaatcctttttacggctgtcattttggttaaggtaatacttaaccgaaccgtccgggttttccacaaagcgtttcagtttcgcttgaataggtaatgtacggtgcaaatccaaattgcccacacgctttagcttgtagtcctgtgaattgaaatcaccttgcaccccataccattggtcgtaaggatattgcggtttcgtgtttccgcttcctaataataatcccatagctataagttatttaatagtttcaccagcaccccaatacacatcatataccgaaaggtcgataccgtttggggatattacggttatcgctccgggcgtccaatccccgataggtacggggaacattccaaaatccttatcacaaatgagcttgcatttaagcagcgtgcttgtttccatcgtaacctctttaggtcgtacaaagacggtaaacggagcaccacccaaagcaaaaccattggaaaggtctgtaaccttacctttggaaagaatccgtaggctgtacatcgttgtttccataattcactgagtaaatcaagtttatttaactgcaaatataatcataaatgtgtttaatgaacacatttatagatacaattaaagtgtatcatcatataacgaggcataacgtgcttcaagttcattgattttatctcttaacaactgcctttcattatgcaatgcctttatctcatacggcatttcagaacccattagggcggcttcgtagcatttgattaccttataatcgctacttgccaatacctcctttgagcgttcaatctcatgtgccaccttttgaaagtcggggacttctatgtatctgaatgaaatcctatccccggcatcgtatggtacaatgcgcacaacatagccctctttatctgagttttgtttac

SEQ ID NO: 138 - DNA, 4000 bp, Escherichia coli
  misc_feature (2887)..(2887): n is a, c, g, or t
  misc_feature (2956)..(2956): n is a, c, g, or t
  misc_feature (2967)..(2967): n is a, c, g, or t
  misc_feature (3159)..(3159): n is a, c, g, or t
  misc_feature (3162)..(3163): n is a, c, g, or t
  misc_feature (3165)..(3165): n is a, c, g, or t
  misc_feature (3169)..(3169): n is a, c, g, or t
  misc_feature (3176)..(3177): n is a, c, g, or t
  misc_feature (3180)..(3180): n is a, c, g, or t
  misc_feature (3183)..(3189): n is a, c, g, or t
  misc_feature (3192)..(3192): n is a, c, g, or t
  misc_feature (3194)..(3194): n is a, c, g, or t
  misc_feature (3196)..(3203): n is a, c, g, or t
  misc_feature (3205)..(3211): n is a, c, g, or t
  misc_feature (3213)..(3215): n is a, c, g, or t
  misc_feature (3217)..(3220): n is a, c, g, or t
  misc_feature (3222)..(3224): n is a, c, g, or t
  misc_feature (3226)..(3233): n is a, c, g, or t
  misc_feature (3235)..(3235): n is a, c, g, or t
  misc_feature (3237)..(3239): n is a, c, g, or t
  misc_feature (3241)..(3243): n is a, c, g, or t
  misc_feature (3245)..(3249): n is a, c, g, or t
  misc_feature (3252)..(3252): n is a, c, g, or t
  misc_feature (3254)..(3260): n is a, c, g, or t
  misc_feature (3263)..(3263): n is a, c, g, or t
  misc_feature (3265)..(3268): n is a, c, g, or t
  misc_feature (3270)..(3270): n is a, c, g, or t
  misc_feature (3272)..(3272): n is a, c, g, or t
  misc_feature (3274)..(3276): n is a, c, g, or t
  misc_feature (3278)..(3278): n is a, c, g, or t
  misc_feature (3281)..(3284): n is a, c, g, or t
  misc_feature (3287)..(3290): n is a, c, g, or t
  misc_feature (3292)..(3292): n is a, c, g, or t
  misc_feature (3294)..(3295): n is a, c, g, or t
  misc_feature (3299)..(3312): n is a, c, g, or t
  misc_feature (3314)..(3314): n is a, c, g, or t
  misc_feature (3317)..(3317): n is a, c, g, or t
  misc_feature (3319)..(3320): n is a, c, g, or t
  misc_feature (3323)..(3329): n is a, c, g, or t
  misc_feature (3331)..(3332): n is a, c, g, or t
  misc_feature (3334)..(3338): n is a, c, g, or t
  misc_feature (3340)..(3341): n is a, c, g, or t
  misc_feature (3343)..(3344): n is a, c, g, or t
  misc_feature (3346)..(3346): n is a, c, g, or t
  misc_feature (3348)..(3353): n is a, c, g, or t
  misc_feature (3359)..(3359): n is a, c, g, or t
  misc_feature (3364)..(3367): n is a, c, g, or t
  misc_feature (3369)..(3373): n is a, c, g, or t
  misc_feature (3378)..(3380): n is a, c, g, or t
  misc_feature (3382)..(3385): n is a, c, g, or t
  misc_feature (3387)..(3395): n is a, c, g, or t
  misc_feature (3397)..(3397): n is a, c, g, or t
  misc_feature (3399)..(3404): n is a, c, g, or t
  misc_feature (3407)..(3407): n is a, c, g, or t
  misc_feature (3409)..(3410): n is a, c, g, or t
  misc_feature (3414)..(3417): n is a, c, g, or t
  misc_feature (3419)..(3422): n is a, c, g, or t
  misc_feature (3424)..(3431): n is a, c, g, or t
  misc_feature (3434)..(3436): n is a, c, g, or t
  misc_feature (3438)..(3439): n is a, c, g, or t
  misc_feature (3443)..(3443): n is a, c, g, or t
  misc_feature (3446)..(3453): n is a, c, g, or t
  misc_feature (3456)..(3459): n is a, c, g, or t
  misc_feature (3461)..(3463): n is a, c, g, or t
  misc_feature (3465)..(3469): n is a, c, g, or t
  misc_feature (3472)..(3472): n is a, c, g, or t
  misc_feature (3474)..(3480): n is a, c, g, or t
  misc_feature (3485)..(3490): n is a, c, g, or t
  misc_feature (3492)..(3494): n is a, c, g, or t
  misc_feature (3496)..(3499): n is a, c, g, or t
  misc_feature (3501)..(3503): n is a, c, g, or t
  misc_feature (3506)..(3508): n is a, c, g, or t
  misc_feature (3510)..(3510): n is a, c, g, or t
  misc_feature (3514)..(3520): n is a, c, g, or t
  misc_feature (3523)..(3524): n is a, c, g, or t
  misc_feature (3526)..(3527): n is a, c, g, or t
  misc_feature (3529)..(3533): n is a, c, g, or t
  misc_feature (3535)..(3543): n is a, c, g, or t
  misc_feature (3545)..(3546): n is a, c, g, or t
  misc_feature (3548)..(3548): n is a, c, g, or t
  misc_feature (3551)..(3566): n is a, c, g, or t
  misc_feature (3568)..(3573): n is a, c, g, or t
  misc_feature (3575)..(3577): n is a, c, g, or t
  misc_feature (3579)..(3580): n is a, c, g, or t
  misc_feature (3582)..(3586): n is a, c, g, or t
  misc_feature (3588)..(3595): n is a, c, g, or t
  misc_feature (3597)..(3599): n is a, c, g, or t
  misc_feature (3601)..(3605): n is a, c, g, or t
  misc_feature (3607)..(3607): n is a, c, g, or t
  misc_feature (3609)..(3609): n is a, c, g, or t
  misc_feature (3611)..(3614): n is a, c, g, or t
  misc_feature (3616)..(3616): n is a, c, g, or t
  misc_feature (3618)..(3619): n is a, c, g, or t
  misc_feature (3621)..(3624): n is a, c, g, or t
  misc_feature (3628)..(3629): n is a, c, g, or t
  misc_feature (3631)..(3634): n is a, c, g, or t
  misc_feature (3636)..(3640): n is a, c, g, or t
  misc_feature (3642)..(3643): n is a, c, g, or t
  misc_feature (3646)..(3659): n is a, c, g, or t
  misc_feature (3661)..(3664): n is a, c, g, or t
  misc_feature (3667)..(3667): n is a, c, g, or t
  misc_feature (3670)..(3670): n is a, c, g, or t
  misc_feature (3672)..(3672): n is a, c, g, or t
  misc_feature (3674)..(3677): n is a, c, g, or t
  misc_feature (3679)..(3695): n is a, c, g, or t
  misc_feature (3697)..(3700): n is a, c, g, or t
  misc_feature (3702)..(3702): n is a, c, g, or t
  misc_feature (3704)..(3715): n is a, c, g, or t
  misc_feature (3717)..(3719): n is a, c, g, or t
  misc_feature (3721)..(3721): n is a, c, g, or t
  misc_feature (3724)..(3725): n is a, c, g, or t
  misc_feature (3727)..(3730): n is a, c, g, or t
  misc_feature (3732)..(3755): n is a, c, g, or t
  misc_feature (3757)..(3758): n is a, c, g, or t
  misc_feature (3760)..(3765): n is a, c, g, or t
  misc_feature (3767)..(3769): n is a, c, g, or t
  misc_feature (3772)..(3776): n is a, c, g, or t
  misc_feature (3778)..(3802): n is a, c, g, or t
  misc_feature (3804)..(3809): n is a, c, g, or t
  misc_feature (3811)..(3830): n is a, c, g, or t
  misc_feature (3832)..(3832): n is a, c, g, or t
  misc_feature (3834)..(3836): n is a, c, g, or t
  misc_feature (3838)..(3839): n is a, c, g, or t
  misc_feature (3841)..(3847): n is a, c, g, or t
  misc_feature (3849)..(3855): n is a, c, g, or t
  misc_feature (3857)..(3857): n is a, c, g, or t
  misc_feature (3859)..(3880): n is a, c, g, or t
  misc_feature (3882)..(3886): n is a, c, g, or t
  misc_feature (3888)..(3900): n is a, c, g, or t
  misc_feature (3902)..(3914): n is a, c, g, or t
  misc_feature (3916)..(3944): n is a, c, g, or t
  misc_feature (3946)..(3953): n is a, c, g, or t
  misc_feature (3955)..(3961): n is a, c, g, or t
  misc_feature (3963)..(3967): n is a, c, g, or t
  misc_feature (3970)..(3970): n is a, c, g, or t
  misc_feature (3972)..(3981): n is a, c, g, or t
  misc_feature (3985)..(3994): n is a, c, g, or t
  misc_feature (3997)..(4000): n is a, c, g, or t
gcgcggcaggaaacgcagcgggcgggaacagccagcccgagcgtatcatcgccctccttggcggacgggagaacattgaatttgtggacgcctgcatgaccaggctccgcgtgacagtgaaggatctctccaaggtggctgaacttccggcgtggaaggcagagggcgccatgggccttgtgaagaaagacaacggcatccaggcaatttacggacccaaggcggacgtgctgaaatcggatatcaacgatatcctgtaacaattcagcaccccggaaaaaatgagtgaaatatgaacggggagcctgctcaccgggcagattttgctcaatacgcagaggaaagaactatgagactgcttactatcaatattcacagccatggaagtgactttgaaccggaactttatcatcagaagatgaaggcgctggcggcatttatgaaggaagaagagatcgatgccgcggcgatccaggaatgcagtgaagaggaggacaggccggtggtctccggccccctccccatgcattgggtgccggccggaccggactcccgcgtccgggaggataactgtgcgctggtcctggcggaggaacttcagggcctgcagcaggagtactggtggacctggaccggagcgaagctcgggtacggaaaatacaatgagggtctggccatcttcagccgccgccctgttacaggcgcggacagtttctatatttccggcgtccgggacttctccaactggaagacccggaaggcgctggcggcctgcaccgctgacgggcctgcctttttgagcgtccacatgggatggtggaatgatccggaggaaaacttccgggggcagatggaacggctgcagaaggcgctccgcgaaaggaagcttcgtccgcaggacggttctgacagtttccttatgggagatttcaacagtcccgcagcgatccgcggagagggaagggacatggtcctggacctcgggtggcgggacagttatgaggatgccgaaataaaagacagcggcatcaccgttccgggaaacatcgacggatggagggacggtgaacatacgggcatgcgcctggattatatctggaccgcaaaaaggcacagggtgcttcagtcaaaggtggtcctgaacgggatcagcgggccggtgctttccgaccatttcggagtcctggcggtgatcgaatgaataaaggagcagacagcatgagagaaagtggaattcttcttgccatcagcagccttccttccgaatacgggatcggctgcttcagcagggaagcatatgagtttgcggaccgcctttcagaggcgggccagagttactggcagatcctgccgctggggccggtgggatacggagattcaccgtaccagtccttctccaccttcgcgggcaacccttactacatttcacctgagacgctggtggaaaagggatggatcactgaggcggactgccgcgaagccggcctttcttccgacccgcgcggtgtggattacgtgctgcagtaccaacgccgctatgagctgctccggaaggcgtacagaaacagccggatcgaagagaatgagaagttccgggcgttcacggagaagacggaatggcttccggactacgcgctgttcatggctctgaaggaagagaacggaggaaggccctggtacgaatgggaagatccgctgagactcagggatccggaagccttggccgcggcgcgggaacgcctggaggaaggcatcggtttctgcagtttcctgcagtttgagttttacgaagagtggatgcagctgaaggactacgtgaaccggaagggaatacggatcatcggagacatcccgatctatgtatccctggacagttcagacgtctgggcggatccggaacttttccggctggatgaaaaccgccgacagaccgcggcggcgggctgcccgccggatggcttcagcgctgtgggacagctctggggcaacccactctatgactgggactatcacaaaaagacctgttttgcctggtggctgaaacgtcttaaaaactgctttgatatttatgatgtgatgcggatcgaccatttccgcggcttcgatgaatatttttccattcctgccggtgcggaggacgcaagagcaggccattgggagaagggacccggcatggatctgttccggaaggtctcggaagccttcccgggacgggagatcatcgcggaggatctggggtatgtgacggacagtgtccggcagctggtgaaggacagcggctatcccgggatgaaggtcctggaatttgcctttgactcaagagattccggctgtgcggaggattaccttccccacaattacgaaaagaacagtgtggtctacaccggcacccatgacaacgagacggtgaccggctggttttccgagggcctgaagccggaggagaaggaggcagtcagagactatttctgcgaccatacgactcccgacgccgggatgcacatacccctgatctgcgccgccatgcgaagcgtcagcagactctgcatcatccccatgcaggaccttctggggtacggaaacgaggcaaggatgaacgctccttccacctacggaaacaactggaaatggcgtcttctgaaggatgaattcggagagaaggaagtgaagacgctgtatgagatcacgaagcggtacggaaggatcggaaaatgagaaaagaggacagtgaataattaaaaagctctttaccgccagtcagagcaataatcggctggcggtattcttatgccgcagcatcgaaatgatcatggaattccgcaggtgtcatcagatgcatcttccgctggatccgctctgtgttgtaatacctgatgtaggattcaanagcagtaatcaggtctccttttgaggtgaacttcttgccatagtacatttcccgcttcaaaataccccngaaaccttccntcggcccatggaaaaaatgaaaaagccaatcgatatcttcgagaggctgctttggaaatcaggtatgctttgtctgacctgtcaaatgcattattcgagctgtccacatctcccgaagatatcgatgatgataacaatcttgaatgacgattgatttaaagagggttaaaaaacataggaagttaaggatanaanncncggngaaaaannttntgnnnnnnnaananannnnnnnnannnnnnntnnntnnnngnnnannnnnnnnancnnntnnnannnnnaanannnnnnnaantnnnnangngnnnanaannnnggnnnnanannaaannnnnnnnnnnnnntnttntnntcnnnnnnntnncnnnnncnntnntngnnnnnngcggcngaagnnnnannnnngagannngnnnngnnnnnnnnngngnnnnnnagncnnagannnngnnnncnnnnnnnnagnnncnnaagnttnnnnnnnncannnncnnngnnnnngantnnnnnnnggcannnnnngnnnannnngnnnagnnngnggannnnnnnctnntnntnnnnngnnnnnnnnncnngnacnnnnnnnnnnnnnnnncnnnnnntnnngnnannnnnannnnnnnngnnntnnnnntntntnnnngngnngnnnncganngnnnngnnnnngnngcnnnnnnnnnnnnnnannnnaanaanangnnnntnnnnnnnnnnnnnnnnntnnnngncnnnnnnnnnnnngnnnangannannnngnnnnnnnnnnnnnnnnnnnnnnnnannannnnnncnnncannnnnannnnnnnnnnnnnnnnnnnnnnnnngnnnnnnannnnnnnnnnnnnnnnnnnngngnnngnnannnnnnntnnnnnnncncnnnnnnnnnnnnnnnnnnnnnngnnnnngnnnnnnnnnnnnngnnnnnnnnnnnnnannnnnnnnnnnnnnnnnnnnnnnnnnnnnannnnnnnnannnnnnngnnnnnganannnnnnnnnnaaannnnnnnnnngannnn

SEQ ID NO: 139 - DNA, 4000 bp, Escherichia coli
  misc_feature (738)..(738): n is a, c, g, or t
  misc_feature (1669)..(1669): n is a, c, g, or t
  misc_feature (2868)..(2868): n is a, c, g, or t
  misc_feature (3028)..(3028): n is a, c, g, or t
  misc_feature (3077)..(3077): n is a, c, g, or t
  misc_feature (3130)..(3130): n is a, c, g, or t
  misc_feature (3133)..(3133): n is a, c, g, or t
  misc_feature (3155)..(3155): n is a, c, g, or t
  misc_feature (3217)..(3217): n is a, c, g, or t
  misc_feature (3352)..(3353): n is a, c, g, or t
  misc_feature (3435)..(3435): n is a, c, g, or t
  misc_feature (3587)..(3587): n is a, c, g, or t
  misc_feature (3609)..(3609): n is a, c, g, or t
  misc_feature (3675)..(3675): n is a, c, g, or t
  misc_feature (3689)..(3689): n is a, c, g, or t
  misc_feature (3753)..(3753): n is a, c, g, or t
  misc_feature (3947)..(3947): n is a, c, g, or t
  misc_feature (3962)..(3962): n is a, c, g, or t
  misc_feature (3995)..(3995): n is a, c, g, or t
taacttgcgatattgaaaatttatttttgccaattttttttttaagaaaattattgtctataccagataaataaatatttccaacaaaattttggagatttaaaccagacatcttccaaaatgaattcgtttttggcttagttaaattaacacttttaactgctggtatttcttttgaaaaaaaggtttcagaagtataaactttaactacgtctattacacgcctttgttctttttctaatttagaaacttttttttttgctttttcgcttccactccaaattccagatttattatcaaacgaacaactcgcaaataaaataaatatcaaaaaaaaaattaaatattttacctttttaatcatttgtaataaatattaactgagatctggcgtggttatataattctttatgtaaattcttcaaagataaaatctgcacataaaattcttttgcctttaaatattcttttttagaagcaaaataatctccaagcaacaacaaggcatgtggcttccatactgtctctgtgtttattaatggttttacagcatctaacaactctaactcgcttacaaaatttgattgaaatagtgcctttttaaaaattattaaatttttaacttctttttcaaatttgttattttctaagacgtgatcaaacaaattagacagttctccttgatcaactatcaaattttcattcaatattaaaaaaagagataaagtcgaataagtnctgtcattagcgaaaattattgtttttaaaatatttttcactttattcctgtcaccattctctaagtaaacttttgctgctagataattgtctgacaaaagtatttttttcttttctttagtttctgaataaaaactaacagaagcaatagcaattattagaattaatataactgaaaaaattaaaattttatttacttcataaaacttttttagtttcgatttttttgttacatcatattgagtttcgaataaattttcattcatttaaataattattttaaaatctatacacattttgagaagatggaaattttctgcgttttatatcactacaataattcttaacacttttttctattattttttttacattagaatactttttaacaaatcttggacgaaaattacttaatcctatcatatcgtcagtaacgagtatttgaccgtcacaatatttagatgcacctatacctatagttggaacagaaacgctatcagtaattttttttgccaaactctctacaacacattcaattactattgcaaacaccccagaatttgaaagagccatagcatcttgtaaaatttgttttttttgaattaagtttttaccttttaatttaaaaacttttgaagactggggcaataatccaatatgacccataactggaattcctttctttgtgagatatttaattatattaactatttttctccccccttccaacttaactgcgtcacatttggttgatttcattaccttttttacatttttatatgcaataaatttatttgaatatgttttgtggggcatatcaaaaactacaaaacttctcttagcagagtttttgactgctttcccatgaagaatcaaagtttcaattttcacttcccttgttgttttcattccatacaaaaccataccaacngaatcaccaaccaaaattatatcgcaatatttgtcaataatttcagccataggttttgaatatgcagttaagcaagtaatgggttcttttccttttttttctaaaatatttttaattgttatcccttgcattttagggtatcaatttatcaaatttttcttggatttctgccctttttgaacaaaaggattcgcaaactagattaaattttttaatcagttctttagcttcattataatctgattgtttaattttaagaagagtaagcatataaatagcttcatcattttgtggattcaataaaagaacattgcttaaattcatttcttgttcttgatcgttattattttcattaaaaattttagctagatataaatatgatttttcactttgaggattaaatactatatctttttcaaagaaaattttggatttctgaaatttttttttatcaaaaagtatttttcctttatcaaagtagttagatttgacggcaaatccacttgagataaaaaataaatatataattaaaatttttactagaaaataagttttcttcataatttaaactttaaatttttgatcatatttacattatgtatcataccttggaaaagttaaaggattttgaaatccctttacaataaatataaatttctttggattcttttctgctagataagggtttgtatttaacaacttttttaaagtatttattagcttttttatgaatttcgataaatatagatcccataaataatttagataaaaaaacaccatctttatgtaaaattttttgcactaaatccattgcccttaaacaaagctctccagttctataagaatcaagatctttattgccagaagtgcttgcggccatatcagatataacgacatcaacttttttatcaaaataagcacaaattttctcataaattacagaatcacacaaatctccttttaaaaaattaacgttatcaatattttccataggcttaatatctactgctaaaattttccctttagttattatttttgttactacttgcgaccaacttccaggactagagcccagatccaataaaaatgtatttttttttaagaatttaaactttttattcatttctattaatttaaaagcagacctggatctgtaaccctgaatttttgattgcctaaagaatggatctttgtgttgnttaattaaccaattttttgaaattttattttttttcaattatttctaataatttttctaaatcattaatgtaaagattttataaaacatcttccgtttcttcttctttaactatagtcatagattttttgtttatatatcgataatgaagataacttatnggaagcaacaaaatataaattaaaccactaaaaaataaggttttaaaantataaaaaattaaaagacttaaatatattccaattcctagtaataaaaaaatngtnaaatgtcttggaatcaaaattnttttcaatgagtaagtgggtattttgcttaccatcaaaattgataccattaaaataactatngaacttataattgcagtattttcaaattgaactaaatcacttaaatttagaataagaggtaatagtatcaaaccagcagcagcaggtgatggaattccttcaaaaaaatttattttccatgtttctgtttcttcnncaacagttaaattaaatctcgctaaacgaagagcgcagcatacagtataaattaaaacaagcatccatcctatttttcctanttcatttaacgtccaaaaatacattacaaaacttggtgctacgccaaaactaataacgtccgtgagagaatctagctcttttccaacctttgaagtggctttgatcaaacgagcaactcttccatcaagagtatcaagaattgcagcaaatnctattgcaattactgacatcgnatagtttgtatctaatgcaaattttattgaacttaatcctaaacaaacaccaaaaatagttaacgngtttggaagaaganatctaggatttttttttgaaataagtttaaattcctttttattttcgagcatggttctatattntttttgctaataaagtttctccggcaactgtgttttgatttttacaaactagtaactgataattttcaaaatataagtcaactttactaccaaatctaataattccaaacctatccccttgtttaattgtgtctcccactttgacatcgcaaactattcttctagcgatcattcctgcaatttgaacaacaatnaattcgtctccgttngaattcttaagtttaagataatttctttcgttntcttc

SEQ ID NO: 140 - DNA, 4000 bp, Escherichia coli
  misc_feature (135)..(135): n is a, c, g, or t
  misc_feature (724)..(724): n is a, c, g, or t
  misc_feature (1976)..(1976): n is a, c, g, or t
  misc_feature (1981)..(1981): n is a, c, g, or t
  misc_feature (1988)..(1988): n is a, c, g, or t
  misc_feature (1993)..(1993): n is a, c, g, or t
  misc_feature (1997)..(1997): n is a, c, g, or t
  misc_feature (2001)..(2001): n is a, c, g, or t
  misc_feature (2006)..(2006): n is a, c, g, or t
  misc_feature (2010)..(2012): n is a, c, g, or t
  misc_feature (2015)..(2015): n is a, c, g, or t
  misc_feature (2017)..(2017): n is a, c, g, or t
  misc_feature (3191)..(3191): n is a, c, g, or t
  misc_feature (3235)..(3235): n is a, c, g, or t
  misc_feature (3545)..(3545): n is a, c, g, or t
  misc_feature (3681)..(3681): n is a, c, g, or t
ccaatcaatatgtggaaaacggttcttatctgcgtttccaaaatatcacgttaggttataatgtgcctactgaatttttgagttttacaaagtatgtatcgggattacgggtgtatgcttctttgcagaatttcnttacgataacaagctattctggtgataatccggaagtcagcaaatatggtcaggataacctgggagccggatatgatgcattctcttatccgtttgcaaagtcagtattgtttggtttgaatgttaaattctaaaagagtctaagtagtttatgaaaaaaatagcatttataatattgagttcggtcatgatgaactcatgtacggatatgaatctgataccggagtctaatctgagtcctgaaaacttctttaaatccgaagaggatgcaacagctgctgtttatggaacgtattcggtttttaccgataatgatatttataaccagttttgggaagtattgcagagtcagggtactgatgattgcgagtggagtggtgggcgcacgacgactaacctggacaaaaatgctttagataaatttgagtatgatgggaatacgaatttagtttactccgtttggattaagcactatgtggcagttaaccgctctaacttcgcgatagaaaatatttcgaatatggggagcgaacagataagagatgatgtcaggaagcggctgatcggagaagctaagttcctgcgggcnttggcctattttaatttggttcgcatatatggaggagtccctttagtattgaagcaaaccacttcgttggatggcttagaagttccccggaatacagttgacgaatgttatgaacagattatctcggatttgcaagaagcaaaatctgttcttcctgctatcgggcaacttccagagggatatttaggacgggcaacaaaagggtccgcctctgctatgttggcaaaagtttatttgacccgtgaagattatcagaatgtagtgaaggagacgtcggaagtgatgcagatgggatataaattatggaagaattatgctgataattttgatgtggaaaaagaaaatggacaggaatctatatttgaaatccagtataagcggaatactccgggtgtgtcgggtagtaattacaacggatattatcgtcctccgtttgtcaatataaatggttgggtcggatatggagatgatccagtgacacgtaatcattatgaatgttacgaggaaggtgatttgcgtcgggatgtaaatgtgcgtctttatacgaaggaagagtatccgaatatgtcttccaattatgagtttccttgttatgtaaataaatttcaggatccttcgccgttggccgtaagatctcaaggaggagaaaataattatccgatattgcgttattcggacgtctatctaatgcgtgcggaagccttgaatgcaataaatacttctgatgcagaggcgtatgagtgcttaaatgtcatacgtcgtagggcttttggacttaatatgaacgaggcttctgctattgatattaagctaggattgagtaaagaagatttcttggatataattcttttggaacgtcgtaaagaatttgcatttgaaggacaacgtcgttttgatttggtacgtacgcataaattgaaggaagccatgatggcgcagaatccgactattggtgctgtggtagaggaaaaacattatctgttgcctatacctgtgacagaattggatgcaaataagttattagagcaaactccgggatggtaaattaagtattatatgaagagaagaagttttatcagaaacataagttctttaggtttggcatctgtagcagtgggaacatcttttgctgcagaaactcctcaaagtaacagtttgccgggaaaatcgaaaataccggtatatgatgggtgggacgtaatagttgtggggggaggaccttcgggatgtgctgcggctacggctggggggnggggngggggcnaaaantttnttantgganggannnggngncttaggtggaatggggacttctggcttactgaatgcgtggtgcccttttacggatggtgagaagattatttataaaggaattgcggaacgggttttttccgagtcaaagaaaggtgttcctcatattcattatgataattgggtgcctataaatggtgaatatctgaaagtcgtgtatgacgatttggtaacctctgagggcgtatctgttctttttttcacaacaatggctgctgtcgaaatgaaacgtaagggggttgtcgatgcaatagttgttgctaataaagcaggattgtcaacttacaaagctaaagtatatattgattgtacaggcgatggtgatcttgcggcttgggctggtgctgattttgtaataggagatgagagtggttccgttcaagaaggtactttgtgctttaccttgtcgaatgtcgacccttatgagttttctttaatagggaatgtccatactaatcggaaggatggtccgattcattctatttatggtaaccctaaatacccattggtgaaagataagcacatgaatgacaagttaatcggaccgggtatcttaggattcaatgccggtcatgtgactgttgatagtacagatccagtatctttgactgaagcaatgataaaaggacgtaaattggtaagacagttacatgaaggattggtcgagtttgaaccaaagtcatttggtgcttcttttttggcaagtacggctaatttgatgggaatcagggaaagtcgccggataaaatgcgattatacattcacattggaagattggctcgctcgtaaggagtttgaggacagtatcggacgtaactgttattatattgatgtccataaacaggatgcaaccgtgtatcctcgctataagaaaggagaatctcatggaatcccctttagttgtctgactcctgcgggtttgaaaaatgtaatggttgcaggacgttgtatctcgacggattcttatgctcatggtagtctgcgtgtgatgccaccgtcgcttgtaacaggtgaagcagttggtgttgctgccggtcagatttgtaaatccaaatctcctgatatacataatgttgatattcaaaagttgaggaaacgattgaaagaagtaggtcagttgatctgatgtaaatggatactcgtctgttattttctngtttaaacaaggaatcggcagacgggtatattatgtcctatagngggtatatatgtagatgaaatattgtgtacattctgttttaaagttttaatttgactattgctaataaatatgaagcaaatcgttctgattctatttttatgtattgtaggctgttcctttgtatggggacaagatgcgaattattatcgtaatcccgataggatttatctggattcaaaagatggacaccaaggtgcattcctttggaaaatgaaaaaagcaggagatgttacagcctgtgcggaagccgtgtcgaagcccggatataagacgggtgactggatgccggcaattgttccgggtactgtnctaaattctctcgtatataacaaagtgtatcccgaaccttattatggattgaataataaactgacgagcaatatcattccggatttgtctgttgtcggacgtgatttttatacttattggtttcgtaccgatttcntcgttcctgctgattataaggggaaagtcatttggttacagttggacgggatcaattatcgggcggaagtctgggtaaacggtcatttgctgagtaatatttccggcatgtttattcaggattatgtggatataacagagttcgcccgagtaggcgaaacgaacgctttggcagtaaaagtctatccggtcgatatgtctggaaccgtcaaacaaaaacagtggggagctgtaggagaatttcataacggtggtgacgggaatatagggctgaacacgacgatgctgatgtctgtcggttgggactttactttcttgga

SEQ ID NO: 141 - DNA, 4000 bp, Escherichia coli
  misc_feature (44)..(44): n is a, c, g, or t
  misc_feature (79)..(79): n is a, c, g, or t
  misc_feature (124)..(124): n is a, c, g, or t
  misc_feature (136)..(137): n is a, c, g, or t
  misc_feature (142)..(142): n is a, c, g, or t
  misc_feature (157)..(157): n is a, c, g, or t
  misc_feature (262)..(262): n is a, c, g, or t
  misc_feature (265)..(265): n is a, c, g, or t
  misc_feature (268)..(268): n is a, c, g, or t
  misc_feature (270)..(270): n is a, c, g, or t
  misc_feature (274)..(274): n is a, c, g, or t
  misc_feature (334)..(334): n is a, c, g, or t
  misc_feature (363)..(363): n is a, c, g, or t
  misc_feature (397)..(397): n is a, c, g, or t
  misc_feature (402)..(402): n is a, c, g, or t
  misc_feature (415)..(415): n is a, c, g, or t
  misc_feature (418)..(418): n is a, c, g, or t
  misc_feature (422)..(422): n is a, c, g, or t
  misc_feature (426)..(426): n is a, c, g, or t
  misc_feature (2560)..(2560): n is a, c, g, or t
  misc_feature (3662)..(3662): n is a, c, g, or t
  misc_feature (3914)..(3914): n is a, c, g, or t
tggatgcttaggacagacaatctgttatgatttacgtttccctnatctttatcggaatttgtcgcaatctggcgcaganatattatttgtacctgcggtatttacaaaaaaaacaggtgcggcncattggcatgtnntaaanagagcgcgtgccatngaaaacggagcttttgtggttgccccgtgtgcagtcggcaatgttgaaggtggaggaggaggctacggacattcactgatcatcaatccgtggggtgaaatactngcngangnaggngcagattcagggtttatcaatgtaaatattgatctggaagaggttagttctgcgcgaacncgaattccaagtcttagtcatgacaaagncttttcgtcttagcttgcgataaaatcacaaaanccgtnttaataaaatatnccntaanttgntttaagctgagcaataatatctcgcagatttgtgtcatcttcaatttcaagactcagtgcatattttgtttcaacctgatcaacaaactccacaatcaccaccgagtcagctccgcagtccaaaattggctgatccagttccggttccagcgagacgacatttttgaaaagcgcagtcagttctgtctcaagcgaaggtttgttttctgcaacgtcaaaatcttcggtctcctctgaactggaaacgcgctcaatgagtcccgcaaaagtatcatcagcaaaagtatttctgtttcgaagatgctttatttttccgctggaggtttttgcaatagtacccggttccagatacaggcgttcactgggtgctatttgaaaatgtttgccgacgatttcaataatttgctgatcaatggaagtcaaaacgtatttacggaaaacatcaatgtctttaatcaaatcagcgcgaacttccactgccaccgccaaatgttctgactcatcttctgctccggaagcataagccatcaagcatccaggccgtaattcttcaattcctgcgagtaccagttcaatatcatgcggataataatttcgtccgcgaatgatgatgatgtctttgattcttcctgcaaaatataactcgcctttccagagcaaagcagtgtcgccggttgcgagaaaaggctgttctttgccaataattttttgccggaaaatttcttcggtggcctgtttgttttcgtaatatccttgcgcaaccgagggtccgctgaccatcagttcgccgacttctccttccggaagttgttgattttcaaggcctttgatcacaatttcgtgaccatccatttgtgaacccagattgaccaacatctttttgtctgttgccggtgcatcgtcgttcaggactttgacccgtccttctttttccaaaatatgccgatccacgcaaagtccatggagtccggttttgctgccggaaaacatgatcactatttccgccattccaaagccgggacggataacatccgcttttaaaccacatgcagagaaacgctcattaaactttttggttggtaaataatgaaccggttctgaaccgtctgtcacggaaaccatgcaggataaatcgagttgctgcaactcctcatctgagatttttttcaggcacaaatcaagcgcgaagggcggtacataactatgtgcgcacttgtattttgacattgccgcaagccagcgtagtggtttacggataaaatgcgcgggcgtcatcaaaaccgtaaaacctccggaataaagcgcacccataagtccggcagccaagccaaaatcatgaaacagtggtagccagaccgcggtgccgtcttcctcttcaagctgcatgaacttgcgggcttcttccaaatttgccatcaagttactgtgcccaatcatgatgcctttcggcgtacctgtgcttccggaagtgaactgtaaatatgctgtgtcctcagctttaatttccggtgcagaatattctgcggaagtttcagcaagtatttcctgagcagtcgcgatttctagtccgctgaaaactttttgcagttccggtggtaattgattgcgtaaaaattccgccagttgagagcttactattattaaacttggtttgctgacttttaaagttggcaaaaaagtttccagataagccgccatattttgcggtcctgcaggttccgacaatggtaccgcgaggattcccccatacaaacaaccgtaaaagattttgacgaattccaaactgtttggcagaatgaccagcacacgctcaccttgtttaatgccgcgtttttgcagggaagcagctacttgacacgcagcctgatcattttgttgataagtcatcgaagcggaagttccgccgccgacagtcttattttctccatcttcgaggaaaataacacagtctctttcaggatgttctactgccctttgccgggcaacttcgacgaaatgtgagtaattgcttggtttcatgttttcaggttgattgctttaaatttggtgttctgttatcaaaagaatatttttcattgaagcacagtctatcacataaaagtctgacctcaagaaaaaaggtgctgcaactgantactgtaatatttttttaacaaatttcatagttgttgaaatcacctcttcaaattcctgatcgagaatgacaacgtgtcttgatttctccatccaatgcgattcacggactgcagactgaacaccgcggaaaataatctcaccgctatttaaatctacggtttcatccaaatttgcctggatgatcaaaattggctgataaattcgagcaagacgcttttttatgtcagcttgcaatttcagcagttgtacaccggctttcagaggattaactttgtaaccttgccacggcattgcgtctcggtcatcttcagtttttttgggcacagcaaaaacgaaaggagaagcaacaaccataaaaagtttacgcagcagtgaagaggcaagtcgcattgcgggagcatacagcagcaaggctttaatttcaggatgttctgtggcaagatgcagcgcaaggatgccgccggtagattctccgccaacaataactcttgaacattttttctgtagttcagcgtaggctttttcgcagactgcaatccattccctgcgatgagtatgactcaacttctcaggagttgttccgtgtcccgggagcaagactgctgaaacagtgaatccttcatcatgaaaacgcttggccagtgggcgaacttcagccgtagttgcagtaagaccatgcagcaaaagaacaccgtcagctcctccttgccaaaaaaaaccacctccttccagctcaggatttaccagaggaggttctgctgagattgatgaatttgatagttcaggcttgatttgggaacggttcattttgtttgtttttaactatttttatttagtctttaaattacacgatttccgtaattatcagcaggtatcgtctgttgtgttttgtgttttgtcttgatacaaaaatcagcaagttatagactagattgttttattctcaactattaagtctatagtatttttagtctaggttctttatgattcgtgttcaagcactgagcaaaaattttaacaacttccaggcagtcgatcaagtttcatttgaggttcagcgtggagaagttttaggttttctaggtccgaacggcgcaggnaaatctacaactatgaaaatgctgacctgttttatccctcccagttcaggcacagctgatatttgcggctttagtattctggacaatcctcttcaggttcgtgctcaaattggttatcttcctgaaagcgcgccttcttatgacgaaatgctggttggagagtttctcagttttgtcggcgagatccgcggttacagcggtaaggaacttcaaagaagagtcagtattgtgaccgagatgactgcgcttggngaggtcaaagatcaaatgatcgagactctttccaaaggttttcggcagcgtaccagtcttgctcaggcattgattcatgatccgcc

SEQ ID NO: 142 - DNA, 4000 bp, Escherichia coli
  misc_feature (1)..(9): n is a, c, g, or t
  misc_feature (11)..(46): n is a, c, g, or t
  misc_feature (48)..(116): n is a, c, g, or t
  misc_feature (118)..(122): n is a, c, g, or t
  misc_feature (124)..(241): n is a, c, g, or t
  misc_feature (243)..(243): n is a, c, g, or t
  misc_feature (245)..(554): n is a, c, g, or t
  misc_feature (556)..(562): n is a, c, g, or t
  misc_feature (564)..(567): n is a, c, g, or t
  misc_feature (569)..(595): n is a, c, g, or t
  misc_feature (597)..(597): n is a, c, g, or t
  misc_feature (599)..(695): n is a, c, g, or t
  misc_feature (697)..(801): n is a, c, g, or t
  misc_feature (803)..(920): n is a, c, g, or t
  misc_feature (922)..(1222): n is a, c, g, or t
  misc_feature (1224)..(1266): n is a, c, g, or t
  misc_feature (1268)..(1270): n is a, c, g, or t
  misc_feature (1273)..(1274): n is a, c, g, or t
  misc_feature (1277)..(1281): n is a, c, g, or t
  misc_feature (1283)..(1286): n is a, c, g, or t
  misc_feature (1289)..(1290): n is a, c, g, or t
  misc_feature (1293)..(1295): n is a, c, g, or t
  misc_feature (1298)..(1300): n is a, c, g, or t
  misc_feature (1303)..(1304): n is a, c, g, or t
  misc_feature (1306)..(1311): n is a, c, g, or t
  misc_feature (1313)..(1313): n is a, c, g, or t
  misc_feature (1316)..(1316): n is a, c, g, or t
  misc_feature (1320)..(1320): n is a, c, g, or t
  misc_feature (1405)..(1405): n is a, c, g, or t
  misc_feature (1579)..(1580): n is a, c, g, or t
  misc_feature (1993)..(1994): n is a, c, g, or t
  misc_feature (2053)..(2053): n is a, c, g, or t
  misc_feature (2452)..(2454): n is a, c, g, or t
  misc_feature (2457)..(2462): n is a, c, g, or t
  misc_feature (2465)..(2465): n is a, c, g, or t
  misc_feature (2467)..(2468): n is a, c, g, or t
  misc_feature (2470)..(2471): n is a, c, g, or t
  misc_feature (2478)..(2479): n is a, c, g, or t
  misc_feature (2481)..(2482): n is a, c, g, or t
  misc_feature (2485)..(2486): n is a, c, g, or t
  misc_feature (2490)..(2490): n is a, c, g, or t
  misc_feature (2492)..(2492): n is a, c, g, or t
  misc_feature (2497)..(2498): n is a, c, g, or t
  misc_feature (2500)..(2501): n is a, c, g, or t
  misc_feature (2503)..(2503): n is a, c, g, or t
  misc_feature (2505)..(2505): n is a, c, g, or t
  misc_feature (2507)..(2507): n is a, c, g, or t
  misc_feature (2509)..(2511): n is a, c, g, or t
  misc_feature (2513)..(2516): n is a, c, g, or t
  misc_feature (2525)..(2525): n is a, c, g, or t
  misc_feature (2528)..(2528): n is a, c, g, or t
  misc_feature (2531)..(2531): n is a, c, g, or t
  misc_feature (2533)..(2534): n is a, c, g, or t
  misc_feature (2536)..(2537): n is a, c, g, or t
  misc_feature (2545)..(2545): n is a, c, g, or t
  misc_feature (2547)..(2552): n is a, c, g, or t
  misc_feature (2559)..(2560): n is a, c, g, or t
  misc_feature (2565)..(2566): n is a, c, g, or t
  misc_feature (2569)..(2572): n is a, c, g, or t
  misc_feature (2575)..(2584): n is a, c, g, or t
  misc_feature (2586)..(2588): n is a, c, g, or t
  misc_feature (2590)..(2590): n is a, c, g, or t
  misc_feature (2604)..(2604): n is a, c, g, or t
  misc_feature (2607)..(2607): n is a, c, g, or t
  misc_feature (2609)..(2609): n is a, c, g, or t
  misc_feature (2611)..(2611): n is a, c, g, or t
  misc_feature (2615)..(2615): n is a, c, g, or t
  misc_feature (2617)..(2618): n is a, c, g, or t
  misc_feature (2623)..(2623): n is a, c, g, or t
  misc_feature (2626)..(2626): n is a, c, g, or t
  misc_feature (2634)..(2636): n is a, c, g, or t
  misc_feature (2638)..(2639): n is a, c, g, or t
  misc_feature (2641)..(2642): n is a, c, g, or t
  misc_feature (2644)..(2644): n is a, c, g, or t
  misc_feature (2648)..(2648): n is a, c, g, or t
  misc_feature (2650)..(2652): n is a, c, g, or t
  misc_feature (2654)..(2654): n is a, c, g, or t
  misc_feature (2656)..(2657): n is a, c, g, or t
  misc_feature (2659)..(2659): n is a, c, g, or t
  misc_feature (2667)..(2667): n is a, c, g, or t
  misc_feature (2669)..(2673): n is a, c, g, or t
  misc_feature (2675)..(2675): n is a, c, g, or t
  misc_feature (2677)..(2678): n is a, c, g, or t
  misc_feature (2682)..(2683): n is a, c, g, or t
  misc_feature (2685)..(2686): n is a, c, g, or t
  misc_feature (2688)..(2693): n is a, c, g, or t
  misc_feature (2698)..(2707): n is a, c, g, or t
  misc_feature (2709)..(2710): n is a, c, g, or t
  misc_feature (2712)..(2714): n is a, c, g, or t
  misc_feature (2716)..(2716): n is a, c, g, or t
  misc_feature (2718)..(2718): n is a, c, g, or t
  misc_feature (2721)..(2721): n is a, c, g, or t
  misc_feature (2723)..(2728): n is a, c, g, or t
  misc_feature (2741)..(2743): n is a, c, g, or t
  misc_feature (2745)..(2745): n is a, c, g, or t
  misc_feature (2747)..(2747): n is a, c, g, or t
  misc_feature (2750)..(2751): n is a, c, g, or t
  misc_feature (2753)..(2753): n is a, c, g, or t
  misc_feature (2758)..(2759): n is a, c, g, or t
  misc_feature (2764)..(2766): n is a, c, g, or t
  misc_feature (2768)..(2769): n is a, c, g, or t
  misc_feature (2771)..(2777): n is a, c, g, or t
  misc_feature (2781)..(2781): n is a, c, g, or t
  misc_feature (2787)..(2787): n is a, c, g, or t
  misc_feature (2792)..(2793): n is a, c, g, or t
  misc_feature (2795)..(2797): n is a, c, g, or t
  misc_feature (2799)..(2804): n is a, c, g, or t
  misc_feature (2806)..(2806): n is a, c, g, or t
  misc_feature (2814)..(2814): n is a, c, g, or t
  misc_feature (2818)..(2818): n is a, c, g, or t
  misc_feature (2821)..(2821): n is a, c, g, or t
  misc_feature (2824)..(2824): n is a, c, g, or t
  misc_feature (2826)..(2827): n is a, c, g, or t
  misc_feature (2829)..(2829): n is a, c, g, or t
  misc_feature (2832)..(2837): n is a, c, g, or t
  misc_feature (2845)..(2850): n is a, c, g, or t
  misc_feature (2852)..(2854): n is a, c, g, or t
  misc_feature (2856)..(2856): n is a, c, g, or t
  misc_feature (2858)..(2859): n is a, c, g, or t
  misc_feature (2868)..(2868): n is a, c, g, or t
  misc_feature (2870)..(2870): n is a, c, g, or t
  misc_feature (2872)..(2873): n is a, c, g, or t
  misc_feature (2875)..(2875): n is a, c, g, or t
  misc_feature (2879)..(2880): n is a, c, g, or t
  misc_feature (2886)..(2886): n is a, c, g, or t
  misc_feature (2896)..(2896): n is a, c, g, or t
  misc_feature (2900)..(2900): n is a, c, g, or t
  misc_feature (2902)..(2903): n is a, c, g, or t
  misc_feature (2905)..(2905): n is a, c, g, or t
  misc_feature (2907)..(2909): n is a, c, g, or t
  misc_feature (2911)..(2913): n is a, c, g, or t
  misc_feature (2915)..(2915): n is a, c, g, or t
  misc_feature (2917)..(2918): n is a, c, g, or t
  misc_feature (2920)..(2920): n is a, c, g, or t
  misc_feature (2922)..(2922): n is a, c, g, or t
  misc_feature (2928)..(2928): n is a, c, g, or t
  misc_feature (2933)..(2933): n is a, c, g, or t
  misc_feature (2935)..(2937): n is a, c, g, or t
  misc_feature (2939)..(2942): n is a, c, g, or t
  misc_feature (2944)..(2946): n is a, c, g, or t
  misc_feature (2948)..(2952): n is a, c, g, or t
  misc_feature (2954)..(2956): n is a, c, g, or t
  misc_feature (2958)..(2958): n is a, c, g, or t
  misc_feature (2964)..(2964): n is a, c, g, or t
  misc_feature (2966)..(2968): n is a, c, g, or t
  misc_feature (2973)..(2973): n is a, c, g, or t
  misc_feature (2975)..(2975): n is a, c, g, or t
  misc_feature (2977)..(2977): n is a, c, g, or t
  misc_feature (2980)..(2981): n is a, c, g, or t
  misc_feature (2983)..(2983): n is a, c, g, or t
  misc_feature (2988)..(2990): n is a, c, g, or t
  misc_feature (2992)..(2992): n is a, c, g, or t
  misc_feature (2994)..(2994): n is a, c, g, or t
  misc_feature (2996)..(2997): n is a, c, g, or t
  misc_feature (2999)..(3000): n is a, c, g, or t
  misc_feature (3002)..(3009): n is a, c, g, or t
  misc_feature (3011)..(3023): n is a, c, g, or t
  misc_feature (3025)..(3027): n is a, c, g, or t
  misc_feature (3030)..(3031): n is a, c, g, or t
  misc_feature (3033)..(3034): n is a, c, g, or t
  misc_feature (3036)..(3038): n is a, c, g, or t
  misc_feature (3040)..(3042): n is a, c, g, or t
  misc_feature (3047)..(3047): n is a, c, g, or t
  misc_feature (3049)..(3051): n is a, c, g, or t
  misc_feature (3053)..(3054): n is a, c, g, or t
  misc_feature (3057)..(3058): n is a, c, g, or t
  misc_feature (3061)..(3061): n is a, c, g, or t
  misc_feature (3063)..(3063): n is a, c, g, or t
  misc_feature (3065)..(3071): n is a, c, g, or t
  misc_feature (3073)..(3073): n is a, c, g, or t
  misc_feature (3075)..(3075): n is a, c, g, or t
  misc_feature (3077)..(3077): n is a, c, g, or t
  misc_feature (3079)..(3082): n is a, c, g, or t
  misc_feature (3084)..(3084): n is a, c, g, or t
  misc_feature (3089)..(3089): n is a, c, g, or t
  misc_feature (3091)..(3092): n is a, c, g, or t
  misc_feature (3094)..(3099): n is a, c, g, or t
  misc_feature (3101)..(3101): n is a, c, g, or t
  misc_feature (3103)..(3103): n is a, c, g, or t
  misc_feature (3105)..(3112): n is a, c, g, or t
  misc_feature (3115)..(3115): n is a, c, g, or t
  misc_feature (3118)..(3126): n is a, c, g, or t
  misc_feature (3128)..(3128): n is a, c, g, or t
  misc_feature (3130)..(3131): n is a, c, g, or t
  misc_feature (3133)..(3135): n is a, c, g, or t
  misc_feature (3137)..(3137): n is a, c, g, or t
  misc_feature (3139)..(3139): n is a, c, g, or t
  misc_feature (3142)..(3143): n is a, c, g, or t
  misc_feature (3145)..(3145): n is a, c, g, or t
  misc_feature (3148)..(3148): n is a, c, g, or t
  misc_feature (3150)..(3150): n is a, c, g, or t
  misc_feature (3153)..(3156): n is a, c, g, or t
  misc_feature (3159)..(3162): n is a, c, g, or t
  misc_feature (3167)..(3167): n is a, c, g, or t
  misc_feature (3170)..(3170): n is a, c, g, or t
  misc_feature (3173)..(3180): n is a, c, g, or t
  misc_feature (3183)..(3183): n is a, c, g, or t
  misc_feature (3185)..(3191): n is a, c, g, or t
  misc_feature (3195)..(3195): n is a, c, g, or t
  misc_feature (3197)..(3197): n is a, c, g, or t
  misc_feature (3199)..(3199): n is a, c, g, or t
  misc_feature (3202)..(3202): n is a, c, g, or t
  misc_feature (3206)..(3220): n is a, c, g, or t
  misc_feature (3222)..(3222): n is a, c, g, or t
  misc_feature (3224)..(3224): n is a, c, g, or t
  misc_feature (3226)..(3229): n is a, c, g, or t
  misc_feature (3232)..(3232): n is a, c, g, or t
  misc_feature (3234)..(3234): n is a, c, g, or t
  misc_feature (3237)..(3238): n is a, c, g, or t
  misc_feature (3240)..(3243): n is a, c, g, or t
  misc_feature (3246)..(3246): n is a, c, g, or t
  misc_feature (3248)..(3250): n is a, c, g, or t
  misc_feature (3253)..(3253): n is a, c, g, or t
  misc_feature (3255)..(3263): n is a, c, g, or t
  misc_feature (3265)..(3265): n is a, c, g, or t
  misc_feature (3268)..(3268): n is a, c, g, or t
  misc_feature (3270)..(3276): n is a, c, g, or t
  misc_feature (3278)..(3278): n is a, c, g, or t
  misc_feature (3280)..(3281): n is a, c, g, or t
  misc_feature (3284)..(3284): n is a, c, g, or t
  misc_feature (3287)..(3287): n is a, c, g, or t
  misc_feature (3289)..(3291): n is a, c, g, or t
  misc_feature (3297)..(3297): n is a, c, g, or t
  misc_feature (3299)..(3303): n is a, c, g, or t
  misc_feature (3305)..(3306): n is a, c, g, or t
  misc_feature (3308)..(3313): n is a, c, g, or t
  misc_feature (3315)..(3316): n is a, c, g, or t
  misc_feature (3318)..(3319): n is a, c, g, or t
  misc_feature (3322)..(3322): n is a, c, g, or t
  misc_feature (3327)..(3330): n is a, c, g, or t
  misc_feature (3332)..(3351): n is a, c, g, or t
  misc_feature (3353)..(3361): n is a, c, g, or t
  misc_feature (3365)..(3365): n is a, c, g, or t
  misc_feature (3367)..(3373): n is a, c, g, or t
  misc_feature (3375)..(3375): n is a, c, g, or t
  misc_feature (3377)..(3377): n is a, c, g, or t
  misc_feature (3379)..(3382): n is a, c, g, or t
  misc_feature (3384)..(3384): n is a, c, g, or t
  misc_feature (3387)..(3397): n is a, c, g, or t
  misc_feature (3399)..(3399): n is a, c, g, or t
  misc_feature (3401)..(3401): n is a, c, g, or t
  misc_feature (3405)..(3405): n is a, c, g, or t
  misc_feature (3407)..(3407): n is a, c, g, or t
  misc_feature (3409)..(3427): n is a, c, g, or t
  misc_feature (3429)..(3448): n is a, c, g, or t
  misc_feature (3450)..(3451): n is a, c, g, or t
  misc_feature (3453)..(3457): n is a, c, g, or t
  misc_feature (3459)..(3459): n is a, c, g, or t
  misc_feature (3461)..(3461): n is a, c, g, or t
  misc_feature (3463)..(3477): n is a, c, g, or t
  misc_feature (3479)..(3487): n is a, c, g, or t
  misc_feature (3489)..(3520): n is a, c, g, or t
  misc_feature (3522)..(3527): n is a, c, g, or t
  misc_feature (3529)..(3531): n is a, c, g, or t
  misc_feature (3533)..(3540): n is a, c, g, or t
  misc_feature (3542)..(3544): n is a, c, g, or t
  misc_feature (3546)..(3547): n is a, c, g, or t
  misc_feature (3549)..(3576): n is a, c, g, or t
  misc_feature (3578)..(3582): n is a, c, g, or t
  misc_feature (3584)..(3616): n is a, c, g, or t
  misc_feature (3618)..(3621): n is a, c, g, or t
  misc_feature (3623)..(3623): n is a, c, g, or t
  misc_feature (3625)..(3627): n is a, c, g, or t
  misc_feature (3629)..(3629): n is a, c, g, or t
  misc_feature (3634)..(3634): n is a, c, g, or t
  misc_feature (3636)..(3644): n is a, c, g, or t
  misc_feature (3647)..(3660): n is a, c, g, or t
  misc_feature (3662)..(3663): n is a, c, g, or t
  misc_feature (3665)..(3676): n is a, c, g, or t
  misc_feature (3678)..(3678): n is a, c, g, or t
  misc_feature (3680)..(3680): n is a, c, g, or t
  misc_feature (3682)..(3683): n is a, c, g, or t
  misc_feature (3685)..(3685): n is a, c, g, or t
  misc_feature (3687)..(3688): n is a, c, g, or t
  misc_feature (3690)..(3699): n is a, c, g, or t
  misc_feature (3701)..(3701): n is a, c, g, or t
  misc_feature (3705)..(3711): n is a, c, g, or t
  misc_feature (3714)..(3714): n is a, c, g, or t
  misc_feature (3716)..(3716): n is a, c, g, or t
  misc_feature (3718)..(3728): n is a, c, g, or t
  misc_feature (3730)..(3731): n is a, c, g, or t
  misc_feature (3733)..(3734): n is a, c, g, or t
  misc_feature (3736)..(3738): n is a, c, g, or t
  misc_feature (3741)..(3749): n is a, c, g, or t
  misc_feature (3751)..(3751): n is a, c, g, or t
  misc_feature (3753)..(3753): n is a, c, g, or t
  misc_feature (3755)..(3763): n is a, c, g, or t
  misc_feature (3766)..(3771): n is a, c, g, or t
  misc_feature (3774)..(3774): n is a, c, g, or t
  misc_feature (3776)..(3778): n is a, c, g, or t
  misc_feature (3780)..(3782): n is a, c, g, or t
  misc_feature (3784)..(3795): n is a, c, g, or t
  misc_feature (3797)..(3800): n is a, c, g, or t
  misc_feature (3804)..(3804): n is a, c, g, or t
  misc_feature (3808)..(3821): n is a, c, g, or t
  misc_feature (3823)..(3824): n is a, c, g, or t
  misc_feature (3826)..(3833): n is a, c, g, or t
  misc_feature (3835)..(3838): n is a, c, g, or t
  misc_feature (3840)..(3855): n is a, c, g, or t
  misc_feature (3857)..(3857): n is a, c, g, or t
  misc_feature (3859)..(3859): n is a, c, g, or t
  misc_feature (3862)..(3864): n is a, c, g, or t
  misc_feature (3866)..(3890): n is a, c, g, or t
  misc_feature (3893)..(3893): n is a, c, g, or t
  misc_feature (3895)..(3900): n is a, c, g, or t
  misc_feature (3902)..(3902): n is a, c, g, or t
  misc_feature (3904)..(3904): n is a, c, g, or t
  misc_feature (3907)..(3919): n is a, c, g, or t
  misc_feature (3921)..(3924): n is a, c, g, or t
  misc_feature (3927)..(3937): n is a, c, g, or t
  misc_feature (3939)..(3940): n is a, c, g, or t
  misc_feature (3942)..(3945): n is a, c, g, or t
  misc_feature (3947)..(3962): n is a, c, g, or t
  misc_feature (3965)..(3966): n is a, c, g, or t
  misc_feature (3968)..(3968): n is a, c, g, or t
  misc_feature (3970)..(3970): n is a, c, g, or t
  misc_feature (3972)..(3972): n is a, c, g, or t
  misc_feature (3974)..(3985): n is a, c, g, or t
  misc_feature (3987)..(3992): n is a, c, g, or t
nnnnnnnnnannnnnnnnnnnnnnnnnnnnnnnnnnnnnnnnnnnnannnnnnnnnnnnnnnnnnnnnnnnnnnnnnnnnnnnnnnnnnnnnnnnnnnnnnnnnnnnnnnnnnnnnannnnnannnnnnnnnnnnnnnnnnnnnnnnnnnnnnnnnnnnnnnnnnnnnnnnnnnnnnnnnnnnnnnnnnnnnnnnnnnnnnnnnnnnnnnnnnnnnnnnnnnnnnnnnnnnnnnnnnnnnnanannnnnnnnnnnnnnnnnnnnnnnnnnnnnnnnnnnnnnnnnnnnnnnnnnnnnnnnnnnnnnnnnnnnnnnnnnnnnnnnnnnnnnnnnnnnnnnnnnnnnnnnnnnnnnnnnnnnnnnnnnnnnnnnnnnnnnnnnnnnnnnnnnnnnnnnnnnnnnnnnnnnnnnnnnnnnnnnnnnnnnnnnnnnnnnnnnnnnnnnnnnnnnnnnnnnnnnnnnnnnnnnnnnnnnnnnnnnnnnnnnnnnnnnnnnnnnnnnnnnnnnnnnnnnnnnnnnnnnnnnnnnnnnnnnnnnnnnnnnnnnnnnnnnnnannnnnnntnnnnannnnnnnnnnnnnnnnnnnnnnnnnnnanannnnnnnnnnnnnnnnnnnnnnnnnnnnnnnnnnnnnnnnnnnnnnnnnnnnnnnnnnnnnnnnnnnnnnnnnnnnnnnnnnnnnnnnnnnnnnnnnannnnnnnnnnnnnnnnnnnnnnnnnnnnnnnnnnnnnnnnnnnnnnnnnnnnnnnnnnnnnnnnnnnnnnnnnnnnnnnnnnnnnnnnnnnnnnnnnnnnnnnnnannnnnnnnnnnnnnnnnnnnnnnnnnnnnnnnnnnnnnnnnnnnnnnnnnnnnnnnnnnnnnnnnnnnnnnnnnnnnnnnnnnnnnnnnnnnnnnnnnnnnnnnnnnnnnnnnnnnnnannnnnnnnnnnnnnnnnnnnnnnnnnnnnnnnnnnnnnnnnnnnnnnnnnnnnnnnnnnnnnnnnnnnnnnnnnnnnnnnnnnnnnnnnnnnnnnnnnnnnnnnnnnnnnnnnnnnnnnnnnnnnnnnnnnnnnnnnnnnnnnnnnnnnnnnnnnnnnnnnnnnnnnnnnnnnnnnnnnnnnnnnnnnnnnnnnnnnnnnnnnnnnnnnnnnnnnnnnnnnnnnnnnnnnnnnnnnnnnnnnnnnnnnnnnnnnnnnnnnnnnnnnnnnnnnnnnnnnnnnnnnnnnnnnnnnnnnnnnnntnnnnnnnnnnnnnnnnnnnnnnnnnnnnnnnnnnnnnnnnnnnannnaannaannnnntnnnnaannttnnnccnnnccnntnnnnnngnggnaaangtgtacataagcttacgggttattagtactactcgactatgacattactgcctttacatctatagcctatcaacgtggtcatctnccacgacccttaaaagaaatctcatcttgtggtgggtttcgcgcttatatgctttcagcgcttatcccttccaaacgtagctactctgcggtgcccctggcgggacaacagatacactagaggtttgtccaattcggtcctctcgtactagaatcagatccactcaaatttctnncgcccacagtagatagagaccgaactgtctcacgacgttctgaacccagctcgcgtgccactttaatgggcgaacagcccaacccttgggaccttctccagccccaggatgtgacgagccgacatcgaggtgccaaacccccccgtcgatatgagctcttgggggagatcagcctgttatccccggcgtaccttttatcctttgagcgatggcccttccatgcggaaccaccggatcactatgctctactttcgtacctgatcgacctgtatgtctctcagtcaagctcccttatgccattgcactctacgcacggttaccaagcgtactgagggaacctttagaagcctccgttactcttttggaggcgaccaccccagtcaaactacccaccaagcaatgtcccccgcaanncggggttaggcctcagataaacaaagggttgtatttcaacaatgactccacaacgcctngcgacgccacttcacagtctccaacctatcctacacatcatttatccaaggtcaatactaagctatagtaaaggtgcacagggtcttttcgtcccactgcgggtaaacggcatcttcaccgttactacaatttcaccgagctcatggctgagacagtgtccagatcgttacaccattcgtgcaggtcggaacttacccgacaaggaatttcgctaccttaggaccgttatagttacggccgccgtttactggggcttcaattcaatgcttctccgaagataacatctcctcttaaccttccagcaccgggcaggtgtcaggccctatacttcatcttacgattttgcagagccctgtgtttttgataaacagtcgcctggacctcttcactgcggccannnttnnnnnnggngnncnntctcccnnanntannggtntnttttnncnnantncntnnncnnnnatctctcgngcnccntnngnntctctccncnnnnnnctgtgtnngtttnnggnnnnggnnnnnnnnnncnnnantttagaggtttttnttngnancccntnngcgcnctntctctttnnncnnanncnccgngnnntntnntntttccccnannnnngngnntttnncnncnnnnnntatannnnnnnnnntnnannnantnttncnnnnnntcgcggcgctttnnncncnccnncnccccnncacannnannannnnnnngggnatattnacccnntnnncnnnnnntntccctttngggntcnccntnngnccnnnnnnacccacannnnnntnnnananntgtggaaancntnntntttnngtgtgngggtttctcncccncnntntnnntnnntntnncnanattttnttttntnnncnnnncnnnannnnntnnnanacaccntnnnccctntnanaanncnccccnnncncntnnannannnnnnnnannnnnnnnnnnnntnnnatnntnntnnncnnntattntnnntnntcnnccncncnnnnnnngngntntnnnncnctctntnnannnnnngntncnnnnnnnncancannnnnnnnntntnngnnnananacnncnttntntcnnnntannnnatatntgnggnnnnnnnntgntnnnnnnngttntntnccnctcnnnnnnnnnnnnnnncncncnnnnccncnctnntnnnnaanannntanannnnnnnnngnttntnnnnnnntngnnggnggngnnncccccncnnnnnannannnnnncnncnnctntatannnntnnnnnnnnnnnnnnnnnnnnannnnnnnnngggngnnnnnnntntntnnnngnttnnnnnnnnnnncncncccncncnnnnnnnnnnnnnnnnnnntnnnnnnnnnnnnnnnnnnnncnncnnnnntntntnnnnnnnnnnnnnnncnnnnnnnnngnnnnnnnnnnnnnnnnnnnnnnnnnnnnnnnnannnnnncnnncnnnnnnnncnnncnntnnnnnnnnnnnnnnnnnnnnnnnnnnnntnnnnncnnnnnnnnnnnnnnnnnnnnnnnnnnnnnnnnnannnncncnnncnccccncnnnnnnnnnccnnnnnnnnnnnnnngnntnnnnnnnnnnnntntntnncncnntnnnnnnnnnntntttnnnnnnntcncncnnnnnnnnnnntnncnntnnntcnnnnnnnnntntntnnnnnnnnnggnnnnnnccncnnnannnannnnnnnnnnnncnnnncccncccnnnnnnnnnnnnnncnntnnnnnnnntnnnntnnnnnnnnnnnnnnnncncnctnnntnnnnnnnnnnnnnnnnnnnnnnnnnttntnnnnnnananaannnnnnnnnnnnncnnnnccnnnnnnnnnnnannannnntnnnnnnnnnnnnnnnncgnncncncncnnnnnnnnnnnnannnnnntttttttt

SEQ ID NO: 143 - DNA, 4000 bp, Escherichia coli
  misc_feature (40)..(40): n is a, c, g, or t
  misc_feature (70)..(70): n is a, c, g, or t
  misc_feature (1958)..(1959): n is a, c, g, or t
  misc_feature (1964)..(1964): n is a, c, g, or t
  misc_feature (1982)..(1983): n is a, c, g, or t
  misc_feature (1985)..(1986): n is a, c, g, or t
  misc_feature (1988)..(1989): n is a, c, g, or t
  misc_feature (1991)..(1992): n is a, c, g, or t
  misc_feature (2000)..(2000): n is a, c, g, or t
  misc_feature (2006)..(2006): n is a, c, g, or t
  misc_feature (2009)..(2010): n is a, c, g, or t
gaccatcaaggtcatcggaattatcacgacggcctacccnaacttcgacaagttccgggacgaaaagcanatccgctcgatggtagccatctgggccgatatgttttccgaggacgacgccgggctcgttgcccttgcggtcaaggagcatatcagcacgtcgaagtggccgccgtccatcgcggagatacgcgagattatgacacgcatcgcccacccggacatcataccgccggacgaagcgtgggaggtcgtctccaagtacctcgacaccgagggagagtacaaccacggggacatctaccgggccctcccgaggactattgccgaggcggtggacagcatcggatacgggcagctttacgccatgcacgtcgcatacgcacggggccacgccgcaaaggcgggcctcgacagagtggcgttcatgcaggcatacgaagacaaggtcgaacggcagcgccggaaggcgatgctacccggaagcctccgccagaaaatcgaggcggtcagcgccgggctcgacgacggaacccgcagcctcatcgagggagtgaaccggcggtacgaggagcggcaggctctttaccggcgacttgcggagcccagagacctcctcgccctggtcggcggagaggacgcggaagcgaagctcctcgaggagcgagaaagaagggctcttgaggcccgctacgaaagggatgattacgaatgagcaaggtgaaggacgcggtcacactggctatgctgctggtggcgattgtgttttcggcaggattgctcaccctgccagagtactcctctgcgggccttgacctccccgggctgtcctctgccgccccggagggggaaacataccgccccaacgtcacaagccctcctgtgtcctctgtggcgcctcctgcggtcacgccggagcccctctacaccgagagggacgtcgaaatgctggcgaagaccatctgggcggaggccagaggtgtccccagcgacgcagagaaagcagccgtcgcatggtgcgccctcaaccggctggacgctggtacatacggggagaccctcgcggaggtgctcactacgccgtggcagtttgcctactacgagagctcgccggtcacgccggagctcgaggcgctcgccagagacgtcctcgagaggtggcaggcagagcagcgcggcgcagaaggtgtcgggagaaccctcccggaggactacttcttcttcgagggggacggccttcggaaccatttccgcaagacctacgagaaaaccggggcgacgtgggattggagcctaccagacccctacggggaggcggctgtatgagcaagactaccccgagaatgtgcaaaatcttcaactgcgacaggcggcacgggaatttctgctgcgccgactgcggctacaagcggaacggtaactgcaagaacccctgcctcaacgggccagagcggtgcaactgcgtcgccgagccggaaaccaagaaaccaaaaacgggaggtaacacgaaatgaaagcgaagctcaaaaccctcaaacgcgggcagaccttctacggcgcgggcatccagtggctcgtgctgggtcacaccaacagcagccaagggctacccatcgtcacacacatcgtttccaccggcatcgtcgagcgccgggccttcgatgagaagaaccgcaacgacctaggcgtcagcaccctgctcgcctacctcaacggggaattcctcgagaggctcgaggacgccttcggagaaggggccgtcgcggaacagttcatcgacctcaccagcaacgacggcctcaaggactacgggaacgtcaaggcgaaggtgggcctgctcaccgaggaggaataccggcagcaccgcgacatcctcccgcccctcggcgacgaaggctggtggtggctggcgacgccgtactccaccgagcgggcaggctacccctccctcgtccgcnncgtgnactcggacgggacgctcnncnncnncnncgcgtacnacggcnacnncggcgtccgcccggctttgtatctgaaatccgacatctcggtatctctggacgggaacgacgaaagcaccattgaggtgagcgaggaggagctctataaggcggcggtgcagaagttcggcgagcgggcccaaatcctcgtcgccatcgaggagatgagcgagctcaccaaagccctcctcaagtacatccggcacgaagacttcaaccaaggggactacgacgacattgtcgagagcatcgcggaggagcgggccgacgtgtccatcatgctcaaccagctcgccgtcatcttcggcaaaaacgaagacgcggagacggagaagctcgaacaccttgcggacatcgtcaaggacgccttatgaacaggcggattttgaagaagcgggcaaagcggttcatggacagcttcacccgcgagaagatacccgcagcctttacctccaaggaggaacgccgccagtacgtcagcgcctttgcccggcagtacgtcgggcaggcggcgcacttcccggaaacagcgaaggaggcccagcatgaacatccacaagacgaaaattgagtggtgcagccacacatggaaccctgtcaccggctgccggcacgattgcccctactgctacgcccggcgcatcgcaacgcggttcggccccaagattgacgaattcccagatgagagcggcatcacggcgtttatcaacgaaggagtggactgctacgtcgtcgagaagcccacggagctcaaggactggcagggaaattaccggcgctcgacgccttaccccaagaacttcgcccctacgctccacaagtacacgctcacatacccggagaagcgcctcacccccgccgccatcttcgtcggcagcatggcagacctgttcgggcgctgggtgccggacgactggatagagcaggtctttgacgcttgccgccgggccccgaggcacacctacctgttcctcaccaagaacccgcagcggtattgcgacctcgccagcgccgggaagctccccacggagccgaacttctggtacggaaccaccatcaccggcccggatatgcctttcttcttttgggacaaggcaaacaccttcgtgagcgtcgagccccttttggagcccttcgacaccgaggccaccggcggcgaaaaccccttcgagcgcgtcggatgggtaatcatcggagccatgacgggccccggaagcaggaagcagcagccgaagcgggaatgggtggaggctatcgttaagaaggcccgcgaggcgggcacggcggtcttcatgaaggacagcctcaagcctatctggggcgacgacatcctccgggagcacccgcccggcatgataggaggcgacaacagtggatgagcgaaggaaaatcgactgtgtttcagccgcagaccgcgataccctcgtcacgatacttgcccggaacggttacgccgtccggcaggccaaggagaagcgcggaacctccaaaagctacacctacttcgtcgaatactggaaggaaggaggaaagccgctgtgaggaaaggaaccaagcgcatcaccgtcgtcgtgacggcccagagctactaccacctgcgccacctcgcggatatggccggctacaacagcatcgggcgcgtcatcgacaagctcgtgcgggagcaccagctcgccatgcggggcggatacacaacggagaagccaaacgaaggagagagaccatgcagagaacgcacagaccgacatcccacaagaaagacccgatgaagcagtaccaaggggccgtgagccgggcgcagggcaagcacttcgaggagtacatcgacctctccctccgctactacgagcagaggggcgaggccgtagtcgagaagacgccagagcccatgcggcccaccaaagacctcggcaacgggaaattcatcgcgtactacgagaaggccgcgcagccggattacaagggcaccctcaagggaggcagggccgtcgtcttcgagg

SEQ ID NO: 144 - DNA, 4000 bp, Escherichia coli
  misc_feature (342)..(342): n is a, c, g, or t
  misc_feature (549)..(549): n is a, c, g, or t
  misc_feature (621)..(621): n is a, c, g, or t
  misc_feature (870)..(870): n is a, c, g, or t
  misc_feature (954)..(954): n is a, c, g, or t
  misc_feature (957)..(957): n is a, c, g, or t
  misc_feature (1050)..(1050): n is a, c, g, or t
  misc_feature (1054)..(1054): n is a, c, g, or t
  misc_feature (1298)..(1298): n is a, c, g, or t
  misc_feature (1987)..(1988): n is a, c, g, or t
  misc_feature (1993)..(1994): n is a, c, g, or t
  misc_feature (1999)..(2000): n is a, c, g, or t
  misc_feature (2012)..(2012): n is a, c, g, or t
  misc_feature (2014)..(2015): n is a, c, g, or t
  misc_feature (2020)..(2021): n is a, c, g, or t
  misc_feature (2026)..(2026): n is a, c, g, or t
  misc_feature (2143)..(2143): n is a, c, g, or t
  misc_feature (2193)..(2193): n is a, c, g, or t
  misc_feature (2732)..(2732): n is a, c, g, or t
  misc_feature (2753)..(2753): n is a, c, g, or t
atttagaagatcctgagcaatccgtacctatgatacgggctatatcttctttcgtacaaggctgtccgtttggcataaccataacaccacgttctacactttcccacatatagcataacatatccatccacaagcccctaacgtctggtggaagtacccttaattcaggacacctcaaccaatcgccaacatagaaaggcataggagtttcttgttttcttgccatagagagaatttttaaggaagccgggataattcccagctttcctataatcatgtttgaacggttacacttccagaattgcaatatcgggggcaatatccttgatcttatccagcacntcatcaatacacttatctctgtaactttccatcacttcatttgctcctggcgaaacaagttgcaaaaacacttctccatttgtcagataatgatcgaactcaatttcgatgggctgttttgcagttcccttgaagatagccatgtttacggtaaagctcttcggtaaattactttctacctggcaacggtaaacatcagcaacgganccagaaggatctctttgtttctcaatctctgcctttgcttttgcattgaagtttttgagattggaaacaagnaccatgcacttttctttatcttcaaacaaaccacgattcagacgcaagaattgtcctaatttggcagggatccagcccttttcaccatcattaataccgaacttctcaaacgtttcagatacttcaaccgtaccagtgaatgtgtttttattgtaataatcatcttcgtttacagtgagctgaattgtcattttctcacgattcacaacgacatttgcacgtttctgatctacagtatctattcgcttngaaagccattcatacggagtggagatagtgccggaaacactgatcttttccggggctttggttgcaagcggttgttgtgcttgngcngcgtcaccaagtctataaactacttcaataggtttctctccagtgtaatgttcgatgttaatgttcaaacctttgtttttttcttccataatntttnaaaaattaagatgttaataaattaattatctgtgccagtcaagcgcactgccatttgaattgttttctgcctttcttccggcttcataggtctttcctccagcaaataaccgtctggcgtatagtaacctactcttccttcgtcttgatctatgaacttgtagcactcacctttaatgtactcaccgccttttctcaaatcatcaagcatttttccgatccgttcttgcagtggcttcattttncctttgaagtcagctttaactacatcaaaattttctgtcagttcttgcatctgtatctgaacttctacaaggttagcccgaagctcattagtttcttcctgagagaactttgagagataacttttctctacgacctcatcgcagctatcacgtaaaatttgcgctctttgctccactggagtatcagccaacattatatctttcattgcaaaataagtttgattattaatgaattgaagtctatttgaaagtggtacttattcaagagaacaaacagtaagattgcgattcctaatatgttatctataattctccatgtaaaccacttcttagggataaggcttaaaacaatcaatgcaagaaaacctatccattgagagcttattaaacctatgaagcacaatataaggtagatccagttgcacattctccaaacagcgaaaaccgggcttatctcagtgagatcgtttttgtccttatacttttccacagcagcgaaaacttttttgcaagctgccaaattcagcacttcaaagaaaaggcagaaggctatcagtatataaaatattgttgtcattcttgcaccttctttacattaaacatcaaataatcaaaccacaattcaatgaattgctgcccgaaatactttgctttctctcttgattcttgccaaagccgagagccgacanncgcanncgtanncgagggggcgtnanncgtanncgcanaaccgaagcccgcacgattgtttagagcgtcaataattggaatatacacaagcccttctgtttctttgatttctctctcagtccacaaagcaaaccaggggaaatagaaacggctgntaccgcttgcatccggtttaggctggtaattcttaccccacaaagcccgnctgattgtttcaagtttgattaaggcaataatcccttttcttactccagcagaacgcaaagccttctcatcaataggggaacactttaaagcagcacacgcatcctcataacttcggattgtcgtgtaatcatcaagggtaggggttggtttcttttcacctttgcagaacaaggctaccaacacgtttttcacttcttcacttttagcaacgtctaaagctgcctttacttcaatctcagtaatttcaattactttcatcttttaaagattttaatcgtttgacaattttgttagttaatcgtatcgcattatccactctggtacttctaccttcgtgtgggatattttctattagcactggaataagccggataagctcatttaccaagtgattgggtattttcttcatcggctttcctccagttaggatcgggatcaggtatttctatattcaagtattccaaagcatactctctgagcttctcgcaatatgttgagaatgttaacgtgtccattgttgcagttgatccgggaaantctataatctcacccgtatgnttgtttactactttgtctttagtcatttgagccttaaaaaactcgtgtacttgttccacgcttgtaaactcccatccggcattaagcaacccatctaacagcattggatagatacacccccatagccagccgttttgatcgttggaacgtggcttcctaacctttttcactattacctggtaaatcccatctaccgaatgagaaaacaagtcgtataacggtctaaggttgaatagcccacccttcttttctatcaaaactttatttgtcatatagctgtagctgtttttctaaactctttctaactgcgtgtatagctccttctctaccttcaaggcttctcaggtaatcttccagctccttacgtgtttctgcgatatagtagccttcacttgtggcgatcagcccaatcaccatacccgaaagtctaatatggttgataatctttcttattcgtggactatcaattttacacccataagactttaaagccgaacacatcgctttatttgtaatcgctttatatttacctaccttaccgtgaagcccttgtactatgagaggcagaataactttgtcctcataatcggttagaggttttgtttgctctgaaaatccttgtatcatacctaaaaattgtttaaggttatactcaaacctggtttagcagcataaaccgcctttccagtaattttttgcacctcagatacaaataaatgctcatcgctgttattagatgagaggtgtaaaagaactatgtttgcaacgttgctcaaatcgttttcttttagagcttgtttgcaactttccagctccatgtgagaaaccattaatctgtttctttgtgtaggaaggacacgcccggcattaatgctttctatcagttttgtatcagagtaattacattcaatcagtatatgattcaatccagaaaaagtatatccagactggcaactatccgttaaaaacataatactaccacaatccgggtgcttaatgaaatagccaacacaaggtacatcatggaaagcagggaaggggatcacccgaaaaccaccaagcagatagcccgatcctattttaatggcttttactctggaacctttcaattccttgctttctatcacttctggaagagccaatacatgaaagccacaatctaccattgccttagcatatttagcatgatcgttatgctgatgagttattaagcagcctacgactttgcgaatattgaaatccaaagc

SEQ ID NO: 145 - DNA, 4000 bp, Escherichia coli
  misc_feature (1075)..(1075): n is a, c, g, or t
  misc_feature (1084)..(1085): n is a, c, g, or t
  misc_feature (2005)..(2005): n is a, c, g, or t
  misc_feature (3239)..(3239): n is a, c, g, or t
  misc_feature (3675)..(3675): n is a, c, g, or t
  misc_feature (3683)..(3683): n is a, c, g, or t
  misc_feature (3782)..(3782): n is a, c, g, or t
aaatcgggtggaatgtgagagcctatgccaccaatattgcatcatgtcatcgaaaatcaaaagtagcgctatgtgcaagagaataggggaatctacaagtattccctgatattggggaaatgctagtgccatcattgttgcagaacaaaatagaaccagtggctgggttacaataaataagagtaacgtacctatcagctctacttttccatcatcgcttacttctgtcgcttttttaaatagcttaccattcttcgcttccagcaaagcaaacatgataaaaaccgctaaaattgcccattgataacccattgtaatgactcccaccaagagattgttgagagtgaatttacattgcgttaacatgcaagaatatatacttgtatagatttgaatgtcatgtcttacattcacggcaagcagcaaaccattatgcctgacgactacgtcgagctttgtttgccttttggaacgctaagaacctatgcggctacctcgacaattcacgataggggaagtaaaaacaaagggctgtctgttgtggtatcaggagaagtaaagattggtaattatggcctggacggcagttatcaaattactactgtattgcaacgaggagatacgtttggcgagttcacattgtatgcatcacttgcaagaacgcatcacgctgaagcgctaacggaatgtaaggtattacaaatacctgaacctgcttttcgttctctgacaagccaacatccagcgattgctgaattcatcacccggtcactggcaataaagcttcactcggcgctggaaaggttggatgatattcgacgcttacccactcacgtccagttagctaagctaatttatcaatcgtatcttacctctaagcacgtctttataccgttaaggcaaagcgattatgctgaaagattgggcgttaccgtacttaccgcacataaatcattaacgaagctgtatgatttaaagttgattgaaaagcgctacgggggcgtggcaattacccaggtcgagcgactggaaggttttttgaaagaaagttcgtcactattaccattgtaagagnggttaatgnnctccacatgcgagagcgccaaaagaccctccctcaaatttattccacgcccatggcaactcatgcatcaagtattacgctggctttagcccgcctaaaataatgtgctgaatgttgcttagcgtgctctcgaagaaagcgggatcgcttaaatctttaccggttacggctttgatctgcacgctgaaatcggcgtaatgctgagtaatggcccaaatgctgaatatcaagtgtatagggtcaacaggctttagcttacccgcttcaatccattcgataatgacggcgcttttcgcgtccagcagtgttttgagcggcgtttctaattcctttattaaaagaggggcaccttgtaccacttccatacaaaaaagcttagattcagctggattgtccctcgacatttcaagttttactttaatgtagtcgctcagggtttctatagggtcttgttctgctgaaaagctctgaaggggcgttaaccacacatctaaaaggtgggtaataaccgataagtacaaaccctctttacttttaaagtaatacagtaaattactttttgagacattcgctagttccgatacttgctctacagtggtgccactcacgccgttctttgagaacaaggaaagggcagcatccataatgcgagtacgcttttctaataacgctttttctcttcgcttttgcgtggtcgggctaaatgctctcgctgatttcgtaattgtttgaccttcagatttactcactacttgtctcttctttaccggaatttccgtgatcaggcgcttagtttacgtggagttctcgtcgctataaacccatttgcacaaatatgcaccaattaagttcaattgcactggacttggtgttccaaattgaaccaataagtccaatttgggttgttgaattttgtaagtnactgaaatttatagattaaataaattggcctgctttatgctgttcactaagtataccgccacttcaatgttttgaattcggcaaccttaaaaaaagcgggataaaccgcttaaaacgcatacaagcagaggtacaacatggatataggtgtatttattccgattgggaacaacggctggctaatttcgaaaaattcgcctcagttcaaaccttccttcgatctcaacaaagagattgtaatgaaggctgaaaagtacgatatggattttgcgctctctatgatcaaactgcgagggtttggcggtgaaaccgaattttgggactacaacttagagtcgtttacgttaatggcaggccttgctgctgttacctcaaaaattcaactatatgccacggctgccacactagtcttgccgcctgcaatcatggcgcgcatggccagtaccatcgactctatctccaacggacgttttggcgtaaacctagtcactggctggcaacgccctgaatactcgcaaatgggtatgtggccgggcgatgaatttttcggtaaccgctatgagtatttggatgaatacattcaggtagtcaaagaattatgggaaaccggaaaaagcgattttaaaggcgagcatttccaaatggatgattgccgaatgttgcccaagccacagcgaaaaattccacttatctgtgccggtcaaagcgcagcaggcatggatttctctgcccgtcatgccgactataatttctgctttggtaaaggcgtaaatacacctaccgcttttgcaccaaccgcagcgcgcttaactgaagcggctgaaaaacacggtcgcagcgtaggttcagcggtacttatcatggttattgccgatgagacggatgaagccgccatggcgaaatgggaaagctataaagacggcaaagatcagtcagcgttggactggatggcaacgcaaggagctgctgataagaaatcgggtaaagacacgaatatccgcgatatgaccaacccaacctcagcagtaaacctgaacatggggacgctggtgggttcctatgagtcggtggcctctatgcttgatgaaatagccacagtgccgggctgtgaaggtgtattgctgaccttcgatgacttccttaaaggcatggatgatttcggcactaaaattcagccgctaatgaaatcccgtcagcatttgcttagcacatcgggagccgcctaatgtcagcnggtgaaatatttgaggtctcagggtgctttcaagcgcgccagacggggcagcccgtactgccagctaagcctgaaccgttgacgttaaaccctgcggaaactgccgttattgtggtggatttgcaaaacgcttatgccagtaaaaacggctacttagacaaggcgggttttgatgtgtccactacggcgccagtcattgaaaacaccactaaagtgcttgaaacagcgcgggctgcaggcatgcctgtggtgttcttacaaaatggatgggatgccgactacaaagaggccggcggccctggttcgccgaactggtataagtctaatgcccttaaaaccatgcgcaaacaaccagagcttaagggaagtttgctggccaagggtacttgggattacgcgcttgtcgatgcgctaaagcctcaagatggcgacatcnttattccnaaaacccgttacagcggtttttacaatactaatttagacagcatgctgcgcgcacgcggtattcgcaacttagtgtttacaggcattgcaaccaatgtntgtgtggaatctacgctgcgcgatggcttccacctggaatattttggtgtggtgctggccgatgcggcatatcaagctggcccgccagacattcacgaggcctcacttttcaacattcagacgtttttcgggtgggtgtctaccaccgcgcagttctgtgaagtatttgaagggacgagttaggtgctttcttcttagcatctactagccacgcagac

SEQ ID NO: 146 - DNA, 4000 bp, Escherichia coli
  misc_feature (1981)..(1981): n is a, c, g, or t
  misc_feature (1985)..(1986): n is a, c, g, or t
  misc_feature (2025)..(2025): n is a, c, g, or t
catgcgatcattcgcaagcgtttgcagcaacgtgatgcgacgactgacttacaaagcgatgaagtttcgaagccgctctagaacccagccgatgcctggtaggtgttcataaaagtctctggcagcatcccaataatcaatatgcgctgacacgcggccatcatcggcaaaaattaattttgtcgtgccgtcaaaaatccagggcttatctctgagtatgccttcgaagcgccattccatgatacagacctgaccatcgatcgcggcgtggtaaacaaaaaatttcacatcgccaatggtttcaaacatatgcgcaaagatcgcacgcatattctctataccctgcacatcgttgaaggggtctttaaagcgcacatcttcagttacatatgtagatagatctgcgagagacgcaggcgtcaacgtttccatatatagctgatatgcgtcacataatgttgtcatggccgtgtcatcctccgtgtgatggcaaaatacagagcgtcaggtatcaatttgaacgctgtcaaaatccaggcaagtcgccttggaaatctgatctcgaaagtgttagatttgagtcctgctacaattcgctcgacagcgtcatcaagagacatcaggaaaggcattgaaaattcgttcttatcggtcagaggcgttttcacaaagcctggattaatcaattgtagtttgacgtcattggcatcgagttctggctttaaagactcacacatatttattagtgctgctttggatgcgccgtaagctgcagatgttggcaagccacgataccctgcaacagacgcgacgacagcaatgtgaccagcgcggcgttccataaatcttgggatgatttcgctcaggccattgactgtccccatcaagtttatatcgatgagtttttggaagggctcccgtgaaaaatgagaggcggtcacttcttgatgcgttccagcatttagaatagccaggttaatgttaccaagcttagcttcaatatctttgatcactttcgttgtcgcatcgacgtcggtcacgtctaggggaaatttatgtacggtgccatttgcacattcggcttcaagtgacgcgaggtcattttctgtgcgcgcgctgacagcaactgtccatccatccagtgttagacgcttggcaagcgcacgtccaattccctttccagctcctgtgatccaggcgacacgacgttctgtgagattggtcattgagccatctgtgaggtcatcccaccctgacattgacgacatacgtattcgatcacagacccgtctcttcctttgaaacgtaattttacccagcggcccatatcatcgtaccaaacttcattaatgagatcccctgtataggtataacgcattgctggaataataccggattcagtttttacgttttcatagccagcggcattgatcaggacattgttgatttcaccggtcagagtattcaggacctgatcctgttttagaacctcagcattccagtggttggttgggtaaatcggtagatttatatcgagactattcgttccacgtgtaagccgtaaacgcgacccttgttggtcggcaagcattgaaaatagcgtgccgtcgtcattaacactaatttctagtttgttgaggatgccgtcacgccaaatggcgcgtgagtcatatcgatactgaaaggcagtaaaaaaaaggatatctatctgcattcgcgatgcactgttgacgacaattttgtcatcgttggtgtcaaaccgtacaaggtggtcgccgattttcttgcccgatcgcataatatcgaactgcatttctgtcccatataacgcaattgggtctttagcattaaaggctgcgggtacagccttttgtgcaggcgcagtcccaacgaatgtgagagatagaaaaaatataccgcagagagatcgaaaatttgtcataaaattagctattaagatcctgaattaacttaatttgtncctnnattatttacgttgcattcgacctattggatcactgtgtnacgactctttagtattaggggcataagcgaccctatcatgtgtcgacgtcattaccttggcacgatagagttttctccttagtatgattatgtgccgtatctcgggggtgcgtaactgccctgcaacttgagagcggtgacgtattaagagaaggcgctgcgatcttgcaattcatcgcagaccagcatgcggatctaaaactggccccaccagctggctcgttggaacgcgcacatcttcaagagcacctgaattacacaagttcagaacttcacaaagctttttggccgttcttttcaagaacttctagcgaagcagagaaggatcaggcgaagtcgaacgttacaaagaaattcgattatctcgatgctatgctcagcgatagccggatgtacttgcttggtgatcagttcaccgtagctgacgcctatatgtttgttgtctgcaattggtcaaacttcgttggcattgatttgtcagagtggccagccctgtctgcaaatgtggaccgcgttgctatacgtcccgccactcaatccgtaatgaaggccgaaggattgctcaactaatggaaaaacaaaattttgcagccattgtccgcgcgatggaaatctactttgacggcctctatcaagctgatagcaagacattggccaatgtctttcatccggatgcttggtacgtcaacgccctcgaaggcgattatatgaacaggtccatgctcgagtactacactgttgtaggtggccgcgtgctacctgcacaaaccggtgatgaacgcgacgaccagatactctctattaaatttggcgttaatcgcatggtattcgttgaagctcaaatgacaatgtcaggtcgagtatatctcgattaattaacattgattttagatgatggcgaatggcgaatcattgcaaaaatattctcatcgacctccataatggagactacctagatgccttatgtgaacatcaaaataacccgcgaaggcggcccagatggcaacgaccttagtgatgccgagaaagccgagttgatacatggcacaacagagttgttggcacggattcttggcaaatccccagcatcgacgtttatcgttatcgatgaggtcggtctgaatgattggtgcattggcggtttacccgtccctgaataccgcaacaagctcgagcaaacccaaaaataaaactgaggggttttcgtttgcgatattttcaaacgggaccccttactcggctctgtgcttggcctgctgatcaaaaaaggacgccgtactcggcagctggggcaattcaagttgaaacgggactgagcgcaccctgtttgttttctctccacggacaaccatgccttcgtattttgttggcatcgcgcttgaagatacggggaccgcatcctcagctgtatagacgcaaataaataatgttcgtggattctcagacatattggccgttgagccatgcaaaaggcgggtatgcatcaggcaaacggaccccgcttggccaacgcatcgctttgcctttggcagactcgcttccgcaacttcatccgtgaccgcccccgtaaaaacaccatcatgccacaggccatgtaactcttctttgtgtgaacctggcacgacttccaaagggccattttccaaagtgacctcatcgatcatcaaaagtgccgtgacgatgtcatcatttgtatgaggtgtgaatgggaagtcctgatgccattttacggcggtttcaccacccggcaatttggagttaattttagagtgatggaattttacattcgggccgataagatctgcgatacagtctgtcatccggcttaaggccatcgcctggtagtaagcgcccgatacttcgacaggagcattcacccggcgcagcctcggcttatcagctcgatgccctggctcaaggtcaaactggggacgtccattgatcgtctcgccgtatgattctgagtgaccacagc

SEQ ID NO: 147 - DNA, 4000 bp, Escherichia coli
  misc_feature (1989)..(1989): n is a, c, g, or t
aaaagggccccgggtttccccggggccctcgagttccttgatcgatgtggagggtcgggccgcaggcagcccggggcctcgtcactcgtacttgaagacgaggttggcgccgctggtcgagatgctgatcttcgacgcaccgctcaggcggtagaaggccgagctcgacggcgccgggatggtgatggtcttggccgtgccgtcaacggtcgctccagcgacggcggtgaacgcgccgccaagggccgaggcgctctgcagcgtgaccgccgagggggcggacgggagcccgcggatgatcatgccgctgatgccgccggagttgtcctccatctcggcgaaccagaggaattcgcccgccttgatgtctacgacgatcgtccgcggttgccccaacggatagacggttccgtcggcgcccttgccggaataattccccgtgttctgggcggccggggctttcaaacccttgatgtcgtcgacccagatcttaccggttcggttggcgtcggaggtgcggccctcgaagaccgtcacgttgtacttgccgggattcaggccggcgaagcgcatgaggatctcgctgccgtcggtgtccgggttgcggtacaggtagtcgtccttgaccgcggcgggcacgaggacgccgtcatacatgaccgcgatgccttccttggtggggttgttggcggtctggcctgtggccggagggaacgacttttccgtgtcgagcgcgacgttgttgaagatcgacaccgtgacgttcttgttctggctcttggagaagtcggtgagcttccaggtgacttccgtggcgtcggcgttggccgtgcctttgatgctgcccgacccatccgtcacgttggcattcggttcggagaaggtccacgtggggatcacattccactcggccaacggcgctggggcggaaccctccgaaccggcatcggactggttggcggtcgtgattttagggatccgctcgttttcgagttggccgaaatcgattttgaacagtccgttcgatgcccccggatcaatcaccgagcggatgatcatgccgctgatgccgccggaattgtcctccatctcggcgaaccagaggtagtcgcctggattgatcttcacggtgacggtcctgggttgcccgtcgggcactgcctccccggcgtcgttcttgccggagtagttgccggtgttttgggtggcgggctccttgaggcccttgatgtcgtccacccaaatcttgccggcccggaacgcgtccgaagtgcggccttcaaagacggttacgttataggtcccaggggtgagatttgcaatgcgcatcaagctctcggtatctggggtatcgggattccgatagaggtagtcatccttgacgacgccaggtacccgcacgccgtcatacaccacgtcgcgtccttccttcgtgggattgttggcgcttccgcccagcatgtaaggcggggcgtcgggggagagcttctcggcgagcgtccggttgtccattatggtcagggtgaccttggtgtttggcttgtccgagctgtccctgagcttccaagtgacctcggtgccggcggcgttggcttcgcccttgatgctggccgaaccgtcggtgacgttcgagttgggttccgcgaaagtccaggtgggaatgacgtcccagtcgagcaggagcggttggggatccaagggagtgccctcggcatcggtcgggatccgttcgttttcgatgtggccgaagtcgatcttgaagagttcggcctgcgtggcgaggggcgcctggaggagcgccgcggcgatggccgcggtccagaggccggtgcggggatgggagggtttcatgggtggttggttctgatgcgttgcgaacgaccccgttggatcgtgccgggcggattcccgtgcgggcggtcgggcaacctctggagggggattgccgagcgcgcgctcgcggactgtcgcctgaaagaccgaccgggngtggatgttgttacacacccgacgcccgaaactgtcgaggaaaaaccggaatccataaaaagattatcaagaacaactttttagaccccatctctccatcccctcccacctcagtgccatccagccgagctcggccgatcctccaaggggtgtccccggagcttcaccggctcaggaagcccttgacccgcagctccggacggaaggcctcatggggcagacggtccggcgtgacggtgaccgaggtggtgaccttgagtggcgccgccgcaccgaggtcataggtcaactccaccatcgccgcggtccagccctcggagggcgcggtcgcctggccgaggtactcaccctgggcatcgggctgcaggtcggtggaagtccatgccgggccgagggtgtcgaggcggaagtcccgggccttggggttgtgggcctgccagagcttcacggccttcggagtgtcggcggtcctgacacgcaggcgtcctggggcctcctgggtccaggtgaaccggggcagggatgtccggttcaggatggcgtgctgccaggccaggagggtggcgtaggcgtcggagcctttcagggagtggtcggcgttggggatgtagcgcaggtacttcggccccttcagttcatcgaagtagaactgcgaggaatccggcaggaagaactggtcgccgcaggcgttcatcaggagcttgggctgggtgagccggtcgcggtactcgtagggttcctcgatcttcatgagggcccggtattccggggtgccctgccagttcatgatgccctgctccacgtagttgccgacggccggcgcgaaggccccgtaggcccggtagtggtgcgtgaacgaaggctcgatgttcagcaggtcgatcacgatgggacacacggccaccacgcgccggtcgaccgccgcggtggtccaggtggtccagccccgcttggagcctccggcgacgacataggtcgcgacggcccggccgccgcccgcctcggccgccgtgaaggcgctcactgcgtccatggcccggacgaccgacttggtcatcggcaaccgggccggccaccgggtgtcgcccgtgcgcaggaactggtcccaggtgtaggcgatgaggtcgtcctcgacgcgttccttgccgtcccggtggaagatgagcggctggttgggcaccatcttcaactccacgaccaccgagcgggtcgcctcggcgatgcgggtgagttcgacgctgggcttgggacggtcgccctcccggttggcgccgccggcgatcaccagcagggccgtgtcgtgggcgcggtccttgggtcgggccacggtcagccagtgcttccagagggtgcggttcacctcgttggtggtgagccaggtctgtgaggtcaggtcgatgagggccacctcgcaacggccgatgttcgtggtcccggcgaccgtccaggcgaaggacggatcgggctgggccacgtagcggtcgagggcggtctcggggctgtggaacggggcggtggcggcgagggctctggaacctccggcggcggtgttgatggcggccagcgccagcaggagggtcgccacggacgggcaatgcaaggtcaggggcatgattcctaagagtgccagccgtcgtgcgcaaggcaacgccggagagccggaaagcccggaggccccagatcccgccgtccggttcagagggcgtcgcggatggcccgggccaagcggtcgacctgaccggtggccaaggtcgcacgcagggcgatgcggaagaacccctcggcggggccgcctgggtagcggatccatggcggcacgaagccggccgcctgcagggccgagtcgatccgctgggcctgggccgcgtcaaccggatggatcgcggtgacgggtgtgcgcgggtcggtgagcacccccggccggtccggtagggcggcggaaaaccgcgcggccagcgcctgcaaccggcgcacgcggcccggcgtccgccgcagccggccgacggccgcg

SEQ ID NO: 148 - DNA, 4000 bp, Escherichia coli
  misc_feature (288)..(288): n is a, c, g, or t
  misc_feature (1983)..(1984): n is a, c, g, or t
  misc_feature (1986)..(1986): n is a, c, g, or t
  misc_feature (1989)..(1990): n is a, c, g, or t
  misc_feature (2001)..(2003): n is a, c, g, or t
  misc_feature (2017)..(2017): n is a, c, g, or t
  misc_feature (2019)..(2020): n is a, c, g, or t
  misc_feature (2049)..(2049): n is a, c, g, or t
  misc_feature (2052)..(2053): n is a, c, g, or t
  misc_feature (2055)..(2056): n is a, c, g, or t
  misc_feature (2061)..(2061): n is a, c, g, or t
  misc_feature (2074)..(2074): n is a, c, g, or t
  misc_feature (3771)..(3771): n is a, c, g, or t
  misc_feature (3807)..(3810): n is a, c, g, or t
  misc_feature (3819)..(3819): n is a, c, g, or t
  misc_feature (3821)..(3821): n is a, c, g, or t
  misc_feature (3862)..(3862): n is a, c, g, or t
cgcaccgctaaattgaacggttaaagtgctcatcgccactggcacgccacttagattaaaactctgcgcctcagctgaacttgctccccagcccaaaaacgcgctgtctccagtaagcacaaaccagccgtcgccgtcgccacctccgtagggcgcgtcatttgccaacgctttaagcggaaaaatgcccaaaagcgtaaccaaactaacaacaacgctaaattttgtaacaaaatttttcatagtgatattttcatatttctgcataacccaaacagttgcgcgganaggacgaaacccaatattgttgttgcgagtcgaatttgaccagctggcgttgttgcggtccgacaaacgcaagttagtggcgttattgttccaatcgcctccgcgaataccttattgacaaaataccatttttcaaaactgcgtttttgatttttttaaatctggtaaattaccttcccaactgttctttttattttctttgataaaaccataattttatcaaattcttaaaataaaatcatttttttatccaaccccctgcggtcaagccaattttttctatctggtctatcactgctccgtatcctttggcggagataaaacggaaataatatgccaaccgatacaaactccttaaaacatcaagcttgcaatttatatccttaaccaaagcgactctattgctgggaaacagaattgcttcctgcgatttttctaataaatccagttgcaaattttcaattctttgggcgagaagatatctttgatctttgggaaattttctaagtcgtggcaaagtgtctaaaagtaaattaaaaatcaaattataaagtgggtatttgtcatacactatccccataaaacatccctggccattttatttaaaccgctacttttggctaaaagggagaatccgtgccagcccgaccaatgttttttcttgtcgcagttgctaataccaattttattcaaaatatggaaattttttaaagtttttctaagttttactccgcgaatttttagcccccttcttctgattatatatcccaaaaatggtagcccagcacaaaacggaaacaattgctttttcttgttatgccaatttaaatgtaattgcttgcttaaataattctctatgtcgttctgcgctatccaaagttcttttttgctactcccaaatagtaaaaaatcatctaaatatctgatatagtcataatcagggtatttctttaacacatattgatctaactcatttaaatagatgttgccaaaaatttggctggttaaattcccaattggcaagccaacttgataattcggttttgtagaataagagcttattattttttttattaagtccagaactgcccgctctttaatttttctctcaatcagagaaaacaatattttgtgatcaattgacggaaaaaatttctcaatatcgccctttaaaacaaaggggtgtttttttaacattgtttggctggtaataatcgctctgtgaactcccctttctttccgacaagcaaaactattattaatcatctcttggtcaaacattggctcaataatattgcaaagggcgtgatggataatacggtcgtaaaaatttggagcatttatctcccgcctttttggctcaaagaccacaaaagagctgtatggacggggttcgtatctacccgaaagcaactctgctctaatttgtaataaaatcttttcctgtaaataaaaatatcgatacttatttttgtttttgcaagctcggtaagctttttcaaacgccaaaaataaattttcccaactaacgatttgttcaaataaatttttcatagtttttttatggattcccattaaaatttattccgtgcttgatacggggcgggaatgacaggaaaataaatttttcataattctaaaattctaaaaatccaaaattctaattagttgcgcggagaggacgaaacccaatanngntgnngcgagtcgaannngaccagctggcgtngnngcggtccgacaaacgcaagtaagtggcgncanngnnccaancgcctccgcgaanacctttggcagtcgttgcgcctggccaagaagctggaggggtggttgtgccgttgccactgccaagtgtctgcgtccacgaacagttaaccaaatgctcccaatcattacccgccaaatctgctatcccgtagaccgaggcgccggtctgctgattggtgcgagccacatcggctgataaataatgccccacatcagccggaccagtcgatgtgtttccgtagttagcataatattttctaaaagtattgccatcccagctgtaagtagtggcagacggagcatcatctccccacggataaaccgacttaaccgccgagccaatagaggttcctctgccagctttttcaaactccatctctgtcattggtctgagtcctgcccacgaagcgtatgctttggcatcgtcccaattcaaaaaattgcatcctcgattaggcgtagtggtgctgtagcgactgccgtaagggttagcagagttgtaagcaatggtgtagcggtaagtattatatagagagccatcatgccgactttgggattcgccagaagagatagtgttgagaaaatcgatgtattgaccttgggatacctcatattttgccatataaaaggcgctaaacccattttgccagccaaccgaggcgccactgggcacattgctggtggaggaaaccagtgcttcgcttcctcctccgtagttattgtaaccacttccgcctatcccaccaacattgtagtaaaactgcccctccggcacatagaccatctctatcgccattattttaatccgagcggtagcgccgtttgcaacactatcagcgccgtaattccagataactgtttgattattacccgggtcaacaaaagcgcccaaattatccgtaacaggggtaattgtccccccgctagagagcgtggcgtgattccatgttccgtccgcgcccccgccagttgaatatttgacaaaaatccacgccttgtcccaaaacgctttggaatcatagaccaacgagtagttattgctccatgtgatgttgagggtgatagtggctttgctgttcacagtgtcaactgacgagatggcaacattgctgacagagatatcatttgccttgactttgggcagggattggcgagaaaaataataaccgataaacgcgattgcaatgattgcaattagagaaatgattgtttttttcataatacctttcttttagttaataattaatagcgaataactaataaccacaacttaaaaccatttaacttcgtttgcctttcatggtcaacaaactggcggctatcattttagctaactctgttgcctcttggatatgtttgctgattttctctttatcaattaaatcactatctcttagcaggcatagccaatacattgtttcattggcgctctttaaagaaatctgataaaacttaataaaatcttttttactagacgaagcaatggcttctatgatgttagccccaattgaagtggcgctcctaagtagttggtcgccaataacccaataaattttttcttttggcagagaaattgtcaacctaattatatcaagggaaaatttataggaacgatatttgagattggttttggggtttaagttatggttattagttattagttttgacatattagtttacttgatacattagtttaacggtattttgaattagttngaagttttaagttgtggttattagttattagttttnnnntattagttnantttaattattcccaaatccaatttccaaccaatcagtgccntcgtaaaccagagttaaagtatcatttatgcccaaaacgcgtgtggctccgcccaatttcactcctaaattattggtgatagtgatggtgttagtgtcgctggtgccgataatagtaatttgctgaccaactaatccg

SEQ ID NO: 149 - DNA, 4000 bp, Escherichia coli
  misc_feature (1972)..(1973): n is a, c, g, or t
  misc_feature (1975)..(1976): n is a, c, g, or t
  misc_feature (1979)..(1979): n is a, c, g, or t
  misc_feature (1984)..(1985): n is a, c, g, or t
  misc_feature (1988)..(1988): n is a, c, g, or t
  misc_feature (1992)..(1992): n is a, c, g, or t
  misc_feature (1996)..(1997): n is a, c, g, or t
  misc_feature (1999)..(2000): n is a, c, g, or t
  misc_feature (2006)..(2006): n is a, c, g, or t
  misc_feature (2036)..(2036): n is a, c, g, or t
  misc_feature (2038)..(2038): n is a, c, g, or t
  misc_feature (2044)..(2045): n is a, c, g, or t
cccccgacccgatgccattcaagcgttttagtttctcactggttacttgggtggatagaagcgcctgatcttgggagagatgctacgggcaaggtctggattcacctcgcggatggtgcgccacatgaagcccagggagtgcgtgtgcttggcgtggccgagcagtgaggtcacgctgtccacctttcccttctttaccgcacgccggaacttgaacaggctgtatttgcggataaacttagctcgccgccatgtgcggtatccgacgaaattcaccccacgcttggtcttggccatcgtccacttcgacagctcgaggtgcagctcatcgcgcaggaacgtctcgatcctgaacttgtattctaggcactgctcccggtcgaggtcgaacaggatgaagtcatcgacgtagcgacagtagagcttgaccttcagctcgcgcttcacgaagtggtcgagcgcgttcaggtagatcagggcgtaggtctgcgacagcaggttaccgatagggatgccagttggctccggcatatcggcgaacagcatcatcatgtccactaggcgcttgtccttaattttgcgctcgatgaggttctgcaggactgttcggtctatccggtaaaagaacttccgcacatccagcttgattgcgtaactgtcggggtggctttttagtagtgcatctttcgcgtattccgaggcgcgatgggttcccttgccgatgcggcaggcaaaggactgatcgatgaatgcgcgctcgaagataggcctgatgacgtggtagatcgcatgctgcaccacgatgtcgccgaaccacggagcacagatttcacgctccttcggctcgtagaccttgaagcggtggtagccgcgcacggcatagctgccgtcatgaatgcgccggtatagccagtcgagcactgcgccggaacgcacgtcaaaccagaagcactggctgcgcaggcgctttccgcgcctggcttcgatgtaggcgttatagagggcttcacgcgtgaaggtctgctcgaacaaattgccgtgtcgcttcattcactactccgaaaaaaaagctccgcgctggtcttcgggcaagccctaccgaaaagcacggagctactacgagttcgccgtcctgcaacgcaggctggcaggacaacctatccctatggttccactattcccatttgagatttgagggggaaaccgcagtccgggcgcgcgccgacgttgttgttcacattcgtccgtggattattcagattgcgcgcgaacgcccccgccagggcaccattgttatagttgccaccggccagaggcaggcgtggtcgtaggttgccctcataacaccacaatggacgggtcacttcttctggccttcttctttcagctcggccagttcgtgccgtatccaaccgccgatcatgcgaccgaggtcatccaccagcttgctgatcgcctgccagcggtgcgcttcaacctccgccgcatcacttgcggtgcgcccatccgtgaacttgaaatagcccaactcataggccagaaacaactgcatccgcagttgctcgtgcgctatatcaagctgcgtcagggtcgtcttcttgtggtatcgcttttgcccctcgaccaccagatcatagacctcgtaggccgagttgcggattctgttcgagagggcgtagcgttcgtgacgtggaaagtggtttagatagacgttgaggagcttggatagctccacaaacttcctaaccaacgccgcctcccgatcaaccgccatcaccgccccctttacagaaccaagtgtgattctatcgcgttagcctgttcctgaaaatgaaaccgggcgcagaagcgcccggccaaaccatctactttcctgcttattccccttgcgagccgcgttactgcttcggctgctgggtgggtgctatcgcacccccctgtcaaagaacataggccgggcgcgcgccgacgnngnngcncacanncgnccgnggannanncagatngcgcgcgaacgcccccgccagggcaccatngntatagnngccaccggccagaggcaggcgctcatccgttacatcaacccagaatccgtcgccgccaaggccggtgctggcgaccggataaagccccagagattttgccagcgacaatgcggctgcacctactggcgtagtgccagggttggtcataccttccaggcttgcacccgatgcacgcaccagtgtgtagttggttgtaccggatgtcgcatacttgatcgcattggccgagccaggcgcaaccaatgcaccagtagagccgtcaatagccttccaaagtgacgaagtcgcgctctgatccttggtgttatccgccgcatcattgttctggatgatttggatttcgccagcttgcaggcgcataccggcgttccactcccacaaattgccgttcagatcggcgatgccgctaggctggccgttatgacgccaagaggccgggcctgcaccagtgtaggtcttgccattgccggtagcgctcccgatagcgccgccatcggcgcgcgctgccgtttcccacggcgagcctacatcccggccccagtcgttattgccgcgaggcatagtgccattcttccagctccacagagcaatggcagccatctcggcggtagtcatcatgtgccagcctgggccattggccgcagccaaaccacggaacgtatcgaagttcacgctggcggtcggtgaaacgcccggaatggacagcaggttgccatccttctggatgccgaggtgctggccgatgaagatttcactcttctcgacgccattgacaataaacgcctcatgcacgccggtgccgagaccggcatcgatgtcctgcttgttgaacttcgggatgacattcatatagcacgggtgtcctgccgccgtgtaaagcacggtgacatggccgccagttgcggcctcaaccgaggctcgaagatcgtctttgatgaagatggtagtcatggtgattggtctccttaattagtttgctggccacagcgtgaggacgatgcggtttgggtcgaatgccaccggagtggtaacggtagtcgggtgtccgtctgcatcgagcgggcctgcctcctcgatgtagcgcctggcgggaatttcgacctgcgccaggaaagcgccatcaccaccctcgtgagggatgccgtcaagttcgcggatttcaatgatctgtgcttcgtcagtctcacgcgcagcgcagtcgattactacgccagccacggtcactacatcactcgtaactgagaactcggaaacgacttggccaggctgtttcatgttgatttgcggcatttgtaactcctttcatggttaagcgttgaggcggctcacgcggtagcgagccaccacattgtcagcggctgcggcaagcatcaccgtgaagccgttattggcacgactggacaccaccaggcttttagcctcggctggcccgccctgggcggatagcacgtcaaaggtgatgtgataggcgctgtccggcaggccgttgatctgcggcgaagcctgcgccgggttgtccagcatgatcggaaagccagcctcgatgcgccgcacatccatgagcgtcacagaggacaggtttggatctgtcgcatccgtcgaattcgctggcacggtcaggttatagatcagaatgccatcgtccggcacagcctgaccgatggtggtcacggccaagcgccagaagccataggcatcctgataaaggtaggcatacaccgttacagcgccggtaccggtgttgctcggcaccgaggcagaattgttgccatcagccaccgcaaactgctggcctttcgcaaaacagattcccgccgcgatgctaaggttgcgcgccgccgtcgtagatttcgacaatatgcagcccgtgacaacgccacgattcttgatggtcacgatgccttcctgctgtgcgaattgatgcagtccgcgcacgcctttgttggccacgttcg

SEQ ID NO: 150 - DNA, 4000 bp, Escherichia coli
  misc_feature (789)..(789): n is a, c, g, or t
  misc_feature (2739)..(2739): n is a, c, g, or t
  misc_feature (2753)..(2753): n is a, c, g, or t
  misc_feature (2759)..(2760): n is a, c, g, or t
  misc_feature (2765)..(2765): n is a, c, g, or t
  misc_feature (2768)..(2768): n is a, c, g, or t
  misc_feature (2774)..(2774): n is a, c, g, or t
  misc_feature (2777)..(2779): n is a, c, g, or t
  misc_feature (2781)..(2781): n is a, c, g, or t
  misc_feature (2785)..(2785): n is a, c, g, or t
  misc_feature (2788)..(2788): n is a, c, g, or t
  misc_feature (2791)..(2791): n is a, c, g, or t
  misc_feature (2793)..(2795): n is a, c, g, or t
  misc_feature (2797)..(2797): n is a, c, g, or t
  misc_feature (2801)..(2801): n is a, c, g, or t
  misc_feature (2803)..(2804): n is a, c, g, or t
  misc_feature (2806)..(2807): n is a, c, g, or t
  misc_feature (2809)..(2809): n is a, c, g, or t
  misc_feature (2813)..(2813): n is a, c, g, or t
  misc_feature (2815)..(2815): n is a, c, g, or t
  misc_feature (2819)..(2823): n is a, c, g, or t
  misc_feature (2825)..(2825): n is a, c, g, or t
  misc_feature (2828)..(2831): n is a, c, g, or t
  misc_feature (2835)..(2835): n is a, c, g, or t
  misc_feature (2837)..(2837): n is a, c, g, or t
  misc_feature (2840)..(2842): n is a, c, g, or t
  misc_feature (2845)..(2845): n is a, c, g, or t
  misc_feature (2849)..(2851): n is a, c, g, or t
  misc_feature (2853)..(2853): n is a, c, g, or t
  misc_feature (2855)..(2855): n is a, c, g, or t
  misc_feature (2858)..(2858): n is a, c, g, or t
  misc_feature (2861)..(2861): n is a, c, g, or t
  misc_feature (2864)..(2864): n is a, c, g, or t
  misc_feature (2868)..(2870): n is a, c, g, or t
  misc_feature (2874)..(2874): n is a, c, g, or t
  misc_feature (2877)..(2879): n is a, c, g, or t
  misc_feature (2881)..(2885): n is a, c, g, or t
  misc_feature (2887)..(2887): n is a, c, g, or t
  misc_feature (2889)..(2891): n is a, c, g, or t
  misc_feature (2893)..(2894): n is a, c, g, or t
  misc_feature (2896)..(2896): n is a, c, g, or t
  misc_feature (2898)..(2899): n is a, c, g, or t
  misc_feature (2903)..(2904): n is a, c, g, or t
  misc_feature (2908)..(2909): n is a, c, g, or t
  misc_feature (2913)..(2913): n is a, c, g, or t
  misc_feature (2917)..(2917): n is a, c, g, or t
  misc_feature (2920)..(2922): n is a, c, g, or t
  misc_feature (2924)..(2925): n is a, c, g, or t
  misc_feature (2927)..(2930): n is a, c, g, or t
  misc_feature (2934)..(2934): n is a, c, g, or t
  misc_feature (2936)..(2937): n is a, c, g, or t
  misc_feature (2942)..(2943): n is a, c, g, or t
  misc_feature (2949)..(2949): n is a, c, g, or t
  misc_feature (2951)..(2951): n is a, c, g, or t
  misc_feature (2954)..(2954): n is a, c, g, or t
  misc_feature (2956)..(2956): n is a, c, g, or t
  misc_feature (2959)..(2959): n is a, c, g, or t
  misc_feature (2961)..(2961): n is a, c, g, or t
  misc_feature (2963)..(2965): n is a, c, g, or t
  misc_feature (2967)..(2968): n is a, c, g, or t
  misc_feature (2970)..(2970): n is a, c, g, or t
  misc_feature (2972)..(2972): n is a, c, g, or t
  misc_feature (2974)..(2975): n is a, c, g, or t
  misc_feature (2977)..(2979): n is a, c, g, or t
  misc_feature (2983)..(2983): n is a, c, g, or t
  misc_feature (2985)..(2985): n is a, c, g, or t
  misc_feature (2988)..(2989): n is a, c, g, or t
  misc_feature (2991)..(2991): n is a, c, g, or t
  misc_feature (2994)..(2995): n is a, c, g, or t
  misc_feature (2997)..(2997): n is a, c, g, or t
  misc_feature (2999)..(2999): n is a, c, g, or t
  misc_feature (3001)..(3002): n is a, c, g, or t
  misc_feature (3004)..(3004): n is a, c, g, or t
  misc_feature (3006)..(3007): n is a, c, g, or t
  misc_feature (3010)..(3014): n is a, c, g, or t
  misc_feature (3017)..(3022): n is a, c, g, or t
  misc_feature (3024)..(3024): n is a, c, g, or t
  misc_feature (3031)..(3031): n is a, c, g, or t
  misc_feature (3034)..(3034): n is a, c, g, or t
  misc_feature (3036)..(3038): n is a, c, g, or t
  misc_feature (3040)..(3042): n is a, c, g, or t
  misc_feature (3044)..(3044): n is a, c, g, or t
  misc_feature (3048)..(3049): n is a, c, g, or t
  misc_feature (3053)..(3058): n is a, c, g, or t
  misc_feature (3062)..(3063): n is a, c, g, or t
  misc_feature (3066)..(3069): n is a, c, g, or t
  misc_feature (3072)..(3073): n is a, c, g, or t
  misc_feature (3077)..(3077): n is a, c, g, or t
  misc_feature (3079)..(3080): n is a, c, g, or t
  misc_feature (3084)..(3088): n is a, c, g, or t
  misc_feature (3090)..(3091): n is a, c, g, or t
  misc_feature (3093)..(3101): n is a, c, g, or t
  misc_feature (3103)..(3105): n is a, c, g, or t
  misc_feature (3108)..(3109): n is a, c, g, or t
  misc_feature (3111)..(3118): n is a, c, g, or t
  misc_feature (3122)..(3123): n is a, c, g, or t
  misc_feature (3126)..(3126): n is a, c, g, or t
  misc_feature (3128)..(3128): n is a, c, g, or t
  misc_feature (3131)..(3131): n is a, c, g, or t
  misc_feature (3134)..(3134): n is a, c, g, or t
  misc_feature (3136)..(3136): n is a, c, g, or t
  misc_feature (3138)..(3138): n is a, c, g, or t
  misc_feature (3140)..(3142): n is a, c, g, or t
  misc_feature (3144)..(3144): n is a, c, g, or t
  misc_feature (3148)..(3148): n is a, c, g, or t
  misc_feature (3152)..(3152): n is a, c, g, or t
  misc_feature (3154)..(3156): n is a, c, g, or t
  misc_feature (3158)..(3158): n is a, c, g, or t
  misc_feature (3160)..(3164): n is a, c, g, or t
  misc_feature (3166)..(3168): n is a, c, g, or t
  misc_feature (3171)..(3171): n is a, c, g, or t
  misc_feature (3173)..(3173): n is a, c, g, or t
  misc_feature (3176)..(3179): n is a, c, g, or t
  misc_feature (3184)..(3184): n is a, c, g, or t
  misc_feature (3187)..(3187): n is a, c, g, or t
  misc_feature (3191)..(3191): n is a, c, g, or t
  misc_feature (3193)..(3194): n is a, c, g, or t
  misc_feature (3198)..(3199): n is a, c, g, or t
  misc_feature (3201)..(3201): n is a, c, g, or t
  misc_feature (3204)..(3204): n is a, c, g, or t
  misc_feature (3210)..(3211): n is a, c, g, or t
  misc_feature (3214)..(3214): n is a, c, g, or t
  misc_feature (3217)..(3217): n is a, c, g, or t
  misc_feature (3219)..(3219): n is a, c, g, or t
  misc_feature (3223)..(3225): n is a, c, g, or t
  misc_feature (3227)..(3227): n is a, c, g, or t
  misc_feature (3231)..(3235): n is a, c, g, or t
  misc_feature (3237)..(3241): n is a, c, g, or t
  misc_feature (3243)..(3248): n is a, c, g, or t
  misc_feature (3250)..(3252): n is a, c, g, or t
  misc_feature (3254)..(3254): n is a, c, g, or t
  misc_feature (3256)..(3263): n is a, c, g, or t
  misc_feature (3265)..(3265): n is a, c, g, or t
  misc_feature (3268)..(3270): n is a, c, g, or t
  misc_feature (3272)..(3278): n is a, c, g, or t
  misc_feature (3280)..(3282): n is a, c, g, or t
  misc_feature (3285)..(3297): n is a, c, g, or t
  misc_feature (3302)..(3302): n is a, c, g, or t
  misc_feature (3306)..(3312): n is a, c, g, or t
  misc_feature (3314)..(3316): n is a, c, g, or t
  misc_feature (3318)..(3318): n is a, c, g, or t
  misc_feature (3320)..(3320): n is a, c, g, or t
  misc_feature (3322)..(3323): n is a, c, g, or t
  misc_feature (3325)..(3325): n is a, c, g, or t
  misc_feature (3327)..(3327): n is a, c, g, or t
  misc_feature (3332)..(3332): n is a, c, g, or t
  misc_feature (3335)..(3335): n is a, c, g, or t
  misc_feature (3337)..(3338): n is a, c, g, or t
  misc_feature (3340)..(3342): n is a, c, g, or t
  misc_feature (3344)..(3344): n is a, c, g, or t
  misc_feature (3349)..(3349): n is a, c, g, or t
  misc_feature (3352)..(3353): n is a, c, g, or t
  misc_feature (3355)..(3358): n is a, c, g, or t
  misc_feature (3360)..(3367): n is a, c, g, or t
  misc_feature (3369)..(3369): n is a, c, g, or t
  misc_feature (3371)..(3371): n is a, c, g, or t
  misc_feature (3374)..(3375): n is a, c, g, or t
  misc_feature (3378)..(3378): n is a, c, g, or t
  misc_feature (3380)..(3380): n is a, c, g, or t
  misc_feature (3382)..(3385): n is a, c, g, or t
  misc_feature (3390)..(3394): n is a, c, g, or t
  misc_feature (3398)..(3400): n is a, c, g, or t
  misc_feature (3403)..(3403): n is a, c, g, or t
  misc_feature (3406)..(3407): n is a, c, g, or t
  misc_feature (3409)..(3409): n is a, c, g, or t
  misc_feature (3413)..(3413): n is a, c, g, or t
  misc_feature (3415)..(3415): n is a, c, g, or t
  misc_feature (3417)..(3421): n is a, c, g, or t
  misc_feature (3424)..(3426): n is a, c, g, or t
  misc_feature (3429)..(3433): n is a, c, g, or t
  misc_feature (3435)..(3435): n is a, c, g, or t
  misc_feature (3437)..(3440): n is a, c, g, or t
  misc_feature (3443)..(3443): n is a, c, g, or t
  misc_feature (3445)..(3445): n is a, c, g, or t
  misc_feature (3448)..(3454): n is a, c, g, or t
  misc_feature (3456)..(3461): n is a, c, g, or t
  misc_feature (3463)..(3463): n is a, c, g, or t
  misc_feature (3466)..(3467): n is a, c, g, or t
  misc_feature (3471)..(3471): n is a, c, g, or t
  misc_feature (3474)..(3474): n is a, c, g, or t
  misc_feature (3477)..(3480): n is a, c, g, or t
  misc_feature (3483)..(3483): n is a, c, g, or t
  misc_feature (3485)..(3485): n is a, c, g, or t
  misc_feature (3489)..(3491): n is a, c, g, or t
  misc_feature (3493)..(3493): n is a, c, g, or t
  misc_feature (3496)..(3497): n is a, c, g, or t
  misc_feature (3499)..(3499): n is a, c, g, or t
  misc_feature (3501)..(3502): n is a, c, g, or t
  misc_feature (3504)..(3510): n is a, c, g, or t
  misc_feature (3512)..(3512): n is a, c, g, or t
  misc_feature (3516)..(3516): n is a, c, g, or t
  misc_feature (3518)..(3518): n is a, c, g, or t
  misc_feature (3520)..(3525): n is a, c, g, or t
  misc_feature (3528)..(3528): n is a, c, g, or t
  misc_feature (3530)..(3531): n is a, c, g, or t
  misc_feature (3533)..(3534): n is a, c, g, or t
  misc_feature (3538)..(3538): n is a, c, g, or t
  misc_feature (3541)..(3542): n is a, c, g, or t
  misc_feature (3546)..(3546): n is a, c, g, or t
  misc_feature (3551)..(3551): n is a, c, g, or t
  misc_feature (3553)..(3557): n is a, c, g, or t
  misc_feature (3559)..(3559): n is a, c, g, or t
  misc_feature (3562)..(3564): n is a, c, g, or t
  misc_feature (3570)..(3571): n is a, c, g, or t
  misc_feature (3573)..(3573): n is a, c, g, or t
  misc_feature (3576)..(3579): n is a, c, g, or t
  misc_feature (3585)..(3586): n is a, c, g, or t
  misc_feature (3591)..(3597): n is a, c, g, or t
  misc_feature (3599)..(3601): n is a, c, g, or t
  misc_feature (3603)..(3604): n is a, c, g, or t
  misc_feature (3608)..(3609): n is a, c, g, or t
  misc_feature (3611)..(3611): n is a, c, g, or t
  misc_feature (3613)..(3613): n is a, c, g, or t
  misc_feature (3616)..(3617): n is a, c, g, or t
  misc_feature (3622)..(3629): n is a, c, g, or t
  misc_feature (3632)..(3632): n is a, c, g, or t
  misc_feature (3635)..(3636): n is a, c, g, or t
  misc_feature (3645)..(3645): n is a, c, g, or t
  misc_feature (3647)..(3648): n is a, c, g, or t
  misc_feature (3650)..(3650): n is a, c, g, or t
  misc_feature (3653)..(3653): n is a, c, g, or t
  misc_feature (3655)..(3655): n is a, c, g, or t
  misc_feature (3657)..(3657): n is a, c, g, or t
  misc_feature (3659)..(3659): n is a, c, g, or t
  misc_feature (3663)..(3665): n is a, c, g, or t
  misc_feature (3667)..(3667): n is a, c, g, or t
  misc_feature (3669)..(3669): n is a, c, g, or t
  misc_feature (3671)..(3671): n is a, c, g, or t
  misc_feature (3673)..(3674): n is a, c, g, or t
  misc_feature (3678)..(3679): n is a, c, g, or t
  misc_feature (3681)..(3682): n is a, c, g, or t
  misc_feature (3686)..(3687): n is a, c, g, or t
  misc_feature (3690)..(3692): n is a, c, g, or t
  misc_feature (3694)..(3700): n is a, c, g, or t
  misc_feature (3702)..(3702): n is a, c, g, or t
  misc_feature (3705)..(3706): n is a, c, g, or t
  misc_feature (3709)..(3712): n is a, c, g, or t
  misc_feature (3714)..(3716): n is a, c, g, or t
  misc_feature (3719)..(3720): n is a, c, g, or t
  misc_feature (3724)..(3724): n is a, c, g, or t
  misc_feature (3726)..(3727): n is a, c, g, or t
  misc_feature (3729)..(3730): n is a, c, g, or t
  misc_feature (3733)..(3733): n is a, c, g, or t
  misc_feature (3735)..(3735): n is a, c, g, or t
  misc_feature (3737)..(3738): n is a, c, g, or t
  misc_feature (3741)..(3741): n is a, c, g, or t
  misc_feature (3743)..(3743): n is a, c, g, or t
  misc_feature (3745)..(3745): n is a, c, g, or t
  misc_feature (3748)..(3748): n is a, c, g, or t
  misc_feature (3751)..(3751): n is a, c, g, or t
  misc_feature (3753)..(3754): n is a, c, g, or t
  misc_feature (3756)..(3756): n is a, c, g, or t
  misc_feature (3759)..(3759): n is a, c, g, or t
  misc_feature (3761)..(3761): n is a, c, g, or t
  misc_feature (3764)..(3764): n is a, c, g, or t
  misc_feature (3768)..(3768): n is a, c, g, or t
  misc_feature (3771)..(3771): n is a, c, g, or t
  misc_feature (3773)..(3773): n is a, c, g, or t
  misc_feature (3775)..(3775): n is a, c, g, or t
  misc_feature (3779)..(3779): n is a, c, g, or t
  misc_feature (3781)..(3782): n is a, c, g, or t
  misc_feature (3784)..(3793): n is a, c, g, or t
  misc_feature (3796)..(3801): n is a, c, g, or t
  misc_feature (3803)..(3804): n is a, c, g, or t
  misc_feature (3807)..(3808): n is a, c, g, or t
  misc_feature (3811)..(3812): n is a, c, g, or t
  misc_feature (3814)..(3816): n is a, c, g, or t
  misc_feature (3820)..(3823): n is a, c, g, or t
  misc_feature (3834)..(3837): n is a, c, g, or t
  misc_feature (3839)..(3839): n is a, c, g, or t
  misc_feature (3843)..(3843): n is a, c, g, or t
  misc_feature (3845)..(3850): n is a, c, g, or t
  misc_feature (3852)..(3858): n is a, c, g, or t
  misc_feature (3864)..(3865): n is a, c, g, or t
  misc_feature (3873)..(3873): n is a, c, g, or t
  misc_feature (3877)..(3877): n is a, c, g, or t
  misc_feature (3880)..(3880): n is a, c, g, or t
  misc_feature (3883)..(3883): n is a, c, g, or t
  misc_feature (3886)..(3887): n is a, c, g, or t
  misc_feature (3890)..(3891): n is a, c, g, or t
  misc_feature (3894)..(3894): n is a, c, g, or t
  misc_feature (3896)..(3896): n is a, c, g, or t
  misc_feature (3898)..(3899): n is a, c, g, or t
  misc_feature (3905)..(3906): n is a, c, g, or t
  misc_feature (3911)..(3911): n is a, c, g, or t
  misc_feature (3913)..(3913): n is a, c, g, or t
  misc_feature (3916)..(3916): n is a, c, g, or t
  misc_feature (3920)..(3921): n is a, c, g, or t
  misc_feature (3929)..(3930): n is a, c, g, or t
  misc_feature (3944)..(3944): n is a, c, g, or t
  misc_feature (3952)..(3952): n is a, c, g, or t
  misc_feature (3954)..(3954): n is a, c, g, or t
  misc_feature (3956)..(3956): n is a, c, g, or t
  misc_feature (3960)..(3961): n is a, c, g, or t
  misc_feature (3963)..(3963): n is a, c, g, or t
  misc_feature (3965)..(3966): n is a, c, g, or t
  misc_feature (3968)..(3968): n is a, c, g, or t
  misc_feature (3970)..(3970): n is a, c, g, or t
  misc_feature (3972)..(3973): n is a, c, g, or t
  misc_feature (3975)..(3977): n is a, c, g, or t
  misc_feature (3979)..(3979): n is a, c, g, or t
  misc_feature (3986)..(3987): n is a, c, g, or t
  misc_feature (3991)..(3991): n is a, c, g, or t
  misc_feature (3994)..(3996): n is a, c, g, or t
  misc_feature (3998)..(3998): n is a, c, g, or t
acacagaagtgtggataaatttatgatctgataagtggatatatgttgagatactctatgaagttgatttactcctctcaaacgcatgtcttgaagggatttctccatatttttccatatccgtatttcgatagtgttgtttgccgtttgtgaaatcctgcggggagttaagcagttactgcttttcagctcgttacttaatacttcgaaacgacgttgggcatctgccgtgtttttttctttcataacggcctctttagtcgcagacataacctcatccatactctttgttccttcttcgggagcaaacagcatgaagctaatcaacagacctaatatgaatagaaaattcttcatggcgcaaatatacaagtatttctttagataataacaacagtatatgttatttgttttttatttttgtagttattttaagaataaaacaatagaatggagaataacagatcgagaattcaagcttggttagaggcggcacgtccgaaaacgttgccggcatcatttagtccggtattagttgggtgtgcgctggcttacagggatggagtatttaaattggctccggcgatcctttgtgttttggtggctttacttgcccagatagccagtaattttgccaatgattattttgattttaagaagggggcggataaggaggaccggttaggcccggagcgagcggtggcttccggttggataactcctaaggcaatgctatgggggacttttatcacgttggggctttcttgtctatgtggctgtttcttgttnttctttgccggctgggagctcatcggtgtaggaattgctattgcgatttgtgtcttggcttattcagcagggccatttcctttggcttataacgggctgggggatgtgtgtgtcgtattgttttatgggattattccggtttgttttacgtattatgtacaagcattatcgttttccttattgtcattcttgctttcgttgtcattggggctgttgtccgctaatattttgatcgtgaataattaccgggattatgagcaagataaggcggctcgtaaacggactacgattgtgctattcgggcgtacgttcgggttggtaacttatttgctgaacggtatattggcttttttgatcacgctgcctttattgatggatgcctcaccttggcttgtttgtttattcgcggcttttagcgtgctgtttgccgccacatggctggagatgaaacagtatcaaggccgtgagcttaatagaactttagggcatacggcacggaatgtatttatctatgccgtgttgctttcagttgtattgttatttggttcttaagatgtgccgtgctttgaacaatcgcttggcctcatggagatttttctgtatgtatttggacaggataatcaatgtaaccgctacgataatcagtaagattcctaaagcgaggtgaggggtgaaaggctctccaaagactaaaacacctacgcagacggctgtcacgggttctgttgctcccagtacggaagttagggtggaaccgatatggtgtacggcttgtaccaatgtaatgttagatactacggttggcaagaaggctaataagacgaggttaataaaagagggcaggtctggaatgggttggattcctgttcctgcctgtgcttttatgaaaaataaagaggtactgacgataaatacatagaacgtaagttttcgtcccggcatatcatgtaccctcgatttattgacggtgacgatatagagggcataagcgacggcggaaagtaatacgatgattacgcctagcccgtttaatcgcatctctcctccatcaatggatagacgggctactccacaaatagcgagcccgatcgccaagagcgtaatccatgatgttttttctttgaatacaaacagcatgaatagggttacgaatatcggataggtgaaatgtagagtcgtggcgattcccgccgccataaaattatagccccaaaacaggaacattgccgagcctgtataaaaagcacccaataaaatcaatatcggtaggtttcgcatctctgttctgaaagattccttttttgctagaagcatacccgataaggcgatggccgcgaataagaaacgatagaacaatatcgaatcaaaccgcatacccttctccataagaggcaatgtaaacaaagggattaaaccgaatgtaacagaagtcgctattccataagcgaaaccttttagattattattcatattatactttttgataaaatgaccgcaaacatacaaaaaagtcttgaaataacatggggttaaaatgcccctgctacttttgtggcattatatgctaaatgtataaagagaaggaatcgctctcttactaataatgtaaataagaactttcatcaatgtgaaatatcctctatcgtcggattatggcaagtcatacctccatcagagatgatagtctgtccggaaatgtaacgggttaaattgatgacgccagctttgctcataccataaagagttccccggaaatctcctgtcaatcctccaatggaggctacgtttacgatgcttccttttccttttacggtcattgaaggggtcgctagcatgtccaatgccgcttgctccgccggtaataagtgctgtttgtctatctaaaatttcttttcttgaaaacatccttttcctgtcgcttgtttttatcaaaaatgatacttatgaganatttctttattttntttgcnnttgcnggnttgctnatnnntncttncgntgnannngnttgnanngnnantacntnaaannnnnangannnnacgncnatnnnagnacgnnngntngantgnggnggannnaatntgnnnannnnntntnnngnngntnnaagnngatnnaccnaacnatnnnanncnnnnaatngnnttganngaatgncnttnanggnangnnntnnanangnngnnntggnantgnngnaanngnantnnancnncgnnnnnctnnnnnngnttgggtnatngnnngnnntntttnntttnnnnnngtanngtnnnnatnngaantnnaatnnnnnanntnnnnnnnnnannntcnntnnnnnnnnattnntgncntgnttntngngnnnangttnaaangnnnangnnnnnannnagncngtnnnnaaagngcntgtnannaatnnanatncccgtnngtntancnttcnnngncggnnnnncnnnnngnnnnnncnnnancnnnnnnnngngannntnnnnnnngnnntannnnnnnnnnnnnatacnttannnnnnntnnntnantnncncngtttngantnncnnntnacganccnnannnntnnnnnnnntntnttnncgngnannnnccccnnnnnacannnagnaannancgantngnnnnnatnnngtnnnnnangnnnnttncntgnnnnnnngnnnnnngnaannccancgncannnntcntncgtnnngnttnntncnnannnnnnncnccanancnnnnnnccncnntnnaaanggnnttcnagtgntnnnnnanatnnnataatnntnatnnnnccgtanngatcnnnnnnncnnnanngcanntncnttnngatannnnnnnngcnacnnaatggactncnntnacngntntncgannncntntnanntatnncnntacnntgnnnannnnnnntnttnngannnnannnttnngttncnntnnttncncnncgntncnttntcntnngntancnatngatnggncnangcgncnngnnnnnnnnnngannnnnntnnaannggnnannnagcnnnntgggggatatnnnntnagtnannnnnntnnnnnnnaaaacnnaatggaanaggnaanatnacnnaanngantncnntccctnntctantnggnttcnnctgatganntaaatcttataatngtaatccngncncaanntncnncncnanngnnncnccttttnntacngannntnaa

SEQ ID NO: 151 - DNA, 4000 bp, Escherichia coli
  misc_feature (1984)..(2013): n is a, c, g, or t
  misc_feature (2050)..(2050): n is a, c, g, or t
  misc_feature (2052)..(2052): n is a, c, g, or t
  misc_feature (2054)..(2058): n is a, c, g, or t
  misc_feature (2060)..(2067): n is a, c, g, or t
  misc_feature (2069)..(2078): n is a, c, g, or t
  misc_feature (2116)..(2125): n is a, c, g, or t
  misc_feature (2127)..(2145): n is a, c, g, or t
  misc_feature (2182)..(2194): n is a, c, g, or t
  misc_feature (2196)..(2207): n is a, c, g, or t
  misc_feature (2209)..(2210): n is a, c, g, or t
  misc_feature (2248)..(2272): n is a, c, g, or t
  misc_feature (2274)..(2277): n is a, c, g, or t
  misc_feature (2314)..(2332): n is a, c, g, or t
  misc_feature (2334)..(2343): n is a, c, g, or t
  misc_feature (2380)..(2381): n is a, c, g, or t
  misc_feature (2383)..(2392): n is a, c, g, or t
  misc_feature (2394)..(2409): n is a, c, g, or t
  misc_feature (2446)..(2446): n is a, c, g, or t
  misc_feature (2448)..(2453): n is a, c, g, or t
  misc_feature (2455)..(2461): n is a, c, g, or t
  misc_feature (2464)..(2474): n is a, c, g, or t
  misc_feature (2512)..(2518): n is a, c, g, or t
  misc_feature (2520)..(2530): n is a, c, g, or t
  misc_feature (2532)..(2532): n is a, c, g, or t
  misc_feature (2534)..(2541): n is a, c, g, or t
  misc_feature (2579)..(2587): n is a, c, g, or t
  misc_feature (2589)..(2593): n is a, c, g, or t
  misc_feature (2595)..(2598): n is a, c, g, or t
  misc_feature (2600)..(2604): n is a, c, g, or t
  misc_feature (2606)..(2606): n is a, c, g, or t
  misc_feature (2645)..(2651): n is a, c, g, or t
  misc_feature (2653)..(2655): n is a, c, g, or t
  misc_feature (2657)..(2659): n is a, c, g, or t
  misc_feature (2661)..(2661): n is a, c, g, or t
  misc_feature (2663)..(2667): n is a, c, g, or t
  misc_feature (2669)..(2672): n is a, c, g, or t
  misc_feature (2710)..(2712): n is a, c, g, or t
  misc_feature (2714)..(2725): n is a, c, g, or t
  misc_feature (2728)..(2738): n is a, c, g, or t
  misc_feature (2776)..(2793): n is a, c, g, or t
  misc_feature (2795)..(2799): n is a, c, g, or t
  misc_feature (2801)..(2802): n is a, c, g, or t
  misc_feature (2804)..(2805): n is a, c, g, or t
  misc_feature (2842)..(2844): n is a, c, g, or t
  misc_feature (2846)..(2853): n is a, c, g, or t
  misc_feature (2855)..(2871): n is a, c, g, or t
  misc_feature (2908)..(2908): n is a, c, g, or t
  misc_feature (2910)..(2937): n is a, c, g, or t
  misc_feature (2974)..(2982): n is a, c, g, or t
  misc_feature (2984)..(2992): n is a, c, g, or t
  misc_feature (2994)..(3002): n is a, c, g, or t
  misc_feature (3040)..(3053): n is a, c, g, or t
  misc_feature (3055)..(3069): n is a, c, g, or t
  misc_feature (3106)..(3115): n is a, c, g, or t
  misc_feature (3117)..(3132): n is a, c, g, or t
  misc_feature (3134)..(3135): n is a, c, g, or t
  misc_feature (3172)..(3201): n is a, c, g, or t
  misc_feature (3238)..(3267): n is a, c, g, or t
  misc_feature (3304)..(3320): n is a, c, g, or t
  misc_feature (3322)..(3322): n is a, c, g, or t
  misc_feature (3324)..(3330): n is a, c, g, or t
  misc_feature (3332)..(3333): n is a, c, g, or t
  misc_feature (3370)..(3396): n is a, c, g, or t
  misc_feature (3398)..(3399): n is a, c, g, or t
  misc_feature (3436)..(3438): n is a, c, g, or t
  misc_feature (3440)..(3458): n is a, c, g, or t
  misc_feature (3460)..(3465): n is a, c, g, or t
  misc_feature (3502)..(3511): n is a, c, g, or t
  misc_feature (3513)..(3515): n is a, c, g, or t
  misc_feature (3517)..(3522): n is a, c, g, or t
  misc_feature (3524)..(3527): n is a, c, g, or t
  misc_feature (3529)..(3531): n is a, c, g, or t
  misc_feature (3568)..(3597): n is a, c, g, or t
  misc_feature (3634)..(3637): n is a, c, g, or t
  misc_feature (3639)..(3649): n is a, c, g, or t
  misc_feature (3651)..(3653): n is a, c, g, or t
  misc_feature (3655)..(3663): n is a, c, g, or t
  misc_feature (3700)..(3727): n is a, c, g, or t
  misc_feature (3729)..(3729): n is a, c, g, or t
  misc_feature (3766)..(3794): n is a, c, g, or t
  misc_feature (3825)..(3827): n is a, c, g, or t
  misc_feature (3832)..(3833): n is a, c, g, or t
  misc_feature (3835)..(3838): n is a, c, g, or t
  misc_feature (3840)..(3843): n is a, c, g, or t
  misc_feature (3845)..(3861): n is a, c, g, or t
  misc_feature (3863)..(3863): n is a, c, g, or t
  misc_feature (3867)..(3867): n is a, c, g, or t
  misc_feature (3871)..(3872): n is a, c, g, or t
  misc_feature (3874)..(3874): n is a, c, g, or t
  misc_feature (3878)..(3878): n is a, c, g, or t
  misc_feature (3883)..(3884): n is a, c, g, or t
  misc_feature (3886)..(3886): n is a, c, g, or t
  misc_feature (3889)..(3889): n is a, c, g, or t
  misc_feature (3892)..(3892): n is a, c, g, or t
  misc_feature (3898)..(3902): n is a, c, g, or t
  misc_feature (3904)..(3911): n is a, c, g, or t
  misc_feature (3913)..(3926): n is a, c, g, or t
  misc_feature (3928)..(3928): n is a, c, g, or t
  misc_feature (3934)..(3935): n is a, c, g, or t
  misc_feature (3937)..(3940): n is a, c, g, or t
  misc_feature (3946)..(3946): n is a, c, g, or t
  misc_feature (3949)..(3950): n is a, c, g, or t
  misc_feature (3952)..(3952): n is a, c, g, or t
  misc_feature (3957)..(3959): n is a, c, g, or t
  misc_feature (3963)..(3967): n is a, c, g, or t
  misc_feature (3969)..(3969): n is a, c, g, or t
  misc_feature (3971)..(3973): n is a, c, g, or t
  misc_feature (3975)..(3981): n is a, c, g, or t
  misc_feature (3983)..(3989): n is a, c, g, or t
  misc_feature (3991)..(3993): n is a, c, g, or t
aaatttggtgagtaataatgggatggcggacaattgttgtaaatcaacattcaaagctgacctataaaaataaccacttgatttataaagattcgtctcggacagaaatgatacatctgtccgagatagatattctattgttagagacaacagacattgttctttcgaccatgttggttaagagactttcagatgagaatatattagtgatattttgcgatgacaaaagattgcctgttgcacagttgattccatattatggtaaacatgattctagtttgcagttttctaagcaaattgagtggaatgaaacagtgaaaggtcttgtttggacggagattatcgctcagaaaattttcaaccaggcagtttttctttacgagtgcggctttgataagaagagtgaatccttaactcgattatatgacgaattacaagtgtttgatcccaccaatcgcgaagggcatgcagcacgaatctacttcaacactttgttcggcaatgattttaaccgcgaacaatcaaatgatattaatgcggggttggattatggttattcactactgctaagtatgtttgctagagaaatagtagcaactggttgtgtaacgcaactagggctgaaacatagtaatcagtttaatccatttaattttgcaagtgatattatggagccgttcagaccgattgtagatcgtatagtatatgagaatagagaaagtgactttaataaaattaaatcaaagctatttcagatttttatctacaattatggttattcagggaaagaaatgtttttaacaaatattgtgtcggactatacgaaaaaggtagtaagggcgttgaataataaaggagaagggattcctgtgtttcgggtatgagttatcgttttatgagaatgattattatgtttgatatgccaactgaaacgattgaagataagaaggtttatcgaaaatttagaaagttcttgttatcagaaggctttcttatgcaccagtactccgtttatagtcgattattattgaatgggaacgctaattcgttattggttgaccggttgaaggcgaataatcctaataaaggatttattactatattaacagtaacagaaaagcaatttgcaagaatggtctatttacatggagaaaaagatgaaagtgttgctaatacggataatcgattagtatttttgggagaggattatggggaagagtattagattgaatttaccaattctggacgaatctatttcgatagaaggttttactttatttatcatagagaatcgtgaaatattatcgaatctcgtgcaaatgatttactcgtacgatgaaggtagtcagttgaagttgtatgattcggaagtccgtacaatcaaaccttcggagctgatagtaatctcggatttgcttggtttttccattaatagtactgcagttgttaaagctgtgcagttggatgtattagaccagctgaatgagaatattgaacaaaaaaataagttggatttgttgcttactcagattacaagcattgttggttcgcaatgcatagagagcgaattgaatttaacgtataatgaacttaagattgaaaaaattatttctgcattagaggttcgtgtagacgcgttgtcgaatactttgttcgagcaactctttgaagtgcttcaaattttcaagtatcttgtaaagaagaaactacttatctttattaatgttgcatcttactttagtgaggaagaactaggtgctataaaagagtttattgagttgaatcaaataaatgtattatttattgagccaagaggtgtgtataactatccgcagtatattcttgatgaagattttataatgaccaaaaatttgtaaaaatagagaaaatcattcaaatcagtagtctggctgagacgagcagcgcgattacgaaaccttctacgaggttttagagctgtgttgatttgaatggttacaaaacnnnnnnnnnnnnnnnnnnnnnnnnnnnnnngttttagagctgtgttgatttgaatggttacaaaacncnannnnnannnnnnnngnnnnnnnnnnagttttagagctgtgttgatttgaatggttacaaaacnnnnnnnnnngnnnnnnnnnnnnnnnnnnngttttagagctgtgttgatttgaatggttacaaaacnnnnnnnnnnnnnannnnnnnnnnnncnnagttttagagctgtgttgatttgaatggttacaaaacnnnnnnnnnnnnnnnnnnnnnnnnntnnnngttttagagctgtgttgatttgaatggttacaaaacnnnnnnnnnnnnnnnnnnnannnnnnnnnngttttagagctgtgttgatttgaatggttacaaaacnntnnnnnnnnnnannnnnnnnnnnnnnnngttttagagctgtgttgatttgaatggttacaaaacnannnnnntnnnnnnntannnnnnnnnnnagttttagagctgtgttgatttgaatggttacaaaacnnnnnnntnnnnnnnnnnnantnnnnnnnngttttagagctgtgttgatttgaatggttacaaaacannnnnnnnntnnnnntnnnnannnnntnagttttagagctgtgttgatttgaatggttacaaaacannnnnnnannnannntntnnnnncnnnnagttttagagctgtgttgatttgaatggttacaaaacnnnannnnnnnnnnnnttnnnnnnnnnnnagttttagagctgtgttgatttgaatggttacaaaacnnnnnnnnnnnnnnnnnnannnnntnntnngttttagagctgtgttgatttgaatggttacaaaacnnnannnnnnnnannnnnnnnnnnnnnnnngttttagagctgtgttgatttgaatggttacaaaacnannnnnnnnnnnnnnnnnnnnnnnnnnnngttttagagctgtgttgatttgaatggttacaaaacnnnnnnnnnannnnnnnnntnnnnnnnnnagttttagagctgtgttgatttgaatggttacaaaacnnnnnnnnnnnnnntnnnnnnnnnnnnnnngttttagagctgtgttgatttgaatggttacaaaacnnnnnnnnnnannnnnnnnnnnnnnnntnngttttagagctgtgttgatttgaatggttacaaaacnnnnnnnnnnnnnnnnnnnnnnnnnnnnnngttttagagctgtgttgatttgaatggttacaaaacnnnnnnnnnnnnnnnnnnnnnnnnnnnnnngttttagagctgtgttgatttgaatggttacaaaacnnnnnnnnnnnnnnnnntntnnnnnnntnngttttagagctgtgttgatttgaatggttacaaaacnnnnnnnnnnnnnnnnnnnnnnnnnnnanngttttagagctgtgttgatttgaatggttacaaaacnnnannnnnnnnnnnnnnnnnnngnnnnnngttttagagctgtgttgatttgaatggttacaaaacnnnnnnnnnnannngnnnnnncnnnntnnngttttagagctgtgttgatttgaatggttacaaaacnnnnnnnnnnnnnnnnnnnnnnnnnnnnnngttttagagctgtgttgatttgaatggttacaaaacnnnnannnnnnnnnnnannntnnnnnnnnngttttagagctgtgttgatttgaatggttacaaaacnnnnnnnnnnnnnnnnnnnnnnnnnnnnangttttagagctgtgttgatttgaatggttacaaaacnnnnnnnnnnnnnnnnnnnnnnnnnnnnnagttttagagctgtgttgatttgaatggttnnnaaacnnannnntnnnnannnnnnnnnnnnnnnnngntttngagnngngttnatttnnanggntanaaaacnnnnncnnnnnnnntnnnnnnnnnnnnnnanttttanngnnnngttganttnnanggttnnnaaannnnnantnnnannnnnnnannnnnnntnnngttttag

SEQ ID NO: 152 - DNA, 4000 bp, Escherichia coli
  misc_feature (1966)..(1966): n is a, c, g, or t
  misc_feature (1968)..(1968): n is a, c, g, or t
  misc_feature (1971)..(1971): n is a, c, g, or t
  misc_feature (1975)..(1975): n is a, c, g, or t
  misc_feature (1990)..(1990): n is a, c, g, or t
atgatctccggctcgaagatattcagctacgccggccagcgcatcgccatcgcggccatctccgacaaactctacccgcggcactaccccgcgctcaaacagcgctacggcatggggcgcttgggcgacgcctatgtcctgacgttcctctatgccgcctcgtcgggcacgagccactcggcgcagcacgccctggcggcgatgttccgcgctgcggccgacgggcagctcgatttcgtgggcgaaacctcggaatacgcccggcgcgcccgcctcaccaaggagatcttccagcgccacggcttccgcatcgtctacgacaaagaccaggacgaaaccgtcagcgacggattcttctacaccgtcggctacggcggtctctccagcgcggagctgctgagcgaactgctcctctacggcatctgcgccatatcgctcacatcgaccggcagccgccagccgggcatccgggtctgcgtttcgcaactgaaccgccccgagcagttcgagctgctcgaaacacgcctaaccgccttcgggcaaaaccaccgataagcctatgcgattcacgacagccgccgaagccgtaaagctcatctgcccgcacagcagcgtctacattcagggcagcacctcgatccccgaagtactcgtccgtgccatgaccgaccgtgccgccgagctcaccgatgtcacgctctactccggattcgccgtcgggagggcagacgccccctattgcagccccgaatacaaggatacgttcctggtcaacagcctgttcgtggccaataacatccgccgctggctggcccagggctacggacagtcgaccccggccttcctgggcgaaatcccagggctgttccgcgacgggacgctgcccgtcgacgtggcaatcctcaacctctcgcgccccaacgaggagggctactgctcgttcggcgtctcggccgacctggccgtttcggccgtggaatgcgccaggacagtcatcgcgcaggtcaacacggccatgccgttctcctacggcgacgccgtgatccacctctcgcgcgtcgccgcggccgtcgaggtcgacgacccgctggtcgaagtgccctcggcgacccccaccgacatcgaacgcaggatcggcaaccacatcgccgaactgatccccgacggggcgacgttgcagatcggcgtgggcgggatccccaacgccgtgctggccgcgctcacgggccacaaacacctcgggctgcataccgaggcgatgaccgacggcgtgctgccgctgctcaaaagcggcgtgatcgacaactcgctcaaacgggtcatgccgggtgtaacggtcgcctcgctggcgctgggatcgcgccggctgtacgattacatggactaccgcaaagacctcgtgatgaaggatgtggcatggacgaacgacccgttccgcatccgcgagaacccgcgcgtgatggcgatcaactcggccgtcgaggtagacctcacggggcaggtttgcgccgactcggttggcgagcgcatcatttcgggcgtaggcgggcagcacgatttcatgtacggaggggccctgtcggagggcggcaaaaccttcatcgccatcccgtcgactacccccaagggcgaatcgaagatcaaggcgctgctgacgcccggcgcaggcgtcgtgacgacccgccacatggtgcagcacatcgtgaccgaatacggcgttgcgcatctgcgcggccgcaacctcgcccagcgggcgcgggcactgatcgccgtcgcccacccctcggtgcgcgaagaactggaaaaagccgcctgcgaacgcttcggctactccttcctgaggctcaaatagaagcgccccgatcaaacgggacgcttatcggaggcatctacccagcccctataccaggcattgctgccggacaacggggatctgagatcaaatccgtgtggccgggcacacacncnccncccnccgcaaacaagcagncctgccatatggcaggtctgcttgacacgtcgggatgccgcggttaccaccggcacaccggattattttgcgaacttcatttcgtcgagcaaccacccggcatcggcatacttgtcgatcacccacatcacatagcggatatccacgcacaccgtgcgcgccagttcgggatggaaccacacgtcgccggccatcgactcgcggttgccgtcgaacgcaagcccgataagatgccccttgccgtcgagcacggggctgcccgaattgcctcccgtaatgtcgttgtcggtcaggaaattgacatagagcgtatcgttctcgccccagcgtccccagtcccgtttggcgatcagccgccgcatacggtcgtcgacgcggtattcgtattcgtcggggttgtacttctccatatagcccgcgatcgtcgaacgcgaatcgtaatgcacgccgtccgaagggttcaggggttgcacgctaccgtaggtcaggcgcatggtcgagttagcgttgggatactgcgccagcccttccgaagcacggaaatcgtaaagcacgtcggcatagcggctctcgcttcgcccgacacgcgcacggccgcgcttctcggccttgtccacaccgcccgtaaaacgttgtactgtgaccgattcggtaagcgcaaccatggggtcgcggcgtatttcggcaaccgaccggttcttcgagaaataggcgtcgtaacgcgcaggatcgctgcaaaacgaggcatcgaacgccgcacgcgccatgcggtcggcattgcctcccgccttgtcgtacatcgcctgcaactgcgcaccccacatctcgcgcggcacgttggccgtgaagttcactaccatccgcgccaacaggtcgcggtcggtcgcggcatcgtagttacggctcaggcggccgctcccggccacgacgctccgggcatccttcgaatccacgatcagcgagtcctgcttcagccgttcgagcttgcccaggtacgacgacacgcggttggccacgagcagcgcctcgctggggccgagccatgcctcgcggaaataattgaggttgcgctcggcgccctgccgcgccttataaccgcgcgcgagctcttcgagcaacgtcccgtcctcggccttgcgggccgaatcggcctcgatccagcgctgcaggtgttcctcctcggcctcacggatcgccacgacatcgaagcggcgcaggcatttgttctcccacttggcgtagtcggcgtagttgctcaggccgaaataggcatccgaatactccatgcgcacccgcggatcgcgttccatatggcgtttgagaatatccatccggtcatggcggttggccacgacgatcgggttgcggacacactgtttctcagccaccgcgaacgacgacgcatagcggttcgtacgccccgggaatccgatcaccattgcgaagtcgccgtcatgcacgccgcccgtggcgacctgcaacacgcggcggggtttgagcggcacattgtcggcggaataggccgcagggcgcccctcccggtcggcataaacgcggtaaagcgcgaaatcgcccttgtgctggggccagccccagttgtcgtaatcgccgccgaaggcaccgatcgacgcaggcggcgtacccaccagccgcacatccttgtagatgtcgtagtagaacatcaggtacattttgccgccccacatcgagtagcacgacacctcgcactccgtttcccggccgtagcgcccttccagttcggcatagaggcggcgcggggccatcatgccccatttcccggcggctttcatctcctccttgagcgcattggcctcgtcggtcacgtcgaccaccttgcgcacgaaccacacggtcttgccggggacgggaatctcctcatcgcgcgtgcgtgcccagaatcccgtttcgagcaggttgcactcgggcgtcgacagggcgcagatgtcgctgtaagccacatggtggttggtaatcatcagcccctggtcg

SEQ ID NO: 153 - DNA, 4000 bp, Escherichia coli
  misc_feature (56)..(58): n is a, c, g, or t
  misc_feature (60)..(60): n is a, c, g, or t
  misc_feature (62)..(62): n is a, c, g, or t
  misc_feature (64)..(64): n is a, c, g, or t
  misc_feature (66)..(66): n is a, c, g, or t
  misc_feature (69)..(69): n is a, c, g, or t
  misc_feature (72)..(76): n is a, c, g, or t
  misc_feature (78)..(79): n is a, c, g, or t
  misc_feature (81)..(82): n is a, c, g, or t
  misc_feature (84)..(84): n is a, c, g, or t
  misc_feature (86)..(87): n is a, c, g, or t
  misc_feature (1019)..(1019): n is a, c, g, or t
  misc_feature (1225)..(1225): n is a, c, g, or t
  misc_feature (1236)..(1236): n is a, c, g, or t
  misc_feature (1243)..(1243): n is a, c, g, or t
  misc_feature (1254)..(1254): n is a, c, g, or t
  misc_feature (1560)..(1560): n is a, c, g, or t
  misc_feature (1741)..(1741): n is a, c, g, or t
  misc_feature (1992)..(1992): n is a, c, g, or t
  misc_feature (2006)..(2006): n is a, c, g, or t
tactaattatatgagtgatttatgatatgccaggaagcttagactataatatttannnananananttnatnnnnntnntnntnannaggtgtgtaaaggtcctcagcagcacgaggaagcatctcttgggctcctttacatcatattagtggaaccagctgctgcagcaaaggtttcaaatgagtctttattttttgtttagtactattattttgtcatgttgagtcattgctgactacactgtacatgtctttgagcaattttgcatggaatatatatacatctactttacaggccaaagggattgcagcattatacgcatattacacacattgaccatacattttacacacacgaaacacacacatgtacacgcaaatgcgtgtaacagaataactgataattacatgcagtagacttgatattatggctaaaattacacacagtcgttcaactggctgcatgtaatgaaaacaaacatttaacattgtgtgtaatgggttgttagtaaaacttgtaacggtgtaacaggtaacggcataacaataaacagtgtaacaggatttttttctgatgctgtggttaattttttagaagcgaaaattgttatttttatctttcgcaaaataataagaaagatctaaaagatacaaaaaagtgagtaaaaacatggcaggctggttcttgttacttgggcttctgtaggaaagcctgagtcaaaaaatgcaagccattggtcattgttgttgtgtttggtcgccaaattgggggtcatggtcccaggcgttcctagcatagtgcgaggaaactggggatgagacagctctcactcttcatgaacaaaaaattatgtaaatgctgtgttttgcgaagaaagtttgggaaagactcgaagaagatgttgattgtttttagaacgggttggcccatgaattatactgcttgaaagcctgccagataagcaaagttctcacaaataacaaaggagccatttatgagtccaactactaaaacaccnacaaaaaacaaatcatgatactgagacgaataactcagagttgttgtaagcagaacttggaagatcagacaaacaacatgcaattggataaagaggatactcaatgaagcaacttgaatagtaaatatctaagggtaactctttatgttaaaaagtatcctgattcttttatttgtttttacccagcagccgggaagtgttttcanaaggctggatncctggcngtctgaaattnttatagagtttccacagaataattcattcaattcttagaatacagtagatctgccgtcactcagtaggtcttggtatcaacaatgtcacgcaacctatagtggtctttcgtcaggttatggtctgtctgttattaattttgcttccatggtcttccatgccgaggcagtgtgaattcaatgcagtttggaaatccattggtatttctatgcagattaagcattctcagcgcgtttgaatggtcatttcggtggaaaaatggaaagaatttctgactgccgggtacatgtatatatagtttttttgnaaaactgtgcccgtgggtcacacaaagttcatcagacaacttgcaaactcaaatcattgaataaaatcgcttggtgtttatgaccaaagatcaaaatactcaaataatctcaggaggtttctaataataacaataattttgtggaaattgattacctatgaatttttgaccttaaacaatnctgcccgtgagtcaagatttttgtagttcgtccacttcaaaaccacagcgttattacagttgcttggcatttctgaacaaaatattattttcattgtggactaaatgtcaaaacatgaagattttatagtatgtccaagcttgaaaatttcctcaactacaaagccaaaataatacttgaaattgcttgacattctctgaacaaagatctactattctaagagtgagttgttttgtggaaattctataatnatttcagactgccnggtatctagttttctgaaaacaattcccggctgccgggtatctagacacaatgaaaagatttattgtgttcaatatgcttacttgcggtatgaagcccgagtcaacgctcttagagcatctagttttgagaggaaacaaacacaaaatagataaagatctagctagtattaatacagataaaattttctttaagcgcagggagtagaggagccaaatttgaccttaggaattattacttggaatgttcaattttatcttagggacagaccattattcttttggagggggttggggataccggtcggacaattttctgggttagggttagggtggaggaatacgctggaggaatttgaaaatggaggttttactctgaaaatgcatcaaacgttttcttccacactactctagagaatttaaaaacacaacaattactggtcattttggatttgtgtttgaggaaaactcagagaggaaaatcacatgattatcgtgcagctatcatttttgaaaagtcgaaattttcagcttttgaaagccgaaaattgtcagctttcaaaatgttttccgtccatgtgaaaatgaaaagctggcgttttcaaattccattatggattagtgtggatgaagtcctaaccgtagaaatgaagctgcaattccaaatttctccggtgtagtgcggacattacctatatgtgtcacacaatgttccccctaaaaacagttggaaaggagactaatcttatcttgatgcttttgtcatgttctccgatctttcgttatgggacgttttgttgatgcaacaggtgggcaacaaacggaaagaaacttttctgaacggtaggtcaggtgcgaagagccagaagtcatggcaccgtcaggtggtctgcggtcaaactcagagtattaacaaagtaaactcgctacccactgggtttaactgctatcagatctttttgtgtaggtaagcaaaaagatccaatgctagtagggtgaaaagatctgacatactgccaatgcaaggatggatttggctcctctttccaatactctgtgttttacccttaagtcttgaagtacatgattttagacaagggtcaaactttaaattacataataatattattagtgttgtacgttgaaatataaaggggggtataaacacttctcagcttttaaaagaatattgctttaaagcaaaaataaaagttaaaggagtcatgttgaccagtagctcctttgcagacattcttaggcctgtcacacagaggaacgattgtaaggcgggcttaagaatgtctgaaaggctaggagaccagtagatatatgtcagtttcgttacggcaacagaagttctaaattgtttgctcaggaaacgtaactttagccttatatgaacacattcttagggtcttcatgtgcagggattgagtgacaggccaaagaatgtctgtgtaggcgaataacataaccaagaattaaaaaataagggctgccctttttctgagaaaaaaaagacttgtggaattaacacttgttgagttttctattgctgatttttgatggaaattctcttttaactaaccagggcttgcatatccttaaaacacaccattcacaaaacaaagacaacaaaaccttctttagcgaactttttgaaatgaaggttcctttttaacttcttaacccactgactcctgtgccagccataaccggctgtgatgagtgttggcctttgttccacttctgacatcatcacctttgaccaaaattggcatcgtctatactcaacttctgcaggaggaaaagatctttccaataataccagatcagagtgattggctcaatggagcctgaaacttgcagcaaaatttcctgcgactacccttaacttctccatggtaaaaattgcctgttttgatgatgctttctcaggtatttttcaactggccagtagaactaagcccagtagaaggtcaatcactgcagcaaa

SEQ ID NO: 154 - DNA, 4000 bp, Escherichia coli
  misc_feature (173)..(173): n is a, c, g, or t
  misc_feature (218)..(218): n is a, c, g, or t
  misc_feature (246)..(246): n is a, c, g, or t
  misc_feature (251)..(251): n is a, c, g, or t
  misc_feature (256)..(256): n is a, c, g, or t
  misc_feature (261)..(261): n is a, c, g, or t
  misc_feature (288)..(288): n is a, c, g, or t
  misc_feature (432)..(432): n is a, c, g, or t
  misc_feature (470)..(470): n is a, c, g, or t
  misc_feature (1178)..(1178): n is a, c, g, or t
  misc_feature (1301)..(1301): n is a, c, g, or t
  misc_feature (1304)..(1304): n is a, c, g, or t
  misc_feature (1593)..(1593): n is a, c, g, or t
  misc_feature (1980)..(1980): n is a, c, g, or t
  misc_feature (2014)..(2014): n is a, c, g, or t
  misc_feature (3678)..(3678): n is a, c, g, or t
cgccaatcgtcacgctagttcccaccggtccgctctccggggtgaaggtcgtgatcgtcggggcgactcccgtcaaaaacgcgttcaagacgttcgcggtcgtttgctggatacgcgggtcagcaaaattgtatccgttgaagttgtctaacccccagctccaggcgatcgtnccggctgcgaatacccaggctccgctcggcgcttgataaacagangagttggagtaatccgatgggccgccantgccnagggntgagntcgacagcggcgtgtacgtgctgctcncggcgtttggcggggggtactggctgaacaggcgatcagcttcatatccgtcgatccccggcacggtgtcaccgtctttaaatcctgtcccggcatacacccagttcccgctgttcgtaacgacgtaggaggcccagcccccantttgagaattatacggcacctcggcagtgtactggacncccattagcgtctgctctggacggttcaggggcgggtcgcgccatagaacggttttcagtgttgggtcgctgacggggtcgagagtggcgtccctgtaacagacctcgactcggtttggcacgccactactcgaagactcgaaccgtgcctgccagtagatggcattggcactgaagaagccaaggctgaccccagcgtcgcgggcggccatgacggcgtcatacatgggtttcgaccagtattcgtcgtgcccgacagaaaggaaaccacggtagttcaacaacctgccaccgttcgagtgcgtgtcgatgtcggtcgcgtaggtcacatcatagccggacttctccatccaacggacgaaagggtactcccaggagaaaaaggattggctataagcgttgccggtgccattcccctcgtagggccggtcgaaggaaaccttcacggcgttcttgcctccgcttatcgtcgtcgcgccattgctgttgaaggcgtagaggctcttgccggtggtgttgtcatcaggatagttgttgtaagcctgataggtcgttacgggctgctggtagaggagggcggcgactcggctgtcgtcgcgaacgacaaacacgatgtagttctgatacgcctgcgcgttggtcagtagagcgagatagattccgctggtccacgaggactgggtggccaaagtataggcggacgcccantggcattcgatcattcccgtcgtagcatccgttgggcaagcgggttgcagcgtaccgttgagtgggccgatgtgctgcaccaggcgcccccccagcccctggtaccaacccatccgatagacntcnatcgtataggtctgcgcagggttgacgctcacatagaaggtgatgttctcacccttgttcacgctagtggcggacgcataacccttgatctggcccccggcgtccgatgccgtagagccgaagttagcccgccactgggtcgtcccgggctgctgattctcgatgacgatcgcgttgctggcctgcccatgagctgagctcactaacagccccgtcaccgacatcagatacaggagaattccgacgcgccgaagcgcgctcagtactcggccgccgacaggccgcggancggcagcagaaacggtgaattctgggcttccaacgggctcgacgccggaagcaaggaagctgtaaaggtgggattcaattggaatcttcatttgcgtattccttgatggccatatgcatcacaagctgcgctatctcaaagaaatggggcgtaattggtccccagtgagagtagagagcccagccgtcggccgatcatcgtgtggtgactcaggcagtggtctttcgacaggttcatgggccatgaccgggcattcttagcacgctttgaaatagctagtaaatcgggccaattccgcaaatgcaaatcgagtattcacactaaggcttgtcagaccttggagctttccgggttcgctgatatgttatagtagtagtaaaataagcnatatagtagatagacagttaattgatactcgatnaccaatctcactccgatgttgaacaatcgaagagagcacaaaatgacgtccgcgcacgatcaaactgccgccgatggactgggagaggacctccagacctttgggcagatacatccggcgaagtcaaatttgaaaacaggccgcccgatttcgccgcacctcgggctcgaagcgaaaactgctgccagtactttcttgatttcgctttaataatctcgagaccttgctcggcgaaaccggccgcgactttcgcctccgccgtcgtcaagatactgccgttgaatatcctacagttctgagttgctcgaaaaaactccagatggccatttcgcgttcaggccgcgcaatccggtttggagtacccactcttcgactgaccagccaagctactgccacagagattttctggtttctcgacaaggcgttgccgatttcgagctggcaaaggttgttccagtgtcctgctggcaccctcgcccgatgatgtccattcctctttactctaaggatccccgatccgcggaatctgccgtcggccggcctacgacttcgtcccaaatcctcgttccatgagtttcgcgcaacgcgaggcttccaaccgccaaggtcaccgccgctacggcgatcgggtaatacaatcccgcgtaaatcttacccgtggccgcacaaatggatagaccaatcagcggcagcagtccgccaaagaccccattcccgatgtggtacggcaaggaaagcgaggtgtagcggatcctcgccgggaaggcctcgacaaggtaggcggcaatcggtccgtacaccataccgacgtagatactctgaagcagaattagcagaatgagcttgcccttgttcggttggatagcctcgctagcggcaactaggccgccggtggcatccgtagtcatcggagtaagggtgatggctccggtcacctcgctgcgggtcgacttgacagtgacgacgtggttgcccgcggcacgttccatggcgtggtagatcggaacataggtgagtacggcaagcaggaacccggccatcattatttttttgcgcccgactttgtccgagagcgctccgaagacaatcaaaaacggcattcccatcccaagcgcagcggcctcgatgacaatggccgtgcggggattcagcttcagaatggtctgcagatagaagagggcgtagaactgcccggtatacgccaccacgccttgtccggccgctgcgccgaacaaagagaccaggacttgcttcaagttggaccacttggtgaaagcgtccttgagcggctgaagggaagtttttccggcagccttgaggtgagagaagattggcgattcgcgcagcttcactcggatatagatggaaatgcagacgagaaaaagagaaagtagaaaaggaatacgccatccccaatcggtaaaatcttctttgctcatcgcagattgtgtgcccagtatgaccagcaaggaaacgcacagtcccaggatcgccgtgatttggataaagctcgtatagaagccgcgcttgccgtcaggggagtgctcaccgacataaaccgctgcgcctccgtattcgccaccaagggccagtccctgcagcatccggatcacaatcaggatgatgggggcgaaccatccggcggttctgaaagtcggcaggangccaatcaacgccgttgagccgcccataatggacagcgtcaggagaaacgtgtacttcctcccgatgcggtcgccaatgctgccgaagaataacgcgccaaacggtcgaaccacgaaaccggcggcgaaggttgccaggtaagcgatcaaagcaaaggtatcattgccggggggatagaatttgacggaaagcaccgtcgccaaactaccgaaaatataaaagtcataccattcgatcatggtgccgagagaggatgcgacaaggaccagcggcaaggaactggattgcggatttccagcggcggcaccgattgcgtctgcc

SEQ ID NO: 155 - DNA, 4000 bp, Escherichia coli
  misc_feature (44)..(44): n is a, c, g, or t
  misc_feature (74)..(74): n is a, c, g, or t
  misc_feature (130)..(130): n is a, c, g, or t
  misc_feature (328)..(328): n is a, c, g, or t
  misc_feature (1115)..(1115): n is a, c, g, or t
  misc_feature (1191)..(1191): n is a, c, g, or t
  misc_feature (1281)..(1281): n is a, c, g, or t
  misc_feature (1595)..(1595): n is a, c, g, or t
  misc_feature (1640)..(1640): n is a, c, g, or t
  misc_feature (1651)..(1651): n is a, c, g, or t
  misc_feature (1666)..(1666): n is a, c, g, or t
  misc_feature (1807)..(1807): n is a, c, g, or t
  misc_feature (1987)..(1987): n is a, c, g, or t
  misc_feature (2813)..(2813): n is a, c, g, or t
  misc_feature (2833)..(2834): n is a, c, g, or t
  misc_feature (2839)..(2839): n is a, c, g, or t
  misc_feature (2845)..(2847): n is a, c, g, or t
  misc_feature (2849)..(2849): n is a, c, g, or t
  misc_feature (3540)..(3540): n is a, c, g, or t
gctcgccgaccgccgtggcgatcatgcgtcccgatccggcaacnacgctcgtgccagccaggagctgatcgccntccttcttcttgaccgggcgcgactcacccgtcagcagcgactcatcgatctcgangcctaccgaggccagcaccgtaccgtccacgctcacctggtcgccgagtgccagctcgatgacgtcatcgagcacgacgtcgcgagcagggatgaccgacacctcgccgttacgcaggacggaggcttgcggtgcatccacgattgcgagcgaatccagggtgcgcttggcgcgcaactccgacatgataccgatgancgcattaatgaccatgacaccgccgaagatgccgtcgcgcaggtcgccgaacaacagcacgatgatcgaggcacccacgatgatcgcgttgaagagcgtgaacacgttctcgcggacgatggataccaccgaccgcgacgtacggtccttgacgcggttcaccgcgccgcgcgacatgcgctcgaacacctcgtcggtgctcagaccgcgctcgtccgtgctcgccacctcagttaccatgggcatccccctcatccatcgcgctacgaatcagcgacgcgacaacagtaaccgccaacgtcacgacgatgacgcccagcgataccgatacggaaatctccggtgcccactccacgcccgatcccccattgataaacggcagagtgttcgcatgcaacgcctcaagaatcagcttgacgccgataaaactcaaaattacgccgaggccgtagcccaggtacacgagcttgctgagaagagcatccactaagaagaacagctggcgcaaacccatcagcgcaaacacgttgcacgcaaagaccaggaatgcctgctgcgtgataccgaaaatcgcgggaatcgagtcaaacgcgaacatcaggtccgccgaaccgagggccaggacaacgacgagcatcggcgtgatgtaggtgcgcccgccgtggcggaagagcatgcggttgccaatgaagccgtcggtgatcgggagaacacgccgaaccgcgcggataaaaccactctcgtggtattcctcgtcttcgtcgctcccccgcgctgtctcgcgaanctggctgaacgcggtccacagcagccagagtccgaagatgaagaacacccacgagaagcgcgacaccagcgcggcnccgaggaggatgaacacgagacgcaggagcagggcgatgacaatgccgaggagcaaggctttctgctgattctctcgaggaacgcggaangccttgagaatcaggatgaacacgaagaggttgtcgacggacagggaccactccatggcccatcccgcatagaactcctgagcgtagagccccccgtttgtcagccagataccgacgccgaaaagcccggcgagtccgacgtagaacagggtccatcgagcggcctcgaccgctgtgggcgggtgcgggttgcgcgcatgaccgaggaaatcgatcacgaccaggccgatggccacaagagcgaggattccccacgcccacgggtgaataaccatgaataccccttaactatttgaccgcggcatcatagcgcncttacgccgcgctatcctcgcctccacgctgggagcgtgacaccnccagggaggcngcgaccgtgatgagnatggtgaccacgatgaagccgagcgagaaggcgatgttcggctcgggaaccgcaacaatgggttgcccgccgttgatgaagggcagctcgttcgtgtgcagcgcgtggttgattagcttgaagccgatgaagccgaggatngctgcgagtccgtagtgcaagaaaatgatgcggtcaagcagaccatcgatgaggaagtagagctgacgcaagccgagcaaggagaacgcgttggcggcgaacaccaggtacgcctcgttggtgagcgagtagatcgcggggatcgagtcgacggcgaacatgacgtcggctgtgcccacngcgatgacgcacaggagcatcggagtgacgtaggtgcggccgccgtggcggtagagcatgcgcgagccgatgaagccgtcggtgacgggcacgatcttggacacccaccgcacgattgacggcgggcggtattcctcttcctcctcgtcctcgcctacgccctcgcggacctgattgatggcggtccacagcagccaggctccgaagatgtagaacacccacgagaagttttcgatgagggctgcgcccgcgagaatgaagatgaggcgcaggatcagcgcgatcacgatgcccgccagcaggacttcctgctgatccttgcggggcacgcggaagctcgagaggatgatgacgaagacgaacaggttgtcgatgctgagcgctttttcggtgatatagccgcccaggtattcctgaccgtactgcggtccccacacggcccagacgatgccgccaaaaaggagggcgatcgcgatgtaggcgaccgaccaccaggtggcttccttgagggtgggttcgtggggtgtgcgaacgtgaccgacgatatcaacggcgatcatggtcaggataatgccagccaggacgatccaggcgagcgcgtgcacgtgcatacgtggggcctccggtacgagtcgggtaccggaggtctcctcccgccaggaatccctggccggtggcgccggaggcctcgccgcgtgggcggggccgtcgtgatgacgacgccactgtttgtgggagtactcccctccgctaacgccgtctagtttagtggggcggctgcgcgcgcgtccacgcccgaacagtggcatcggtcgcttagcgccgngatttcttaggaacgaggcnntggcngcctcnnngntcagcgcgaggcaggtggtcggtgggcgtcagtgggcgcgcttcatggcgcgcaattccttcttgaggtcctcgatttcgtcgcgcaggcgcgcggcaacctcgaactggaggtgctgagcggcggtcatcatctgggcagatagctcctcgatgagttcggcgagttccgcttccgcgcgctgaccaggattcgagacggcgggtctcttcgcagcggcactgcggtcgcgtgcgctcttctccttgcggtacccgccctcgaggagggtctgagtgtcgacctgttcgcgggcgagcatgtcggtcacgtccgaaatcttcttgcgcaggggctgcgggtcgatgccgtgctccttgttgtaggcgatctggatctcgcggcgacgcatcgtctcggagatggcctcgttcatcgagtccgtcatgttgtccgcgtacatatggacctcgccggacacgtttcgggcggcgcggccaatggtctggatgagcgagcgggtggagcgcaggaaaccttccttgtccgcgtcgaggatggacacgagggagacctcgggcaggtccaagccctcgcgcagcaggttgatgccgacgagcacgtcgaaggtacccaggcgcaactcgcgtagcagctcaacgcggcgcagggtgtcgacgtcggagtgcaggtactcgaccttgacgccgcnctcggccagataggtcgtgagttcctcggccatcttcttcgtgagagtggtgacaaggacgcgctcgtcgcgttcgacgcgcaggcgcacctgctcaagaagatcgtcgatctgcccctcggtgggcttgacgacgacaagcgggtcgacgaggccggtcgggcgaatgatctgctcgaccacgccgtccgagcgctcgagctcgtagggacccggcgtcgcggacaggtagacggtttggccgatgcgctgggtaaactcgtcccacttgagggggcggttgtccatcgcggagggcaggcggaatccgtagtcgacaagggtgcgcttacgcgacatgtcgccttcgaacatcgcgccgatctgtgggacggtcacgtgggactcgtcgatgatgagcaggaagtcgtccgggaagtagtccagcagcgtgtgcggaggggtgccgggaccgcgcccg

SEQ ID NO: 156 - DNA, 4000 bp, Escherichia coli
  misc_feature (1924)..(1925): n is a, c, g, or t
  misc_feature (1930)..(1931): n is a, c, g, or t
  misc_feature (1936)..(1937): n is a, c, g, or t
  misc_feature (1949)..(1949): n is a, c, g, or t
  misc_feature (1952)..(1952): n is a, c, g, or t
  misc_feature (1958)..(1958): n is a, c, g, or t
  misc_feature (1979)..(1979): n is a, c, g, or t
  misc_feature (1984)..(1984): n is a, c, g, or t
  misc_feature (1990)..(1991): n is a, c, g, or t
atcattatggtaaaggtttccaaagaattgtgaggaacgcagtcctttgcttatgccatgcttcccgttgggatatagtgctttgacaaaattttcaagaataggcaataagacagggtctccgacatatcgcctgattgtggagattaatatatcatggtcaatactgtcataatatcctttataatcgctttgataataatagtgtatattggggttctctgccaatgtatcctgcacctgatggaacagaccatgcggtccgcgtccttgtatggatgcagccgttgtttctatcaataggggtgaaagatgcttttccaacggctccataatcgcattgcttccaatacgctctatgactgacggggcttgcacaattcttactttcggtccgtcatccacagtaaacgacttgaggttctttatacggaatgtgccgttacctatctgttctttcagcgcatcaagtatcttatgcttgttttttacataacgggccattcttggtgaacattcaatgccatctattacagctatctctctttgccgatttccgcttcgggtatctgcacttctcagatttgccatgacacgcttgaatgacctttccaaattctcatcggatataatctccggtatgagattatataacggataacagaccgcagttgcagctacggccggttggaataaatcgtatatatcgctgaccgccttccggtctcgtggggagtggtccaacctctccccacatgtggttaaagatatgttccggctttccattaataaatatatattatcatgctgttgccgaggctcgaatccctcggagaatggcggtggtaatctcgtacctgtgcagggtctccgattaatttaaccaacagaatttcagacgcgccccgtagttcgtgttcgagttcgatgaagcgttgttcgcgttcgcataagcgagaccgctgttcgcattcgagttgttgccggaccgcaaaacacaacggcgcgagggattgtccgccttttatttttttaaagagttatgcttcctaaaccggaaatactcaaagacgccttcatacccatggccttaaacactcgcgcaatggtggaaagggtcagattacgtccgctttctatcttggatacttgtgaacgctgtacaccgattttttgtgccaattcctcttgggtcatgttttgggatttacgggctttttttatggcttccccaatcaaaaatgattgcaattcagcttcatacttatccctgtgcggtgtaccgacctcacctatatgtttatccttaacttcatcaagggtataaaatttaattgcttccatatacttatttttttgagttgaaatataatattctgacggcttccgccttgtttatctctttgcgtggggtcttttgtgttttcttcacaaatccatgcgtggcaatgaccaacgtttccgcgtcggtgtcccaaaaagccaacagacgatattgaatacctttatacagggtgcgaaactcccaaatgtcagtatcatctaatttcttgaataaatctttgtccatataaccattggctaccttatctacattatagataattttatccttaacgtcttggcgcagagtgtcaagaaatgcatcggcttcactcgacattattactttgaatctcgttttcaattccatatcttatatcattcacaatgcaaatatagtgaaaatgttctatatatggaacgttttacagacaaaaatacaaccacataaaaattagtttcaaaaatcgactcgcttacgcgagaaaaagaaagagggagcagcctacggctctccctccaacgcttttttcgaaatcgcgaggtccgctctattcaattataacgaattttccgcggaaggccagacgcgccccgtagnncgtgnncgagnncgatgaagcgtngtncgcgtncgcataagcgagaccgctgtncgcantcgagnngttgccggaccgcaaaacacaacggcctcggcttccacttatccaaaatcctgctgcataatgtgttacatacatacttgtatctcccttgtgtactctgctgggcaatacatcgcacttggcaccatgtactatgcgcacgacacaatttccattggaagcgtcaactgttttaacagtccgttcggttttgtttacggggtcataaatatgcgctgtataatctattggatatgaactgtcgttctccgtgcattttgccttgtagaacgcttcatagctcggcacattaaaagcgatatagtccatccattctgaatcacaacccacataatgcttcaatccaagtatggagttgagcgtattgccggtattattgctgtcagccatgccgatggaatccagtttattcagaatgctgtcatgtccgccattgcccacaaccgactgttcgttggttgttccgctcaaagcccaccatagattgctaatctctttatgctgttcgtaatcctgcaactgatagccaactccacgtaagcggcagatgttttggaaatcctttgccgtgtaattcaaaccgccgataggcatctcaataggattaccctcactgtcgtatttccattcgttagatgtaacggacgtcccgttgcctttcttcgaacgtatatcaccggaaaggctgcgtggcatcttcaaaccgtcaacggtaataggatatacaccgaccagactgtcgttgtcgccaaccgtgtgttcggtccattcaggttctatggcttcaatactgctgctgtctacaacaaggcactctatgtcgccaatgtcacggaaagaagtgaaataaaaccattttgcaccgttaggtatgtcacagaacacataatcaccgatgttgaagtcaaaataggtatggcttacagacatgatgaacgtactgagcacacggttgttttcgtcagtgaacacgcctccaagccgggcatggttcagaccgggccatcttacctgcttcattcctctcacatccatcttgtagctgttcgtattggatgcggtggttatgacatcctcgcctatgacttcaccgacaacggcatcaatcgcatacactccggtattttccatatatagcaattccgacaacagggattttctgctatgcaatgcagttgagagcggttcggtctctgttatagaagggaaaaaatactttacttggttcttgtagtcgttcactcccttgtaccaatggtgcggagcatgccagaatatatcaaagccctctccggcggtgtccgttatgtcaaagctgctgccgtttttcaggtagttgaaatccgtatcgcttaactgcacgccttccatctggtttttcttcgtgttgaatgagcatttataggcatggcatcctttcttgatggcaagggtatgcccgcttggaatatatgtgttgccataatccgcccccgtcttattttcgggattgctatacttctcacacgaatcattgtctaccgtatcgctgattttcacaatagagaactgcgaattatgaagttcaagttggggaaaataccggacaagctcttcgatttcgttctgctctatcagttcgaccaatatccatcgtccggttattccgctacactgtcctttttcatcgtacgcattaccattcgcatccaatcctatagccccaccgttttttatggaacgaagcatttcaacactcgccgtagcatttacgttgggaatacggacggttttcaattcacttgcattgaccacctgttccaacagagtcatcgtatcaatatacggacattcattcacgaatatttttgtaaccttactgacaccaccaagagaaagcccgccgggataagtcagattaggcagattgttcaatacaagttcagtgatagtaccgggaagggcaagcgtacttatcggagaagtttcagcaaacgttattgcagacaaagaagtattatcggcatgca

SEQ ID NO: 157 - DNA, 4000 bp, Escherichia coli
  misc_feature (1952)..(1953): n is a, c, g, or t
  misc_feature (1956)..(1956): n is a, c, g, or t
  misc_feature (1964)..(1964): n is a, c, g, or t
  misc_feature (1968)..(1968): n is a, c, g, or t
  misc_feature (1983)..(1983): n is a, c, g, or t
  misc_feature (1988)..(1989): n is a, c, g, or t
  misc_feature (1991)..(1991): n is a, c, g, or t
  misc_feature (1994)..(1994): n is a, c, g, or t
  misc_feature (1997)..(1997): n is a, c, g, or t
  misc_feature (2004)..(2004): n is a, c, g, or t
  misc_feature (2006)..(2006): n is a, c, g, or t
  misc_feature (2009)..(2009): n is a, c, g, or t
  misc_feature (2012)..(2013): n is a, c, g, or t
  misc_feature (2015)..(2015): n is a, c, g, or t
  misc_feature (2018)..(2019): n is a, c, g, or t
  misc_feature (2021)..(2022): n is a, c, g, or t
gaccattgcaggctttgtgctgtggtatctcaagaaacacagccaggcaattcgtgtggcggatgaggcgcttgccgaggaattttttgaccgcctgcttttgggaggcggctgcctggtgatgctggatggactggatgaagtggtcagccaaaccgaccgcggacaggtgcgggcggaggttgaacgcctggctgatgaaatttaccccgacaacctgttcatcgtcacagcgcgcgaatcgggttacaaggaaaatgccatcttcagtgaagactttgttcgtttggacgttcaagcgctcactgactcacaaattgatacgctggtacgaaattggtgcgagcagttgtatcccgaccaggtggaataccagacaaaggatatcatcaccgccattcgagccatcaacgcgcgctatgaagcgcaaaacataccggctttggtgcgtacgcccctgatgacaaccatggtggttagtgtgaagtggggtgaagcggaattaccgcgtgaacgcgcccgcctgtatgaggcggtggtcaaggtgattttacaggcgcaatatttggacgacgattccacgcggcaggaactgatcagttggggcggtatctgggaggatcaacgagattggctttcgtatcttgcattggaaatgcatcgaagcggacagaacggcgcggcgatccccgaatcgcggctgcgcgaaatcctcaagcagaaacttacgggcgaaaatcttgaacaattcatccgcgcggtgcgcagccgcggcggattgtttgaagaacgcgccgaactctttcaattcacccatctgacctttcaggaatttctggcggcgcgcctgttgaccaaggagcgcgaaaaatccctgcccaatttggaagcctatattgtcaacccctggtggcgggaagttttacttttggtatatggatttgccaaacaggattacccgccctttgcaaccgattatcttcattggctttccacgcgcgatggagatggaacccgccgcctcagcggactggaactggctggttcagcagtgctggaaattgaacgacccgataccgaattgaatctggagcaggcgcggtgtctcacccaggcattaaccgaccccgccttgagtgtgcctgctgtattacgcgccagcgctggaaatacacttgcctttttaggcgatccgcgtttcgataaggagtattggcttttacctgccgaagacttgtttggctttgtgcgcatccctgctggaaaattcattatgggcagtgaccctgcgaaagataaacaagctgatgatgacgaacagccccagcatgaagtgaacattccttatgattactacatggcgcgctaccccgtgacgaccgcccagtaccgcacatttgtggaacaaagcggatatcaaacccaggataaagacagcctggacgggactcccaatcatcctgttgttaatgtgacttggtacgacacgcttgaatactgcaactggctgaccaaacaattgggcgatgttagcgttgaacggttgaaacaggcaaggaccgcagggcaaaaagccttttggcagggaattgccgaacacaaattgcgcgttatgttgccgagcgaagccgagtgggaaaaagccgcgcgcggcacgaacggcgttatctatccctggggcgataagtttgatcccgaccaattaaattctagcgaaagtgaaattgggagtctttcggctgtcggtattttcccagtaggcgcttcgccttatggcgttttggatttgagcggcaatgtttgggaatggacaagaagtgtgattcgcttgcgaaaagaaaaaggcgatgaagtcataaaggaatacaattatccctatgtagccaatgatggtcgtgaggatttgaaagccaacagcaattcatctcgtgtacttcgcggcggttccttcnncgntgagtccnaccncgcgcgttgcgcctnccgcnncnggnacnacccagncntcnggnncnggnncnncggtttccgagttgtggtctccccatttcttccatcatgacgactctgatctctggcgctctgaactctggggctctggagtcgttgtactctgattgcgcaagactacaaaattctttagaagacaacctccctgcgaagcagggtcgcgataaaaaaatttggaggcaggatggcaaatgaacaggaaatgccgctcttcacacgcacattcgatttcatcacctggctgttgcccgtgacgaataactttccgcgcgcgcaccggcacacggccacaaagcgcctgctggatgcggctttcaatttgcgggaacacatcgaagcggccaaccatcgcatgggaaaggatcgaatggaatacatccagcgcgccgatgaagacctggataacgtgcgcctgtacctgcgcctggccgcccgctgggagtggttgacggcgggccaataccagcatgtggccgtcatggccgcggaaattggccgcctgctgggcggctggaaaaagatcacgcatccgtagcggctttggtggtcgagtagcgcgttagcgcgtatcgagacccaatgccgctactgcgagggatatgcccacagacttcgcggcggttccttcaacaatgaatccaacaacgcgcgttgcgcctaccgcaacaggaacaacccagacaacaggaacaggaacaacggtttccgagttgtggtctccacgctcttctgcggccctgccggaattaccttgcgggtttgcgccttcaaggtcgaggcatccattcatgatggaagaatggccgggcatattcctggtctccaccccacatcttccctccctaaatccgttctttggatttggggagggtcagggaggggcggggagcgaatagcaactgtcccgcgccatgtgagccagcctggcgcgggacaccctctgaaaccaaaatgacagattcaatgtttgacctgctcgtctcatggagcaatctgcttctcgcctatcaaaaagcaagcaaaggcaagcgcggacacgccaacatcgccgcgtttgaccaccgcctggaagataatctcctgcaactgcaaggcgaactgcaggcgcatacgtatcgtcccggaccctatgacagtttccatatccatgaaccgaagcgccgcctgatctctgccgcgccctttcgcgaccgcgtcgtgcatcacgccctgtgcaatttgatcgagcccatcttcgagcgcagtttcatcttcgatagttatgccaatcgcatcggcaagggcacacatcgcgccctgaaccgcgcccaggaattttcccgcaagtatccgtatgtcttgcaatgcgacctccaacaattttttccatccattgaccatgccgttttacgcgagaccctggcgcagaaaatttccgaccccggcctgctctgggtgtgcgaccagatcctggccagcggggcgggcgtgctggccgaggaatacgaaatgacctggtttgcaggcgatgacctactcgccgcttcacgtccacgcggcctgccgatcgggaacctcaccagccagttttgggcgaacgtgctcctcaacccgttcgatcattttgtaaagcgaaaattgggatgcgatgcatacctgcgctatgtggatgatttcctgctcttcgcgcgggacaagcaaacgctctggcgctggctggcgcagatcgagttgcggctgggcggcatgaggctgtccatccatcccactgccgcgccgcgtcctgttaccgaaggatttacatttttaggtttccaaatcttcccgcaacagcgcaggctcaaacaccaaaaagggctatactaccagcgaaaactacgcgatttggtcaacgactacacagagcagcgcctatctttcgatcaactgaccgccagcgtacaaggctggtccaatcatgtcagattcgggaatacaatagggctgagaaagtcgctgttgggaaaaacga

SEQ ID NO: 158 - DNA, 4000 bp, Escherichia coli
  misc_feature (52)..(52): n is a, c, g, or t
  misc_feature (187)..(187): n is a, c, g, or t
  misc_feature (343)..(343): n is a, c, g, or t
  misc_feature (436)..(436): n is a, c, g, or t
  misc_feature (463)..(463): n is a, c, g, or t
  misc_feature (496)..(496): n is a, c, g, or t
  misc_feature (511)..(512): n is a, c, g, or t
  misc_feature (514)..(514): n is a, c, g, or t
  misc_feature (691)..(691): n is a, c, g, or t
  misc_feature (754)..(754): n is a, c, g, or t
  misc_feature (817)..(817): n is a, c, g, or t
  misc_feature (829)..(829): n is a, c, g, or t
  misc_feature (850)..(850): n is a, c, g, or t
  misc_feature (868)..(868): n is a, c, g, or t
  misc_feature (886)..(886): n is a, c, g, or t
  misc_feature (934)..(934): n is a, c, g, or t
  misc_feature (940)..(940): n is a, c, g, or t
  misc_feature (1009)..(1009): n is a, c, g, or t
  misc_feature (1051)..(1051): n is a, c, g, or t
  misc_feature (1072)..(1072): n is a, c, g, or t
  misc_feature (1088)..(1088): n is a, c, g, or t
  misc_feature (1090)..(1090): n is a, c, g, or t
  misc_feature (1141)..(1142): n is a, c, g, or t
  misc_feature (1218)..(1218): n is a, c, g, or t
  misc_feature (1237)..(1237): n is a, c, g, or t
  misc_feature (1240)..(1240): n is a, c, g, or t
  misc_feature (1246)..(1246): n is a, c, g, or t
  misc_feature (1260)..(1260): n is a, c, g, or t
  misc_feature (1423)..(1423): n is a, c, g, or t
  misc_feature (1441)..(1441): n is a, c, g, or t
  misc_feature (1516)..(1516): n is a, c, g, or t
  misc_feature (1654)..(1654): n is a, c, g, or t
  misc_feature (1791)..(1791): n is a, c, g, or t
  misc_feature (1867)..(1867): n is a, c, g, or t
  misc_feature (1964)..(1964): n is a, c, g, or t
  misc_feature (1986)..(1986): n is a, c, g, or t
  misc_feature (1991)..(1992): n is a, c, g, or t
  misc_feature (2131)..(2131): n is a, c, g, or t
  misc_feature (2289)..(2289): n is a, c, g, or t
  misc_feature (3062)..(3062): n is a, c, g, or t
  misc_feature (3083)..(3083): n is a, c, g, or t
  misc_feature (3086)..(3086): n is a, c, g, or t
  misc_feature (3104)..(3104): n is a, c, g, or t
  misc_feature (3230)..(3230): n is a, c, g, or t
  misc_feature (3239)..(3244): n is a, c, g, or t
  misc_feature (3247)..(3250): n is a, c, g, or t
  misc_feature (3252)..(3252): n is a, c, g, or t
  misc_feature (3254)..(3255): n is a, c, g, or t
  misc_feature (3257)..(3257): n is a, c, g, or t
  misc_feature (3260)..(3260): n is a, c, g, or t
  misc_feature (3262)..(3262): n is a, c, g, or t
  misc_feature (3264)..(3266): n is a, c, g, or t
  misc_feature (3268)..(3268): n is a, c, g, or t
  misc_feature (3271)..(3271): n is a, c, g, or t
  misc_feature (3274)..(3275): n is a, c, g, or t
  misc_feature (3277)..(3279): n is a, c, g, or t
  misc_feature (3282)..(3283): n is a, c, g, or t
  misc_feature (3289)..(3289): n is a, c, g, or t
  misc_feature (3292)..(3293): n is a, c, g, or t
  misc_feature (3295)..(3296): n is a, c, g, or t
  misc_feature (3300)..(3300): n is a, c, g, or t
  misc_feature (3302)..(3308): n is a, c, g, or t
  misc_feature (3310)..(3312): n is a, c, g, or t
  misc_feature (3314)..(3314): n is a, c, g, or t
  misc_feature (3319)..(3320): n is a, c, g, or t
  misc_feature (3323)..(3325): n is a, c, g, or t
  misc_feature (3328)..(3329): n is a, c, g, or t
  misc_feature (3332)..(3332): n is a, c, g, or t
  misc_feature (3334)..(3334): n is a, c, g, or t
  misc_feature (3336)..(3336): n is a, c, g, or t
  misc_feature (3338)..(3341): n is a, c, g, or t
  misc_feature (3343)..(3346): n is a, c, g, or t
  misc_feature (3351)..(3353): n is a, c, g, or t
  misc_feature (3355)..(3357): n is a, c, g, or t
  misc_feature (3360)..(3366): n is a, c, g, or t
  misc_feature (3368)..(3368): n is a, c, g, or t
  misc_feature (3370)..(3371): n is a, c, g, or t
  misc_feature (3373)..(3375): n is a, c, g, or t
  misc_feature (3377)..(3381): n is a, c, g, or t
  misc_feature (3383)..(3383): n is a, c, g, or t
  misc_feature (3388)..(3394): n is a, c, g, or t
  misc_feature (3396)..(3406): n is a, c, g, or t
  misc_feature (3408)..(3421): n is a, c, g, or t
  misc_feature (3423)..(3423): n is a, c, g, or t
  misc_feature (3425)..(3428): n is a, c, g, or t
  misc_feature (3430)..(3430): n is a, c, g, or t
  misc_feature (3432)..(3433): n is a, c, g, or t
  misc_feature (3435)..(3437): n is a, c, g, or t
  misc_feature (3439)..(3442): n is a, c, g, or t
  misc_feature (3444)..(3446): n is a, c, g, or t
  misc_feature (3448)..(3448): n is a, c, g, or t
  misc_feature (3450)..(3450): n is a, c, g, or t
  misc_feature (3453)..(3462): n is a, c, g, or t
  misc_feature (3466)..(3468): n is a, c, g, or t
  misc_feature (3470)..(3472): n is a, c, g, or t
  misc_feature (3474)..(3474): n is a, c, g, or t
  misc_feature (3478)..(3479): n is a, c, g, or t
  misc_feature (3481)..(3481): n is a, c, g, or t
  misc_feature (3483)..(3485): n is a, c, g, or t
  misc_feature (3487)..(3492): n is a, c, g, or t
  misc_feature (3494)..(3498): n is a, c, g, or t
  misc_feature (3501)..(3501): n is a, c, g, or t
  misc_feature (3503)..(3503): n is a, c, g, or t
  misc_feature (3505)..(3506): n is a, c, g, or t
  misc_feature (3510)..(3511): n is a, c, g, or t
  misc_feature (3513)..(3514): n is a, c, g, or t
  misc_feature (3516)..(3517): n is a, c, g, or t
  misc_feature (3520)..(3524): n is a, c, g, or t
  misc_feature (3526)..(3527): n is a, c, g, or t
  misc_feature (3529)..(3533): n is a, c, g, or t
  misc_feature (3535)..(3535): n is a, c, g, or t
  misc_feature (3537)..(3539): n is a, c, g, or t
  misc_feature (3541)..(3543): n is a, c, g, or t
  misc_feature (3545)..(3551): n is a, c, g, or t
  misc_feature (3557)..(3557): n is a, c, g, or t
  misc_feature (3559)..(3559): n is a, c, g, or t
  misc_feature (3562)..(3567): n is a, c, g, or t
  misc_feature (3569)..(3571): n is a, c, g, or t
  misc_feature (3573)..(3578): n is a, c, g, or t
  misc_feature (3580)..(3582): n is a, c, g, or t
  misc_feature (3584)..(3589): n is a, c, g, or t
  misc_feature (3591)..(3599): n is a, c, g, or t
  misc_feature (3601)..(3612): n is a, c, g, or t
  misc_feature (3615)..(3615): n is a, c, g, or t
  misc_feature (3617)..(3617): n is a, c, g, or t
  misc_feature (3619)..(3621): n is a, c, g, or t
  misc_feature (3627)..(3632): n is a, c, g, or t
  misc_feature (3634)..(3637): n is a, c, g, or t
  misc_feature (3640)..(3640): n is a, c, g, or t
  misc_feature (3642)..(3643): n is a, c, g, or t
  misc_feature (3645)..(3647): n is a, c, g, or t
  misc_feature (3649)..(3649): n is a, c, g, or t
  misc_feature (3651)..(3651): n is a, c, g, or t
  misc_feature (3653)..(3658): n is a, c, g, or t
  misc_feature (3660)..(3660): n is a, c, g, or t
  misc_feature (3663)..(3663): n is a, c, g, or t
  misc_feature (3665)..(3667): n is a, c, g, or t
  misc_feature (3669)..(3673): n is a, c, g, or t
  misc_feature (3675)..(3675): n is a, c, g, or t
  misc_feature (3677)..(3680): n is a, c, g, or t
  misc_feature (3682)..(3686): n is a, c, g, or t
  misc_feature (3688)..(3688): n is a, c, g, or t
  misc_feature (3690)..(3696): n is a, c, g, or t
  misc_feature (3700)..(3701): n is a, c, g, or t
  misc_feature (3703)..(3703): n is a, c, g, or t
  misc_feature (3708)..(3709): n is a, c, g, or t
  misc_feature (3712)..(3715): n is a, c, g, or t
  misc_feature (3717)..(3718): n is a, c, g, or t
  misc_feature (3720)..(3720): n is a, c, g, or t
  misc_feature (3724)..(3724): n is a, c, g, or t
  misc_feature (3726)..(3728): n is a, c, g, or t
  misc_feature (3730)..(3733): n is a, c, g, or t
  misc_feature (3735)..(3737): n is a, c, g, or t
  misc_feature (3739)..(3739): n is a, c, g, or t
  misc_feature (3741)..(3741): n is a, c, g, or t
  misc_feature (3744)..(3744): n is a, c, g, or t
  misc_feature (3746)..(3750): n is a, c, g, or t
  misc_feature (3752)..(3752): n is a, c, g, or t
  misc_feature (3754)..(3766): n is a, c, g, or t
  misc_feature (3769)..(3773): n is a, c, g, or t
  misc_feature (3775)..(3775): n is a, c, g, or t
  misc_feature (3778)..(3786): n is a, c, g, or t
  misc_feature (3788)..(3799): n is a, c, g, or t
  misc_feature (3802)..(3802): n is a, c, g, or t
  misc_feature (3805)..(3805): n is a, c, g, or t
  misc_feature (3807)..(3820): n is a, c, g, or t
  misc_feature (3822)..(3822): n is a, c, g, or t
  misc_feature (3824)..(3826): n is a, c, g, or t
  misc_feature (3828)..(3831): n is a, c, g, or t
  misc_feature (3833)..(3838): n is a, c, g, or t
  misc_feature (3840)..(3841): n is a, c, g, or t
  misc_feature (3844)..(3844): n is a, c, g, or t
  misc_feature (3846)..(3850): n is a, c, g, or t
  misc_feature (3852)..(3854): n is a, c, g, or t
  misc_feature (3856)..(3858): n is a, c, g, or t
  misc_feature (3860)..(3861): n is a, c, g, or t
  misc_feature (3865)..(3871): n is a, c, g, or t
  misc_feature (3873)..(3875): n is a, c, g, or t
  misc_feature (3877)..(3889): n is a, c, g, or t
  misc_feature (3891)..(3901): n is a, c, g, or t
  misc_feature (3903)..(3913): n is a, c, g, or t
  misc_feature (3915)..(3923): n is a, c, g, or t
  misc_feature (3925)..(3926): n is a, c, g, or t
  misc_feature (3928)..(3937): n is a, c, g, or t
  misc_feature (3939)..(3943): n is a, c, g, or t
  misc_feature (3945)..(3945): n is a, c, g, or t
  misc_feature (3947)..(3949): n is a, c, g, or t
  misc_feature (3951)..(3951): n is a, c, g, or t
  misc_feature (3954)..(3965): n is a, c, g, or t
  misc_feature (3967)..(3969): n is a, c, g, or t
  misc_feature (3972)..(3973): n is a, c, g, or t
  misc_feature (3975)..(3979): n is a, c, g, or t
  misc_feature (3981)..(3985): n is a, c, g, or t
  misc_feature (3987)..(3992): n is a, c, g, or t
  misc_feature (3994)..(3995): n is a, c, g, or t
  misc_feature (3997)..(4000): n is a, c, g, or t
cgagctaaaagatagtggcgcaagctatccagatgatagcaaagtaagggcngcgcaaagggcgataaatgagtatatagccttgcaaaatggcgctagcgatgtggctaaaaagacatttggcgagcagaatttatttgagctatttaagagtaaggtttttgctagagaaagcctagactaccgnacttttaataaaatttacaccccagagcttgataggctcttttttgagctaaaagaggcagcgaaaaactacattttagaggtcgaaaagtataggctaagtggctttagcaagctattaaagctttataaggcgtcaaatttagagctaaacaangagataaatgcgctaagttttgctgatataaacaagctggtttttaagcttttggtgcaaaatttggataaagaggcgctttattttaggctngatggcaggataaatcacctcttagtngatgagtttcaagatacaaacgtgatccagtangagatcatcttgccnntnatcgctgaaatcgtctctggatacggacaaaacgggcttggaagcttcttttacgtgggcgacacgaagcagagcatctataaatttaggggtggcaaaaaggagctttttgacaagcttggagatgattttactcagatagatatagaaaatttgccaagcaactaccgcagtttnaaggctttggtgaaatttaataacgccgtttttgaagaaatttatcatagatatgggcttagntttgagccacaagagccagctaaaaaagatgagacgctaagctatgaggtaagtggcgagtgngactattttgangtagagaaggacgactacggntacttgcgtgtgctaagngatgaagatatcgcaggngcggtcgtttcgcaagcaagtgagcttttaaaagctggcgtaaatgcnagcganataaccgtgctttgctggaaaaatagcgacattagcctcatctcagaagtgcttagtagcgcagggatnaaaagcgtcaatgaaggcactttggagctaaaaagaacgccncttgtcgcagcgatcatcgantatgcgaaattttgcntntttaaagaagaaatttatgagaaaaatgtaaaagcgctagtaaatgcaaanntcaaaaaactaaatataaagccagaagtgagcgcgacaaatagcctattttacctagctaaaaatttaggcataancatggcagacgttgatatnttnaggctntttgagctaagcgnggggtataaaaatttaagtgattttatatttaaccttgaaaactttagctctaaaatcagcccaaaaagtagcgacggcgtgagagtgatgaccgtgcataagtcaaaggggcttgagtttgctcacgtcatagtttgcgacatgatgggcaagggcaggggngatgactcaaatttcatnaccgaatacagcgaaaagggcgagtggatcgtaaagagtaaaatttcaggtagagaaaattttgatagcgactangcaagcgttttagagcagatgaaagagcttgaaaagcaagaaaatatcaataaaatttacgtcgctttcacaagggcaacaaagtcgctcatcatcatcaaacaagccgtcccaagcggaaatagcccaagctttttntcattttacacaagaagcgacaagagcgaagcaaacgactatcttgatctaaaagagtttagctttggcaaaattttgcctagtaaaactgagcaaaaagagctaaaaaaagatgaaaaaatgcctgaaattttaangatagagaggcaagaggtagaggcgaaagagcaaaagacgagtggtaaaaatttaagtgcgatatattttggtctngcgtttcactatctgcttgagatgagcgagaaatttgatgaaatttcactagaaaaagctaaaaatttgatgctaaataaatttcataaatttttgncacttgaagcacttgaagatgnctttnntagggcaaaaatgcttataagagagccaaaatttatagagtgcataaaagacaaagaaatttataaagagcagccatttaaagtgaaaaatgagctaaagcagatggatcttttttgctttaatgagcgtgaaatttgngtgattgattataaaacgacagataaaaatatagaagagaacaaaaagcaggtaaaagagtataaagatgcgctcgctaaattttatgaaaaacatagtataatcgccgtcattttctatgcacttgaaggcaaaatttcatatattgaagtttaaangctacttaatttaagctttgtcaaagcattgtttaaatacaatcacaactcaaaaattaacttggcaaaggtaagaaaatgacaaaaataacaaagccaaacgaagttaagcgagactggatcgtagttgatgcagctggtaagcgctttggtagattgctaactgaggtagcaactatacttcgtggcaaaaacaaaccatgcttcacgccaaacgtagattgtggcgactatgttatcatcataaatgcttctaaagtagaatttactggtaataacaaagctgaagataaactttatcacagacactcaggatattttggcagcgtaaagagcgagaaatttggcgatttgatagcaaataagccagaaaaactatttaaattagctgttcgtggcatgcttccaaagacaaaacttggaagagagatgataaaaaaactaaaagtttatgctggcagtgagcatcctcatacggcacaaatagctaaaaaagaaggaaaataattatggcaaaagtttatgcaactggtaaaagaaaaactgccgtagcaaaggtttggataaagtctggaagcggtaaaatcgtagtaaatggtatggatcttaacacttggcttggcggtcacgaggctatcaagcttaaagttattcaaccacttttagtaacaaaacaagagagtttaatagacgtagtagctacaactttaggtggcggttattcagcacaagctgaggctttaagacacggcatttcacgtgctttagctganatggatgctgattttagagcngcncttaaaccaaaaggcttnctaactagagattctcgtgttgttgaacgtaagaaatttggtagaagaaaggctagaagaagcccacaattctctaaacgttaatggttttttgcaagtgcttttgcatttgcaaaatttaggttntgtaaattnnnnnnttnnnntnannanttngntnnnanttnaanntnnnttnntttttnttnngnnaaantnnnnnnnannntnaaaannccnnnttnnaangnantnnnntnnnnaaaannntnnnttnnnnnnngntnncnnnannnnngnttttnnnnnnnannnnnnnnnnnannnnnnnnnnnnnncnannnntngnngnnntnnnncnnnangnaannnnnnnnnnaaannncnnnantttnntngnnntnnnnnngnnnnnaancntnnaganntnntnnttnnnnnanntnnnnntngnnntnnntnnnnnnnaaaaantnaannnnnnannngnnnnnntnnnannnnnngnnnnnnnnntnnnnnnnnnnnnaancntnnnaaaaannnnnntnnnnttngnncnnntngncnnnnnngnttnannngnnnnngntnnnnannnnntncnnnnnnntttnntnaaaannaannnngnngntttngnnnannnngnnntngnttnannnnncnannnnnnnnnnnnnttnnnnntnaannnnnnnnnannnnnnnnnnnnaanttnannnnnnnnnnnnnnancnnntnnnntnnnnnngnnttngnnnnngnnntnnntnnaaannnnnnncnnntnnnnnnnnnnnnncnnnnnnnnnnncnnnnnnnnnnncnnnnnnnnntnntnnnnnnnnnnannnnngngnnncnaannnnnnnnnnnnannnccnnannnnncnnnnngnnnnnntnntnnnn

SEQ ID NO: 159 - DNA, 4000 bp, Escherichia coli
  misc_feature (103)..(103): n is a, c, g, or t
  misc_feature (118)..(118): n is a, c, g, or t
  misc_feature (926)..(926): n is a, c, g, or t
  misc_feature (1307)..(1307): n is a, c, g, or t
  misc_feature (1802)..(1802): n is a, c, g, or t
  misc_feature (1829)..(1829): n is a, c, g, or t
  misc_feature (1832)..(1832): n is a, c, g, or t
  misc_feature (1835)..(1835): n is a, c, g, or t
  misc_feature (1883)..(1883): n is a, c, g, or t
  misc_feature (1988)..(1988): n is a, c, g, or t
  misc_feature (2138)..(2138): n is a, c, g, or t
  misc_feature (2183)..(2183): n is a, c, g, or t
  misc_feature (2199)..(2199): n is a, c, g, or t
  misc_feature (2216)..(2216): n is a, c, g, or t
  misc_feature (2380)..(2380): n is a, c, g, or t
  misc_feature (2464)..(2464): n is a, c, g, or t
  misc_feature (2471)..(2471): n is a, c, g, or t
  misc_feature (2568)..(2568): n is a, c, g, or t
  misc_feature (3527)..(3527): n is a, c, g, or t
  misc_feature (3942)..(3942): n is a, c, g, or t
  misc_feature (3956)..(3956): n is a, c, g, or t
  misc_feature (3994)..(3995): n is a, c, g, or t
agttttacatgaaagatttggtttgggcacagtgacagaaacagccggaagtggtgaaaacgcggaggccactattgattttggatctcatggcgtgaaacgnttactacttagatangcaccggtagaaaaactttaattaatcgttgccccataaccaaataccaggatttttgtattgtccgttaaccaatgtttcaaaatgtagatgtgcaccaaaagcgtttccggtggcaccaatgtttccaattctttctcccacatctacttcttgtcccacttcaactctggttcgagataaatgggcataccttgttacaacaccatctaaatgtcttatttcaactgttcgaccatatgcaccgcgccaaccggtaaaaattactttgcccactctggcagcgtaaacaggatcaccataatcaccgttgaaatctattccggtgtgccaacctaattcccaaattctgccttttcgggcataaccaaccgaaatacgagcacgtgcaggattaactgtgtacttagctcttagtgctcttcgttctgcagctttcttttctttttcagcagcaatgcgtgcaacttcttgcgccgcaatgtttgcagcttgggccttaaacttttgaattttttcttcagtaccaggagctcctaaatttgcagctactggaactttcacaattggtaaatcagctgctccaacatcttgattagccaccgttaactcttgaggagcatcggcaacaacaacgggatcagatgagccagaaaaattggatggcaaagctaacgcgattgttaaaccaatcgccacgagcaggatcgagcctgaaatccagcgattattcggtgctataactttgatcatcttgttcccaaccttgcccgatgtcacaccagtaacactcaggtgggttagtganttatggcatttgactcaaagtcagaacaaaaagtgtgggtgaataggcttaggaagaattgttgaatgttgatttgatttctataaggggaaagtcacaaaagtggatctttatgaataccaagcaaaagaactttttgctacccacggggtaaccacacaagtaggaaaagttgtgagcaccccagcggatgctcaaaaagcagcagcagaatttaattgcgcagttgtggtgaaagcccaagttaaaactgggggacgtggcaaagctggtggcgttaaattagccaataacgcggctgaagctttagaaaaagccaaaaacattttaggtcttgatataaaaggccacattgttaaaaaaatattaataactccggcngaagatattaaagaagaatattacgtatcatttttactagatagaacaaatagaacatttctttcaatggcaagtgttgcaggtggaatggatattgaagaagttgctgccaccactcctgaaaaattagccatgataaaaattaatccactcacaggtgttgacaacaacaaagcattagaaatatctgtagctgcaggtattcctacggaagtacaaaaagatgttgcggtgttgattgaaaaaatgtggaaactttttgttgccacagatgcaacattggtagaagtaaatccacttgttagaactaacgatgatcgaattgtggcattagatggcaaagtcacattagatgaaaatgcaaattttagacatgctgaaaacgaaaactttgtcgacaccgaaaatgttgaccccctagagaccgcagctaaagcaaaagatttaaattatgtgaaacttgatggcagcgtaggaatcatcggcaatggtgcnggattagtaatgagcacccttgatgtngtngcntatgccggagaaaaatttggtggcataaaaccagcaaacttcctaganattggtggtggtgcatctgcccaagttatggctgatggtttaggaattattttgtctgaccctgcagttaaatcagtttttgttaacgtatttggtggaatcacngcttgcgatgaagtagcaaatggaattatccaggcaattgaaattttaaaatcaggatcaaattatgttcaaagaccaattgtggttcgactagatggcaataacgccgaagaaggtatcagaatcttaaaagaagcaaaacctgaaaangttgaaatagttgacaccatggataacgctgcagctcgagcagcncaattagcagcaggtnttaaataatggcaattntattaaacgcaaatagtaaagttattgtgcaaggcatgactggttcagaaggaaaaaagcacaccgaaagaatgattaaatctggtaccaaaattgttggtggggtaactccaggtaaaggtggacaaagtttagaagttgctggacaaaacgttccagtattnaattcagttcaagaagcaatggcagcaactggtgcaaatgtttctgtagtttttgtgccaccaaaatttgctaaagcagcagtngtggaancagtagatgcagttatgcccttagttgttgtgattacagaaggtatcccagtgcatgacaccgcacatttcttcacctacgcacaaaaatctggtangaccagaattattggaccaaactgcccaggaattatttctccaggattaagtaacgctggaatcattccagcagacataaccacaaaaggttcaattggattagtttccaaatcaggaacacttacctatcaaatgatgtatgaattaagagatcttggttttactacagcaataggtattggtggggatccaattattggtacaactcatattgatgctttaagagaatttgaaaatgatccagatacaaaagcaattgtgatgattggtgaaattggcggagacgcagaagaaaaagcagctgaatttatcaaagcaaatatcaagaaaccagtagttgcctacgtggcaggcttcaccgctcccgaaggtaaaaccatgggacatgcaggggcaattgtctcaggttcaagtggaactgctgaagcaaagaaagttgctttagagaaagccggagtaaaagttggtaaaactccaagtgaaacagcacttttgttacgcgccgcaataaaataaatttgtgaccgatactccagttcaacgccatagcgttgttatcgctggacttttagtaacactgtggacgtttctcataacttttggtttatcagtaattcttatttttactacctggattttggcaggagatagctcaacatcaatttcaaatgctttcaaagttgtggtgtggggttatttagcaatgcaaggtgttcccattgttattaattccacagtgctttctttgccatttttgggcttcattttaataacgctactttcgttatatagatcttctaggtgggcaattagatccgcgttacatgacgaaatgaaacgaccaacctttatttctttattggtcgtttcaattgcctcaatttcatattgtggagtcatcgtacttttaagacaatttgtagatccactaaacatcaattggtttgaagtaatgatnaagccaaccatcatggtggtttctatgtcaatttatgcagtgggcacagtgggtggaacttggtcattaatatttgatgatctggatgaatttataaaacaaattcttaagtctattttacgatttattctgtttactttttttatcggatttgtgattgttgctattgctattgggtttaattatgaaaatatgttgctggttcaatcttccttattgggtggggtagtagccattgttgcggtggttatttcaggtattggttggatcccaaattttattttgtggtcatgggcttggttgactaaagctacggtttcactaggtgctggttcaagtatttccttgactgaggcaaacatttcacaattaccagcttggccttggtttgggttaattccaactgaattgcctncttggacaaaattnctaattattattccaatttttatgggagtaattatggnnctatc

SEQ ID NO: 160 - DNA, 4000 bp, Escherichia coli
  misc_feature (1962)..(1962): n is a, c, g, or t
  misc_feature (1974)..(1974): n is a, c, g, or t
  misc_feature (1986)..(1986): n is a, c, g, or t
  misc_feature (1994)..(1995): n is a, c, g, or t
  misc_feature (2000)..(2000): n is a, c, g, or t
  misc_feature (2016)..(2016): n is a, c, g, or t
  misc_feature (2028)..(2028): n is a, c, g, or t
cttgctccatgcacatcaatcatacggtggtcaatatcattgtgataaagattaccgaggaattgagacgatcgcaatcccttactgataccacattctccatcaggatagagtgccttcacaaaattttcaagaatgggcaaaagaagaggatcgcctacatatcttttaataatagaaattaaagtttcgtgattaatactgtcataatatcctttgtagtcgctttgatagtaatatttgagattaggattttctgccattgcagcttgtatctgatgaaacaacccatgcgggccacgcccctgtatggaagcagcggtagtttttatcaataaagaagaaagtcgattttccaacggttccataatagcattactcccaatgcgttctatgaccgaaggagcttgtactgttcttactttcgggccatcttcagtgagaaatgatttaaggttcttgatacggaatgtaccattaccaatttggtttttcaacgtttcaaatatttttcctttatttgtcacataacgaatcattcttggagaacattcgataccgtctatgatagttttcggcatagccctgttcccatttcgagcatctgcatttcgtagattcgccatgacacgcttaaatgagcgttccaaattttcgtctgatataatttccggtataaggttatataacggataactgaccagaggtatatttccggtcagtttaaataaatcatcaattttacagaccgccttccggtctcgtggggagaagtcaagccactccccacatatggttaatgttatgttccggctttccataaaatatatatattatattattatgctgttgccgaggttctaatccctcggagaatatcggtggtaatctcgtaccttatatagagtctccgattagtttaaccaacagaatttcagccgcgccccgtagttcgtgttcgagttcgaagatgcattgttcgcgttcgcataagcgagaccgctgttcgcattcgagttgttgccagaccgcaaaacacaacggcgcgtgggattgtccaccttctatgttttaaagagttatacttccaaaacctgcaatacttaaagaggcctccatccccattgctctgaatacacgcgcaacagtcgaaagtgtcagattcctaccactttctattttcgacacctgtgcacgctgaacaccaatcttctgggctagttcctcttgtgtcatattttgggatttccgggctttcttaatagcctcaccgataaggaacgactgcaattcagcctcatatttatccctatgtggtgtcccgactttcccaatgtgcttatccttaacttcatcaagggtataaaatttaatcgtttccatatcactatttttttgagttgaaatacaattttctaatagcttccgctttgttaatctctttacttggggtcttttgtgtctttttgacaaatccatgcgtagcaataactaatgtttccgcatcagtatcccaaaaagccaacaaacgatattgaatacctttataaagagtgcggaactcccaaatatccgtaccatccaattttttaaaaaggtctttatccatatatccattggcaaccttatctacattataaacaatcttgtctttaatgtcttggcacaaagtatcaagaaaggcatctgcctcgcttgacattatcactttgaatcttgctttcaattccataccttgttattgcattgcaaagatacaaaaaatgttccatatatagaacattttaaggcacaaatattcatgctgctctataatatattacccaacctacattagaaaaagagagagggagcagtctcccgttggtcgactctccctctgacgcttttttcgcaagaacgagtttcgctctattcaattattacgaattttccgcggaaggccagccgcgccccgtagtncgtgtacgagtncgaagatgcatngttcgcgnncgcanaagcgagaccgctgtncgcattcgagtngttgccagaccgcaaaacacaacggcctttgctactattgatccaataaccagccgcataatgagtaacatacttactcgtatctgcattatgaaccctgcttggcaaaatatcgcattttgctccatgtaccaagcgtaccacacaatttgcattggaagattcaactgatttcactgtacgttcagtctttttcacaggatcataaatatgggctatataatccgaaggatacgaactatcagtatcaatacatcttgctttgtagaatgtttcataacttgggatattaaatgcaatataatccatccactctgaatcacagcctacataatgcttcaaaccaagtatagaattaagagaattgccagcattactactatctgccataccaatggaatccagcttatttaaaatagcgtcatgtcctccattaccgactacagattgttcgttggttgttccgtttaatgcccaccaaagattactaatctctttgtgttgttcataatcctgtaattggtaacctgcacctctcaaacgggaaatattctggaaatcctttgctgtgtagtttaaggtagcaatcggcatctcaataggattaccactactatcgtatttccattcacctgacgtagtggatgtaccattacctttctttgagcgtacctcgccagaaagacttcgtggcatcttcaaaccgtcaatagtaataggataaacacctacaagactgtcattatcacctactgtatgttcagtccattccggctcaagagcctcaatgctggcactatccacagaaagacactcaacatcaccaatgtcgcgaaaagaagtaaaatagaaccattttgcaccgctaggtacatcgcagaatacacactcacctatagaaaagtcaaaatacgtatgacttacggacataatgaatataccaagtacacaattaccttcatcagtgaatacaccacctagtcgcgcatgattcaatcccggccatttcacctgcttcataccttttacgtccatcttatagctgttagtattagaagctgtagatataacatcctcactcataacctcaccaataacagcatcattcgcatacactccagtattctccttgtacagaagttcagaaagtttagccttcttgctgtgtaatgcagttgaaataggctcgttttccgtaacagaagtaataaaatacttcacttggttcttataatcatttacgcccttataccaatagtgaggagcatgccaaaatatatcaaaaccctcccctgccgtatctgcaacatcaaagctactaccatctttcagataattaaagtctgtatcactcaactgtacaccttccatttgattcttcttcgtgttgaacgagcatttaaaagcatggcaacctttctttatagcaagagtatgcccactaggaatatatgtgttaccgtagtcttcacctgtcttgttttcaggattgctgtacttctcacatgaatcgttatccacaacatcattgattttcacaatagaaaattgcgaattatggagctctaactgtggaaaatatgcagtaaggacatttacttcactctcttctacaagttcactcaatatccaacgtcctgtaataccactacattgtccactctcatcgtatgcgttcccgtttgcatcaagcccaattgctccactatcctttatagaacgtaacaaatcaacactagcagttgcatttacattaggaatacgtacagttctgatcgcactcgcattaattatctgctctaaaagtgtcatagcatccacatacggacattcatttacgaatatctttgctaccttgcctacacctcctagcgtaagtcctccgggataagtcaggtttggcaaattgtccaatacaagttccgtcatcgtatcgggcagcgtcaatgtactaatgggagcagtttctgca

SEQ ID NO: 161 - DNA, 4000 bp, Escherichia coli
  misc_feature (1968)..(1969): n is a, c, g, or t
  misc_feature (1971)..(1972): n is a, c, g, or t
  misc_feature (1978)..(1978): n is a, c, g, or t
  misc_feature (1983)..(1983): n is a, c, g, or t
  misc_feature (1986)..(1987): n is a, c, g, or t
  misc_feature (1990)..(1990): n is a, c, g, or t
  misc_feature (2005)..(2005): n is a, c, g, or t
  misc_feature (2007)..(2008): n is a, c, g, or t
  misc_feature (2013)..(2014): n is a, c, g, or t
  misc_feature (2019)..(2020): n is a, c, g, or t
  misc_feature (2028)..(2029): n is a, c, g, or t
  misc_feature (2031)..(2031): n is a, c, g, or t
  misc_feature (2037)..(2037): n is a, c, g, or t
  misc_feature (2064)..(2065): n is a, c, g, or t
  misc_feature (2408)..(2408): n is a, c, g, or t
  misc_feature (2411)..(2411): n is a, c, g, or t
acatatttgctaatcatataaattaagaactttttatctttagcgaagaataatcgggttttggcaaaaatttttctcgcatctttcccaagcggctttcatatatatgtttcctcaaattaaaactggaagcatgtttgaaatggccataataagaatttattgttgccaatattttatttaaccctggaattccctctttggcgttatttaatctgtataatttgtcttttaatcttttaactacttttttgcggaccaaagtataatcaggtttcacgaaatatcccaaaaaatctattcctttatcaatgggctgaattttaattttgtttagatttagctctaattttaaattttcctttaaaaaatcattaatttcgtctcgccaaaatttaagtttttctttatctctatctaataagatgaaatcatcaacatagcggacataatatctgcactttaattctctctttatgaactgatctaactcatttaaataaaggttagcgaaaaactgggaagaataattgccgatgggaagtcccgcattctctccggattcaaataaggatttgcgaggcggaatgagtttaaataaagacgggctgcctttgataagataatttttggtcggcttgtagaagataatagtcctggctaaccatagaacttcttcctcccattgattgggcttatcttgtttagaaatgaactttttaaaaattgaaaataaaatatcgtggtcaattgacataaaaaacccagaaatatctagttggcaataaaatgcctcttttttataattttgggttacttttctaataaatctcttcaatctctttactgccgcgtgcgttcctttgtttttccggcaggcgaaagaatcaaaaataaattttctttctcccatttctaatatttcccggattaagagatggtgaactactctgtctttaaatgaggcggcaaaaatttctcttggggaaggttctttaactacaaaacaaatcgaacgacccggtttatatttctttgtttccagtgcttttttaagctgaaagagatttctttctaaattccattcaaacttcagagcatttatagttttcctctttgtttttctacaatccaaataggcttgatatagtttttcaaaagtaaatatggttttactcatagttttgagatgcccattttaaccaaccgccaatcatctctccgatttctttaaggtagttggtttggatatgagtaaattgcctttttgaaatcaaatttagttcctgggccattcttaatctcacttttaatttgtcaaaattgatgctcagctctaaaattttcgaatatttctttttaccaggcaaggcatttgcttctaaaactaagtccagacactgccagcttaaatctaagatattttgtcccagggtgtatttgtattgctttgggaaatttcttatcctttcatacaaaaattttatcaactgataaattttaaggtataaagggagatgttgggagctgggcatattagattgtcgcaaatagtagctaaaaatcgatttccctcggacgcaacgaacatagttgttgttggtcttatcgttgttgctgacactgccattgttgaagttcaggttccaggcgttgttgctatcatactcggtagaagaccaatagtagttggactgagcgttattctcttacacttaataataattctccaaaggcctgactatctttagagagaccttctggctactaatacccctattacttttatactttttagaggtggtaagagcgcaatagatttttagccgctctctcccccaccactgcccagtttaatgagcaaagtatgtggaagaatctggcgacaaagttttaaaagaattcgcgaatcaaattcccaaacccaaattaccaaattctattgccctcggacgcaacgaacatagnngnngctggncttancgnngtngctgacactgccacngnngaagnncaggnnccaggcgnngntgctancatactcggtagaagaccaatagtagnnggactgaatacctggtaatctagaatagggagctgaaccctttgcctggtcacggatgctgtctaactccaagatatttggcaatctccagcctgaccccttagctttacaggcatccattgcatcaaaagtaccggcagctgaagtatagtatctttctaaccaattcctagctccaataagtgtatttccagtcccggcccgtagatctgcgctatgagttccgccaatatcgcctcctgaaatggaaaaataggaatctgcccaggtgtatgttgtaggtgcgccggcatctgtttttgaccaaagcaaattagcatagacattagagtcagtggcaatncanactgctgcagttggagtggcggcactatctggtaaaagaatacaattagaagcatcgcagaaaatctttttagtagtagttgccagagcattgccgagattactaatatctcgcactatagtggtagttgaccaatcccaggaaggactgggagaatagcactcagccaacttaacctgaccagtggtagtggcaatatctactttttctgtccctttgccgattttcgtttcatcagtaaaggtatcgctgaccgaatcaggagaggccttggctatccaataaccaaccaaaacgctgacaataattgctcctatcactccaattagaatttttgatttttttgttttaagcatatatttaaaatgtgctataatttaaatgccgtggagcaaaagaggttgaaacctctggtgtgtgtgcaactgttaggggatcaatctcagctctgcggctttttgctagctttcagctttcagttttcagcttaaattagcttttagctcacgggtcacagcttttagtttttggtgtctggtcctttcattctttgaagcattacgtataacatctttaaaatctcctctaataaactctcggctttttgaacattaacattgggatataatcttccaataagattgagttgagtttctaattcggctgctgaaccatgagcaatggaaagaaattggatatattctttttgttttctcttacttccctcagcgatattagaaggaatagctaccgctgctctttgcatttgcgaagagagtccataggtttcggagtttggaagtgcttttgtaattttgtagatttcttcaactaaaaccattgattttccccaaaccgtgagttctttgtaagacctcgcatacattttattagctatcagcgtacagcttatagctgaaagctttctacaaactgaaagctaattagctaaaagctgaaagctaattactggattttgtcgtaggcagccagaagaatctcataaatctgaatcgtgacgccgcttggaacctcaactcgaagattccaatcatcggtagtagtagcaggaagatttactgccggagtaatataagcttcgcccttagctaagtcagttgaagcagaagggggaactgtgaaggtagcggttgtggtagagtcagtcacgttccaaaccgtccaagttgaagaagcagtggtggtggaatcagcatagcgaatgacaaacttatgaattcggttggtaccggctgaggcagaagaaaacgaataatcctcaatagttcgagaaacagtcgttgcggttccttgacaggaagtagcacatctgactggcaaatcaaagccgagaatgggaatcatttctctcaaaatctcagtgtttgctttgccaatttcatatcctgaagcagttttgatataatcgccactggcaataattatcttgcctgaaccgtccggatctaaataaatgttttggttgtttgccgaagcaatggtcgtggtggcatcacttggtcctgtgaacaattttgaagtaattcctccggctccgctgacggttaaattattggcgatggttatgt

SEQ ID NO: 162 - DNA, 4000 bp, Escherichia coli
  misc_feature (3)..(4): n is a, c, g, or t
  misc_feature (11)..(21): n is a, c, g, or t
  misc_feature (24)..(25): n is a, c, g, or t
  misc_feature (27)..(29): n is a, c, g, or t
  misc_feature (31)..(33): n is a, c, g, or t
  misc_feature (35)..(37): n is a, c, g, or t
  misc_feature (40)..(41): n is a, c, g, or t
  misc_feature (44)..(45): n is a, c, g, or t
  misc_feature (47)..(48): n is a, c, g, or t
  misc_feature (53)..(53): n is a, c, g, or t
  misc_feature (56)..(63): n is a, c, g, or t
  misc_feature (66)..(77): n is a, c, g, or t
  misc_feature (79)..(81): n is a, c, g, or t
  misc_feature (84)..(90): n is a, c, g, or t
  misc_feature (92)..(93): n is a, c, g, or t
  misc_feature (95)..(96): n is a, c, g, or t
  misc_feature (98)..(98): n is a, c, g, or t
  misc_feature (100)..(100): n is a, c, g, or t
  misc_feature (102)..(102): n is a, c, g, or t
  misc_feature (104)..(109): n is a, c, g, or t
  misc_feature (112)..(112): n is a, c, g, or t
  misc_feature (115)..(132): n is a, c, g, or t
  misc_feature (136)..(138): n is a, c, g, or t
  misc_feature (141)..(142): n is a, c, g, or t
  misc_feature (145)..(145): n is a, c, g, or t
  misc_feature (148)..(160): n is a, c, g, or t
  misc_feature (163)..(163): n is a, c, g, or t
  misc_feature (165)..(166): n is a, c, g, or t
  misc_feature (169)..(181): n is a, c, g, or t
  misc_feature (184)..(185): n is a, c, g, or t
  misc_feature (187)..(189): n is a, c, g, or t
  misc_feature (191)..(196): n is a, c, g, or t
  misc_feature (198)..(212): n is a, c, g, or t
  misc_feature (214)..(217): n is a, c, g, or t
  misc_feature (219)..(223): n is a, c, g, or t
  misc_feature (228)..(233): n is a, c, g, or t
  misc_feature (236)..(242): n is a, c, g, or t
  misc_feature (245)..(253): n is a, c, g, or t
  misc_feature (256)..(267): n is a, c, g, or t
  misc_feature (269)..(269): n is a, c, g, or t
  misc_feature (271)..(272): n is a, c, g, or t
  misc_feature (275)..(276): n is a, c, g, or t
  misc_feature (278)..(285): n is a, c, g, or t
  misc_feature (289)..(290): n is a, c, g, or t
  misc_feature (295)..(298): n is a, c, g, or t
  misc_feature (301)..(301): n is a, c, g, or t
  misc_feature (304)..(305): n is a, c, g, or t
  misc_feature (307)..(308): n is a, c, g, or t
  misc_feature (310)..(313): n is a, c, g, or t
  misc_feature (316)..(321): n is a, c, g, or t
  misc_feature (323)..(326): n is a, c, g, or t
  misc_feature (330)..(333): n is a, c, g, or t
  misc_feature (337)..(338): n is a, c, g, or t
  misc_feature (340)..(340): n is a, c, g, or t
  misc_feature (342)..(345): n is a, c, g, or t
  misc_feature (349)..(356): n is a, c, g, or t
  misc_feature (358)..(359): n is a, c, g, or t
  misc_feature (362)..(375): n is a, c, g, or t
  misc_feature (377)..(395): n is a, c, g, or t
  misc_feature (399)..(403): n is a, c, g, or t
  misc_feature (406)..(406): n is a, c, g, or t
  misc_feature (412)..(427): n is a, c, g, or t
  misc_feature (429)..(430): n is a, c, g, or t
  misc_feature (432)..(433): n is a, c, g, or t
  misc_feature (435)..(437): n is a, c, g, or t
  misc_feature (442)..(452): n is a, c, g, or t
  misc_feature (2012)..(2012): n is a, c, g, or t
  misc_feature (2810)..(2810): n is a, c, g, or t
  misc_feature (2828)..(2828): n is a, c, g, or t
  misc_feature (3273)..(3273): n is a, c, g, or t
ggnngaaggannnnnnnnnnnaannannnannnannnaannaannannggttnggnnnnnnnnccnnnnnnnnnnnngnnnaannnnnnncnncnncngnancnnnnnnttnttnnnnnnnnnnnnnnnnnntttnnnaannaanccnnnnnnnnnnnnnggngnnggnnnnnnnnnnnnnttnnannntnnnnnngnnnnnnnnnnnnnnntnnnncnnnnnaaaannnnnnaannnnnnnaannnnnnnnnggnnnnnnnnnnnngnannaannannnnnnnngggnnaaggnnnnggnggnntnntnnnnggnnnnnngnnnntttnnnngggnnangnnnnaaannnnnnnncnnaannnnnnnnnnnnnnannnnnnnnnnnnnnnnnnntttnnnnnttngggggnnnnnnnnnnnnnnnntnntnntnnnaaaannnnnnnnnnnaaaaaaaaatgaaaaaggaagtaacgacgatatcgttcatactactacctctactactaccactactaccctagcgagctactttcttttctactaagcgttgacgtactcaactctcgactactacgtcttggcgcgtttccgatccgcctcttctgtcgcagtagtatttgtcggtctgattttgcgatgaggatagacgatgcgttcgccctctccagtgtattcgtactcgaacacgttgcgctgaggctgcgggttctttgtggagaagtaatcgatgtttgtgagcgcctcgtacgccgtcggacgacgctcgggatcgtatcgacacaactcttgaaaaacaaagagttcatcctcgtttgcaaacgtagaatcgagagacgtcgccgcgggttgtccttttgggtgttcgtccgggtaaaagacgtgcttggcccggttcaagtatgggtgatacttgaaatttggccactcgtcctctgtcggcgttcccttcaccttgacgatggcttctatttgctcctcgcaaaacatcgatctcggatcttctgctttcgggatgcccttgaacggcaccgccaacgtggcgagctcggcaaagatgcaccccgcggcccagatatcgacggcgcgcgtgtagtgtctcgcgcccaacaagagctcgggcgctcgataccacagcgtcaccacgggtccgttttcgtgcaacggacgaagaagactatccggatcgcaataccgcgccagtccaaagtctgcgattttcaccaccccgagttcgcttccgtcacccatgatgagcacgttctgcggcttgatgtctctgtgcatgatccagttggagtgcaagtagtgcaaaccgtgcaacagttgccatgcgacgctcttcaccattctcggatgaatcatccgtcttctcgccctgtgccaactcaaaattaccccgagatcatactcggcgtaatcgatcgccaacgacagagacgcctcttttttatccacgatgatgtggtgcaaacgcacgacatttacgtgtcgaaccgctcgaagcagcgtcgtctctcgaaacgtcggttgcgccatcccgatccgttggttccctttcgcctccccagtcttcgggtctcgctgaatcggtggtgttttaaattctttcaccgccaccgtgcgtcctaatatcaatcgtcgtcgtcgtcaacacgatacgtaaacgtcagtcagtcaatcacccggtgaagtcaaaaaaccagcgaacatcttattcctcatccatctaccaccgtgacgacgcatccacgcaccttttcgactcctagcaaagtgtacgaacccgaacgcgccctcaccgatgatcccgacgagctcgaaggcgtcgccgtcgtcgtcgacaaagacgggtgcgggcatgatgtcttcggtgcgaccgattgacgtctgcgctaccgctactgcgctcgttgacgtctgtccaatcgccatattctgtgtacgtttcaccgatcaatggtgggttaaatacagacacatccttagttttcatttacaatacgtgtnccaactgaatacacatagccaccattggcacgcgcgcgctcgacgtcgcgtttgaacggccgagtcgaccgagccgcccgcactccgcgcctcgcgtcgagggaccccgaccccgtcccgccgagtcgagagccgagcgagagcgaagcgtgtgagacgcgggcgcgcgcggaggcggcggaggaaacccgaggacgtgtttcggtcgacggactgacagacatggagaccgagggagaagatcgaagagaggaggacttcaacgcgatcgttgaagcggaagatgacgcggtggatcggagcgtgcacccgagtggaatcgtgccggtgttgcagtacgttgaatccgaggcgaaaaacgcgcgggaaacgcgacgcgtgagggcggaaggggcaagatctggggagaattggaaggggaatgttttccattttaaatgactcgaggcggctttggacgcacgattccgagttgaaactgacggttttcgcgcgctcataggaatattgtggcgactgtgaacttggattgcaagttggatctcaagacgatcgcgtttcacgcgagaaacgtcgaatacaacccaaaggtgaggcactttaaccaaccctagcgcgcgttgtcgcgtcgacgcgagcgacatttcgcggttgaatgcgcattctcacgagctctgactgacggtgaacatgcctcgttcgtttgaaaacacgcagcgtttcgcggcagccatcatgcggatccgtaatccaaagacgacggcgctgattttcagctcgggaaagatggtgtgcacnggtgccaagacagaggcnttggcgcgggaagcggcgagaaagtatgcgaaagtgatcatcaagctcggatttccggcgcaattcaaagattttaagattcagaacatggtgggctcgtgcgatgtgcagtttccgattagattggagggattagcgtggcagcacggtcacttcgcgcagtacgaaccggaactctttccgggcttgatttacagaatgcaaatgccaaagatagtccttctcatctttgtttcgggtaagattgttttgacgggtggtaagcgcagagaagatatttaccaggcgttcgagaacatttaccccgtgctgactgagtttaaaaagctggcgcagccagacgaagccggcgcgacggcgaaggcgctcccgagcgccaagggaggcaaggcaaaggcttgagaaggacggacgtccgcctacttaagcaaagaggcttacgacngcgtccggcgtccgaggaagcgggacgacatatcttttagacacacacacactcacatccacacgcgtacgatgacttattagactgttgctcgtcgagcgcgaactcgccggctcgacgccgagacgccgagaagggcgcggcgagtaaaacaaaaaaacaaaattagcgagcatgtattagacaaacaaaccaaacagtagacaaacaaacggggtcacgaaacgaaacgaaacgaaacgaaacgaaacgaaaccgacgattgaggacccgcgtggccagactagatttacggattgattaatctcatcacagtccaaacaaacaaacaatgactccacgcgcatctagtactctatccaaagattcggtatctaatgcgtgatcctagaccaccgcaaaatcaacacatcgatctaagtacgtataatacacgagatggatttcgtattgtcacccaatcgtgatcgacagacgtaccctttacataacataacgagaacacattcctccctaaacccaaatcgacgtacatcccttacaatatgagacccgccgcgtgtcgcctcgcccccgtcgcgcgctccctccctggcgaacgactcgcccgcgtccgtcggcagactcgcgcgcgcgcacccggtcaccgccgcacgccccccacacctcgatctccacgatgatggcgtccaccaccgtccgattatccgcgccgatcgcccaccgc

SEQ ID NO: 163 - DNA, 4000 bp, Escherichia coli
  misc_feature (132)..(132): n is a, c, g, or t
  misc_feature (726)..(726): n is a, c, g, or t
  misc_feature (1305)..(1305): n is a, c, g, or t
  misc_feature (1308)..(1308): n is a, c, g, or t
  misc_feature (1344)..(1344): n is a, c, g, or t
  misc_feature (1359)..(1359): n is a, c, g, or t
  misc_feature (1368)..(1368): n is a, c, g, or t
  misc_feature (1373)..(1373): n is a, c, g, or t
  misc_feature (1473)..(1473): n is a, c, g, or t
  misc_feature (2023)..(2023): n is a, c, g, or t
  misc_feature (2729)..(2729): n is a, c, g, or t
  misc_feature (3002)..(3002): n is a, c, g, or t
  misc_feature (3173)..(3173): n is a, c, g, or t
  misc_feature (3365)..(3365): n is a, c, g, or t
  misc_feature (3434)..(3434): n is a, c, g, or t
  misc_feature (3771)..(3771): n is a, c, g, or t
  misc_feature (3785)..(3785): n is a, c, g, or t
  misc_feature (3791)..(3791): n is a, c, g, or t
  misc_feature (3808)..(3808): n is a, c, g, or t
  misc_feature (3887)..(3887): n is a, c, g, or t
  misc_feature (3902)..(3902): n is a, c, g, or t
  misc_feature (3935)..(3935): n is a, c, g, or t
  misc_feature (3985)..(3985): n is a, c, g, or t
gtacggtcccggtgaagcattgaccaggagagcattttttgggagtattccagcacaagatgcctgtaatccggatcttcagcgcgatttataaattcttccggatcttcctgtaaatcaaacaaaagcggngggagagctgtcatgtggacatatttatagcactcatcacgtataacggttaacgaacattgatcaggagacaggccgaatttttgttcaatcatcggttgatacgaaccgatttcgcgaaaatcaaattcccaatgtgcctcctttctccagttatccggaacatttccgttaagcaaaggcaggagtgaacggccgtccagctcttgcggaatttctaaatccagccaatccagaatagtaggcatcacatcaattgcttcagtgaatacttctacctgattatcagcagtggaggattttccagatgtagaatcataaatttctggattacggatgatcagcggaattgcatacgatgcatcaaaatatccggcttttccaaataaatagtgatctccaagttgttctccgtgatcactcgtaaaaacaatcagtgtggattcatattgtcctgttttttttaaatacgaaataactcttcctaaatgatgatcaatttctgtcatcaatccgtaataggtggcacgtgcctgtaaaatatccttttcacttgtttctgcagcaagtccttcataagtatcagggaaaaantttttacctggaattattgtaagcaacattttgagcagtggatgctgttccccttcctgctccaaactcttcatcctgaccggtttggagacatcatcaggatcatacattgaattataaggttccggtgctatccacggaggatgcggacgcaaataagataaatgcgcaaaccagttctcatcttcacgtacacttaaccacttgagaagttcatcggtcaaaaaagcggcgctgctgtcttcatcagaatatactggtggaggaaaagtaacaccgcgtttttctgctccgggatagtttgcgacaggatagtaaactgtatgctcattcaacgagtgatcatatcccctcgatatcaactcggcaatccacggacgttgattgtctgttaaagtaactccgctgctcattccaggcatcagcccttcataagtggtcagtagcggatcttgctggtggaattcacgagggtctgcggaagtatctgtgtaaccgaacagggtaggatcgtatcctgattttcgtgcttctaaagcgatatttgtgaagcgcgcattcaaaggggttccgttattnacngaacggtgattcattgcgtacagccctgtgtataangaagcacgtgatggnccacagggnacagnctgagcataatgtttgcggaacaataccccctctcctgcaagttgatccagatacggagtctgtactacagggtgattaatacatcccagagtatcaccncgccattgatctgccataatgaataagacgtttttacgtttttttttcatcaattgtctgaaattacaatgcagcagggtttaggcttcttcgtccagcaggaattctttataatcgtcagcggataaaagttctgaggactcatcctgatttgacagttccaggcgaatcacccaaccttcgtcgtaacactcttcattaattatttcaggaccgtccttcaactcagtgttgactgcaatgatacgtccgctcatcggcataaaaagcgaggtgactgctttcaccgattcaattgaaccaaactcatctcctgcatcaatttcatcttcaatgtctggcaattcaacaaaaacgatgtcacccaatgctgtttgagcgtgatcagtgattccgacttctgctttgttaccttcaattcttacccactcgtggtctctagtgtatagattgtctttaggtattgtgctcataattcctcttttgaatgattaatgtaggttggcccggatatgctccgtgatccgcctgaataatttcatgctttccnataagttaatactaatttagccattgatagatataagtccagcaaaaaaaagcatattttttattttaacttttattttaaagaaaaaaatcaatggaagatacacataaagcaggatatgataaaagctatgaaaagacgttaaaataattttacatcaacaaggaatacaaaaatgttattagattttagaatactcgcgctgttatttttcactgttttgttttggactgcacctgcgaccgcgcaaaattctgatgatttagaacaaatgctgcgtgcttcaaaaacacgggcgatcctggtgcaaaatgtccagaaagctgttgtccatatcaaggtcgaaaaaattatgcgtaaccccaatggacaagctctcaacaatccaaaagatctttataatgatgagttcttccgcagatttttccctgaactacgtacacctaaaaaccaacagccaaaaaaacgtcaacagccaaagcgggatttccggcaggaaggcatgggttcaggttctatcatcgacagtaaaggatacattttaacgaaccatcatgtagtaggagaagcagacagaattttagttatactttatgacggcacagaaaaggaagcaaaacttgtaggtactgatccggagactgacattgcagtgattaaaatagtagggaacggcctgccggttttacctatgggtaattcagangaaattcttgttggtgaagatgtgattgcagtaggtaatccatttggactgattcaaaccgtgacctacggaattgtcagcgcaaagggccgttcaaatgtcggcataaacgaatacgagaattttatccaaactgatgccgcaattaatccgggcaacagcggtggtcctttggtcagtctgagtggagaaattgttggtgtgaacagcgcgatttataccagaagcggtggttatcaaggtattggctttgctgtacctattaacatggcncgtaaaatcatgcgggatttgatcgataaaggtaaagtttcaagaggctggctgggagtagggatacaggatgtgagtcaggatttggccaaagcatttcaactggaaaataccaaaggcagtttaatatccggtgttatgcagggtacgcctgctcaaaaagcagggatnctcaaaggtgatgtggtgattcgcatcaacgacaaatacatccgtgacagtaaccatctccgtaacgaaattgcaaatgcaggtgcgtttgctgaaatcgaaatggaacttatcagagacggaaaaaacatcctcataaaactgaagctggatgaacgtccaaggaaactttctcaggttaaagttgcaccncagccaataccggagattgaacaggtggagatgctgggaatggttgtggaagaacttaccgaagaaacngcaaagcaattcgggattgagtcaggaaccggaattgtgattgtagcagtcacacctggaagtgctgcggataaaacaggtttgcttccgggtatgattgtccaggaagtggagcggcaggcaattgttaatctcagcatatttaaagaactcgtcagtgaaatggatccggaaaaagggatattgctgctgatcacaacagcaaacggttcacgttatatttttctgcaggccgattgaaaaatatgagccatctgcagaagaagaccaaattgcactttgatcatttactgttgaaattgcatgagatgaatcaacaggttgctgttcctgagancatggattattacnctctgntggatgaaatgtcagcntattacaatttaactgccgaagaattacagactcgtggattccggaaagcatatcggcaggctgttgaagggctttgantaaaagctcctactncttctcattttactatgaccttagtctccgatntgtcatcagaaataataccactggctggactccgcattttggttactcgnaaagacactccggaa

SEQ ID NO: 164 - DNA, 4000 bp, Escherichia coli
  misc_feature (9)..(9): n is a, c, g, or t
  misc_feature (12)..(13): n is a, c, g, or t
  misc_feature (15)..(15): n is a, c, g, or t
  misc_feature (20)..(21): n is a, c, g, or t
  misc_feature (23)..(25): n is a, c, g, or t
  misc_feature (32)..(32): n is a, c, g, or t
  misc_feature (34)..(34): n is a, c, g, or t
  misc_feature (36)..(38): n is a, c, g, or t
  misc_feature (40)..(40): n is a, c, g, or t
  misc_feature (42)..(42): n is a, c, g, or t
  misc_feature (45)..(45): n is a, c, g, or t
  misc_feature (48)..(53): n is a, c, g, or t
  misc_feature (57)..(57): n is a, c, g, or t
  misc_feature (61)..(61): n is a, c, g, or t
  misc_feature (64)..(66): n is a, c, g, or t
  misc_feature (69)..(70): n is a, c, g, or t
  misc_feature (73)..(73): n is a, c, g, or t
  misc_feature (77)..(77): n is a, c, g, or t
  misc_feature (80)..(82): n is a, c, g, or t
  misc_feature (84)..(85): n is a, c, g, or t
  misc_feature (88)..(91): n is a, c, g, or t
  misc_feature (97)..(97): n is a, c, g, or t
  misc_feature (99)..(99): n is a, c, g, or t
  misc_feature (104)..(105): n is a, c, g, or t
  misc_feature (107)..(107): n is a, c, g, or t
  misc_feature (2472)..(2472): n is a, c, g, or t
  misc_feature (3418)..(3418): n is a, c, g, or t
ccgcaattnagnnanattgnngnnngattcantngnnnancnggnagnnnnnnacantttnaannntgnngtnctgngtnnnannccnnnntggatnanaaaannangcaaaaaaatactcctaaaattcaatgaatttcgggagtatttatttttaggcaaaacctcaaaaaacagcggatgcgcaggaaaaagcaccgacagcgtgatcgaagttgtaccctcccaaccgataacgcccgacggacaggataacgcccccgccgccggcatatctgtcgccgatactccgcccggcagtccttcaccggacagtattcccatgcaggatacaccctctgccgagccttatgtccaccggatgcccgactttctcaccgacagacagcgtactccgcccaaactaagcggaatgcccaaaagcatcagcatcaaagaggcaatgagagtactcggcggcaagctcgtcatcggaggcgtccccaagtccggcaacaaggacgatcccgatcctgaccaatccgaaaagcccaaaccatgggtatatagaatatgttgtttccaataataatttgagaacaatccaaatctttcaatatcaattttggtaatcatggtatttaaataaaattcacatctacatgtcttccattgaaaaaagcctgctctctatctcatacttaaacaaacctttcttccgtaattcctctactttaagcgcaaacaaatccggcttgaaatttttggattgtcttttcacctctgctaccagagcttttttctcttccgcatatagtccgacaatatctatttcatcctgatcttttttattcttgccttgccaccaagaacctatatctgcaaattccttgccttccatcatcttttggcggaaatacatttccaaagccaagccggagaatgtcggataatccttttttataatatcagccaagcgttcaaaattctgtatctctatataattttgatacttgataaaataccggaaccagaaacgtaaaaacatatccgatacttcataacggacggtctgggaaccctcctttgaaagtataggccgtttcttctttaccagattataatcttcttccaatctcttcaattgtccgcccagactcataccacccataaccgtttctatttccggcagggtattcttaccgttggagattgctgataagatagaaaagtaattaccgtatttttttccgaactcctgtaccagcaaagcctgtccttcagtcaaaaaggatgaatcgggttgcaacatgaaatcgaccatgctttccatacttgtacatccattgtccataaattgctcgatatattttggaacaccaccggtaaaggtatagagtgccaacaagtcatctttagtatagtcagccttatgatccgacataatttcttttaatacggaagttgtaaaaggtgctaactttataatactgtcagcacggccatacaacggttcttttgaatccctgaagattttattcataagggtatagaccgaaccactcacgataagattgacatggctctgtttcctcagccgatcccaagtatcctgcatcaaactgtaaatctcttgatttatgtaatagaactcctgaaattcatctataaccagattatattccagccgtgttcccaaatccattaagaaacgaaatatttctgcaaagttggtaagttccggtacataaatatcaagtgcctgctggatctcgaaagcaaagcgtaaacagagatctgtttcattgcttcggctgacaaacagatacaccgtaggagtatcctcacagctcttgaatataagactggtcttgccgatacgccgccgaccggtaagtacagtcatttgggaatgcacagaaaaagacactcgccgaaccttttccaatgatgctaactctttttctctattgtagaatttcatatccttttctttttatattcgatttcattggctttaagtttaccgccgtaaagtttacggcggtaaacttaaagccaataacaaagttactaataaatccgagaatataataggattaaagcatcgaaaacccaaaaaagagtagattcttcctgcaaaaacaacggaaccccataaaataatcccactccggcaattctaacaggcaattggcagagtgagattacttagtccggagaactgaattttatttgtaaaccttctcatcacaacaaacttaattttcagtgtttaccacaaaagaagaacaataaaattaaaaaatggtaattacgccaaactaatgagcgttttatcatctctaaacagtccatatattcaatatcaacatacttattgaataaataatatctattttattcaatacagtaatttaattgaataaaaagtgctattttataacctaaaatgatttacgatgaaaacaacgatacttaatcaacgggcanaacgtgacgagcttatgtcacgtccctatcaacaacggcataccaagtataatacagacgagctattacaaaatccgcttatcaaacttatcacgggtcctcgacgtgtaggcaaatcggtttttgcgctgctcatgctacaaggaaagaatttcgcctatctaaatttcgacgacaaccagttacttgataaatgggatgaagatttggtcatgtcggccattgaagatgtatatcccggttacgatttcattttgcttgacggagttcagaatcttcccgactgggatttatggataggtaaactgtatcgtcgtggaaagaatttggtaattacaggaagcaatgccaagatgttgagcagcgaaatggcaactgtcttaaccggacgttaccttcaaattgaaatgttgccattcagtctggaagaaacgatgagctggaaaaatatcagtctgcttcgagaggaacaagctgcacaggcaaccatgctgatcgatgactatatgcgcaatggtggctatcttgaaaccatttctgcccgtagcattaccaaaagctatctttcgactttatttgattcaatcttgctgaaagatattaccaagcgacataatataagaaatacaaacgatttatataatctagccagttatctgctctcaaatttctgcaatccaatttcagcgaatgaccttgcgagagaattaggtttgtcaagcgttgcaactacaaagaaattctgcgactatctcagcgaaccatacctgttcttctatctgccccgtttcaacaacaagctgaaattgatgaacaaagcccccaaaaaagtttatgtagttgacaatggatttgtgcaaagcacggctttcaatctgagtgagaacctcggcagattattggagaatcaagtatttgtagaactattacgtcgtggttatatccnaggtcaaacattattctattaccgaagtcgcaatgacagagaaatagattttgttacccgtaaaggcacaatggtggagcagctgattcaagtgtgctacgacatgacctctgagaaaacccgcaagcgtgaacttgacgctcttgttgaggtagccggagaactccattgcgacaatctccttgttgtcaccaatgaccaacaagaaaaaattaattggaaaggcaaaaaggtttcaattattccaatttataaatataaataagaacgatatggatatcataaccaaagaaggtgaaacacctgcattgtttgtaaattcaatcacatttaataatggagaaacaataaaaataaataagaacgacatagttgaattgtcggtcctaataatgctggaaaaagtcaatcattaaaagatatttatgcttgtatagctaatcaacaccataagattgtaataaaggacatagatcttacttttcagaattcggataatgatgtcgcttttattgaatcttgttcaacgcaatcaaagaattcaacaagtggatatatatatattcaggtataaactattat

SEQ ID NO: 165 - DNA, 4000 bp, Escherichia coli
  misc_feature (1975)..(1990): n is a, c, g, or t
  misc_feature (1992)..(2001): n is a, c, g, or t
  misc_feature (2003)..(2004): n is a, c, g, or t
  misc_feature (2052)..(2065): n is a, c, g, or t
  misc_feature (2067)..(2070): n is a, c, g, or t
  misc_feature (2073)..(2080): n is a, c, g, or t
  misc_feature (2128)..(2135): n is a, c, g, or t
  misc_feature (2137)..(2145): n is a, c, g, or t
  misc_feature (2147)..(2149): n is a, c, g, or t
  misc_feature (2151)..(2151): n is a, c, g, or t
  misc_feature (2153)..(2163): n is a, c, g, or t
  misc_feature (2165)..(2166): n is a, c, g, or t
  misc_feature (2168)..(2169): n is a, c, g, or t
  misc_feature (2171)..(2171): n is a, c, g, or t
  misc_feature (2173)..(2174): n is a, c, g, or t
  misc_feature (2177)..(2183): n is a, c, g, or t
  misc_feature (2185)..(2185): n is a, c, g, or t
  misc_feature (2188)..(2189): n is a, c, g, or t
  misc_feature (2192)..(2194): n is a, c, g, or t
  misc_feature (2197)..(2201): n is a, c, g, or t
  misc_feature (2203)..(2205): n is a, c, g, or t
  misc_feature (2207)..(2209): n is a, c, g, or t
  misc_feature (2211)..(2213): n is a, c, g, or t
  misc_feature (2215)..(2218): n is a, c, g, or t
  misc_feature (2221)..(2233): n is a, c, g, or t
  misc_feature (2281)..(2281): n is a, c, g, or t
  misc_feature (2283)..(2283): n is a, c, g, or t
  misc_feature (2285)..(2287): n is a, c, g, or t
  misc_feature (2289)..(2294): n is a, c, g, or t
  misc_feature (2296)..(2297): n is a, c, g, or t
  misc_feature (2299)..(2301): n is a, c, g, or t
  misc_feature (2303)..(2316): n is a, c, g, or t
  misc_feature (2319)..(2319): n is a, c, g, or t
  misc_feature (2322)..(2322): n is a, c, g, or t
  misc_feature (2327)..(2327): n is a, c, g, or t
  misc_feature (2331)..(2336): n is a, c, g, or t
  misc_feature (2342)..(2342): n is a, c, g, or t
  misc_feature (2346)..(2347): n is a, c, g, or t
  misc_feature (2351)..(2354): n is a, c, g, or t
  misc_feature (2358)..(2361): n is a, c, g, or t
  misc_feature (2363)..(2366): n is a, c, g, or t
  misc_feature (2368)..(2369): n is a, c, g, or t
  misc_feature (2372)..(2379): n is a, c, g, or t
  misc_feature (2382)..(2393): n is a, c, g, or t
  misc_feature (2396)..(2396): n is a, c, g, or t
  misc_feature (2399)..(2399): n is a, c, g, or t
  misc_feature (2404)..(2404): n is a, c, g, or t
  misc_feature (2408)..(2413): n is a, c, g, or t
  misc_feature (2419)..(2419): n is a, c, g, or t
  misc_feature (2423)..(2424): n is a, c, g, or t
  misc_feature (2428)..(2431): n is a, c, g, or t
  misc_feature (2434)..(2434): n is a, c, g, or t
  misc_feature (2437)..(2438): n is a, c, g, or t
  misc_feature (2440)..(2442): n is a, c, g, or t
  misc_feature (2444)..(2446): n is a, c, g, or t
  misc_feature (2449)..(2451): n is a, c, g, or t
  misc_feature (2454)..(2456): n is a, c, g, or t
  misc_feature (2458)..(2459): n is a, c, g, or t
  misc_feature (2461)..(2469): n is a, c, g, or t
  misc_feature (2471)..(2481): n is a, c, g, or t
  misc_feature (2485)..(2492): n is a, c, g, or t
  misc_feature (2495)..(2496): n is a, c, g, or t
  misc_feature (2499)..(2501): n is a, c, g, or t
  misc_feature (2504)..(2507): n is a, c, g, or t
  misc_feature (2509)..(2510): n is a, c, g, or t
  misc_feature (2512)..(2521): n is a, c, g, or t
  misc_feature (2523)..(2524): n is a, c, g, or t
  misc_feature (2527)..(2533): n is a, c, g, or t
  misc_feature (2535)..(2546): n is a, c, g, or t
  misc_feature (2548)..(2549): n is a, c, g, or t
  misc_feature (2551)..(2552): n is a, c, g, or t
  misc_feature (2554)..(2554): n is a, c, g, or t
  misc_feature (2556)..(2557): n is a, c, g, or t
  misc_feature (2562)..(2566): n is a, c, g, or t
  misc_feature (2568)..(2568): n is a, c, g, or t
  misc_feature (2572)..(2573): n is a, c, g, or t
  misc_feature (2576)..(2577): n is a, c, g, or t
  misc_feature (2581)..(2584): n is a, c, g, or t
  misc_feature (2586)..(2594): n is a, c, g, or t
  misc_feature (2596)..(2598): n is a, c, g, or t
  misc_feature (2600)..(2602): n is a, c, g, or t
  misc_feature (2604)..(2606): n is a, c, g, or t
  misc_feature (2608)..(2613): n is a, c, g, or t
  misc_feature (2615)..(2619): n is a, c, g, or t
  misc_feature (2621)..(2621): n is a, c, g, or t
  misc_feature (2623)..(2624): n is a, c, g, or t
  misc_feature (2626)..(2627): n is a, c, g, or t
  misc_feature (2629)..(2630): n is a, c, g, or t
  misc_feature (2632)..(2632): n is a, c, g, or t
  misc_feature (2634)..(2634): n is a, c, g, or t
  misc_feature (2640)..(2644): n is a, c, g, or t
  misc_feature (2649)..(2650): n is a, c, g, or t
  misc_feature (2655)..(2655): n is a, c, g, or t
  misc_feature (2657)..(2657): n is a, c, g, or t
  misc_feature (2661)..(2663): n is a, c, g, or t
  misc_feature (2665)..(2668): n is a, c, g, or t
  misc_feature (2670)..(2679): n is a, c, g, or t
  misc_feature (2682)..(2682): n is a, c, g, or t
  misc_feature (2684)..(2689): n is a, c, g, or t
  misc_feature (2691)..(2701): n is a, c, g, or t
  misc_feature (2703)..(2703): n is a, c, g, or t
  misc_feature (2706)..(2707): n is a, c, g, or t
  misc_feature (2709)..(2710): n is a, c, g, or t
  misc_feature (2712)..(2713): n is a, c, g, or t
  misc_feature (2716)..(2721): n is a, c, g, or t
  misc_feature (2724)..(2724): n is a, c, g, or t
  misc_feature (2727)..(2729): n is a, c, g, or t
  misc_feature (2732)..(2734): n is a, c, g, or t
  misc_feature (2736)..(2737): n is a, c, g, or t
  misc_feature (2741)..(2752): n is a, c, g, or t
  misc_feature (2755)..(2755): n is a, c, g, or t
  misc_feature (2757)..(2758): n is a, c, g, or t
  misc_feature (2760)..(2774): n is a, c, g, or t
  misc_feature (2779)..(2782): n is a, c, g, or t
  misc_feature (2785)..(2793): n is a, c, g, or t
  misc_feature (2795)..(2798): n is a, c, g, or t
  misc_feature (2800)..(2802): n is a, c, g, or t
  misc_feature (2805)..(2806): n is a, c, g, or t
  misc_feature (2809)..(2817): n is a, c, g, or t
  misc_feature (2819)..(2819): n is a, c, g, or t
  misc_feature (2821)..(2821): n is a, c, g, or t
  misc_feature (2823)..(2824): n is a, c, g, or t
  misc_feature (2826)..(2826): n is a, c, g, or t
  misc_feature (2829)..(2832): n is a, c, g, or t
  misc_feature (2834)..(2834): n is a, c, g, or t
  misc_feature (2837)..(2843): n is a, c, g, or t
  misc_feature (2845)..(2851): n is a, c, g, or t
  misc_feature (2853)..(2854): n is a, c, g, or t
  misc_feature (2856)..(2857): n is a, c, g, or t
  misc_feature (2859)..(2859): n is a, c, g, or t
  misc_feature (2862)..(2864): n is a, c, g, or t
  misc_feature (2866)..(2867): n is a, c, g, or t
  misc_feature (2870)..(2871): n is a, c, g, or t
  misc_feature (2874)..(2875): n is a, c, g, or t
  misc_feature (2877)..(2877): n is a, c, g, or t
  misc_feature (2879)..(2880): n is a, c, g, or t
  misc_feature (2882)..(2882): n is a, c, g, or t
  misc_feature (2886)..(2894): n is a, c, g, or t
  misc_feature (2896)..(2900): n is a, c, g, or t
  misc_feature (2902)..(2908): n is a, c, g, or t
  misc_feature (2910)..(2924): n is a, c, g, or t
  misc_feature (2926)..(2934): n is a, c, g, or t
  misc_feature (2936)..(2944): n is a, c, g, or t
  misc_feature (2947)..(2954): n is a, c, g, or t
  misc_feature (2957)..(2957): n is a, c, g, or t
  misc_feature (2959)..(2959): n is a, c, g, or t
  misc_feature (2962)..(2963): n is a, c, g, or t
  misc_feature (2966)..(2966): n is a, c, g, or t
  misc_feature (2969)..(2970): n is a, c, g, or t
  misc_feature (2972)..(2976): n is a, c, g, or t
  misc_feature (2978)..(2986): n is a, c, g, or t
  misc_feature (2988)..(2989): n is a, c, g, or t
  misc_feature (2991)..(2992): n is a, c, g, or t
  misc_feature (2995)..(3003): n is a, c, g, or t
  misc_feature (3005)..(3005): n is a, c, g, or t
  misc_feature (3008)..(3008): n is a, c, g, or t
  misc_feature (3010)..(3011): n is a, c, g, or t
  misc_feature (3013)..(3015): n is a, c, g, or t
  misc_feature (3017)..(3018): n is a, c, g, or t
  misc_feature (3020)..(3030): n is a, c, g, or t
  misc_feature (3032)..(3036): n is a, c, g, or t
  misc_feature (3040)..(3041): n is a, c, g, or t
  misc_feature (3043)..(3043): n is a, c, g, or t
  misc_feature (3045)..(3047): n is a, c, g, or t
  misc_feature (3050)..(3053): n is a, c, g, or t
  misc_feature (3055)..(3055): n is a, c, g, or t
  misc_feature (3057)..(3058): n is a, c, g, or t
  misc_feature (3060)..(3070): n is a, c, g, or t
  misc_feature (3072)..(3075): n is a, c, g, or t
  misc_feature (3077)..(3085): n is a, c, g, or t
  misc_feature (3088)..(3088): n is a, c, g, or t
  misc_feature (3090)..(3091): n is a, c, g, or t
  misc_feature (3093)..(3102): n is a, c, g, or t
  misc_feature (3104)..(3105): n is a, c, g, or t
  misc_feature (3107)..(3107): n is a, c, g, or t
  misc_feature (3111)..(3112): n is a, c, g, or t
  misc_feature (3116)..(3118): n is a, c, g, or t
  misc_feature (3120)..(3121): n is a, c, g, or t
  misc_feature (3124)..(3130): n is a, c, g, or t
  misc_feature (3132)..(3133): n is a, c, g, or t
  misc_feature (3137)..(3137): n is a, c, g, or t
  misc_feature (3139)..(3140): n is a, c, g, or t
  misc_feature (3142)..(3144): n is a, c, g, or t
  misc_feature (3146)..(3162): n is a, c, g, or t
  misc_feature (3165)..(3165): n is a, c, g, or t
  misc_feature (3167)..(3176): n is a, c, g, or t
  misc_feature (3179)..(3180): n is a, c, g, or t
  misc_feature (3183)..(3183): n is a, c, g, or t
  misc_feature (3185)..(3190): n is a, c, g, or t
  misc_feature (3192)..(3199): n is a, c, g, or t
  misc_feature (3201)..(3201): n is a, c, g, or t
  misc_feature (3204)..(3208): n is a, c, g, or t
  misc_feature (3210)..(3212): n is a, c, g, or t
  misc_feature (3214)..(3227): n is a, c, g, or t
  misc_feature (3229)..(3231): n is a, c, g, or t
  misc_feature (3233)..(3256): n is a, c, g, or t
  misc_feature (3258)..(3261): n is a, c, g, or t
  misc_feature (3266)..(3272): n is a, c, g, or t
  misc_feature (3274)..(3294): n is a, c, g, or t
  misc_feature (3298)..(3306): n is a, c, g, or t
  misc_feature (3308)..(3312): n is a, c, g, or t
  misc_feature (3314)..(3318): n is a, c, g, or t
  misc_feature (3320)..(3333): n is a, c, g, or t
  misc_feature (3335)..(3336): n is a, c, g, or t
  misc_feature (3338)..(3340): n is a, c, g, or t
  misc_feature (3342)..(3349): n is a, c, g, or t
  misc_feature (3351)..(3352): n is a, c, g, or t
  misc_feature (3354)..(3354): n is a, c, g, or t
  misc_feature (3356)..(3363): n is a, c, g, or t
  misc_feature (3365)..(3374): n is a, c, g, or t
  misc_feature (3376)..(3379): n is a, c, g, or t
  misc_feature (3381)..(3383): n is a, c, g, or t
  misc_feature (3385)..(3389): n is a, c, g, or t
  misc_feature (3391)..(3403): n is a, c, g, or t
  misc_feature (3405)..(3405): n is a, c, g, or t
  misc_feature (3407)..(3407): n is a, c, g, or t
  misc_feature (3409)..(3409): n is a, c, g, or t
  misc_feature (3411)..(3411): n is a, c, g, or t
  misc_feature (3414)..(3424): n is a, c, g, or t
  misc_feature (3426)..(3430): n is a, c, g, or t
  misc_feature (3433)..(3434): n is a, c, g, or t
  misc_feature (3436)..(3438): n is a, c, g, or t
  misc_feature (3440)..(3440): n is a, c, g, or t
  misc_feature (3442)..(3442): n is a, c, g, or t
  misc_feature (3444)..(3445): n is a, c, g, or t
  misc_feature (3447)..(3454): n is a, c, g, or t
  misc_feature (3456)..(3457): n is a, c, g, or t
  misc_feature (3460)..(3460): n is a, c, g, or t
  misc_feature (3462)..(3462): n is a, c, g, or t
  misc_feature (3464)..(3468): n is a, c, g, or t
  misc_feature (3470)..(3484): n is a, c, g, or t
  misc_feature (3486)..(3486): n is a, c, g, or t
  misc_feature (3489)..(3491): n is a, c, g, or t
  misc_feature (3493)..(3494): n is a, c, g, or t
  misc_feature (3496)..(3500): n is a, c, g, or t
  misc_feature (3502)..(3503): n is a, c, g, or t
  misc_feature (3505)..(3506): n is a, c, g, or t
  misc_feature (3508)..(3513): n is a, c, g, or t
  misc_feature (3515)..(3520): n is a, c, g, or t
  misc_feature (3522)..(3524): n is a, c, g, or t
  misc_feature (3526)..(3532): n is a, c, g, or t
  misc_feature (3534)..(3535): n is a, c, g, or t
  misc_feature (3537)..(3537): n is a, c, g, or t
  misc_feature (3539)..(3544): n is a, c, g, or t
  misc_feature (3546)..(3564): n is a, c, g, or t
  misc_feature (3566)..(3570): n is a, c, g, or t
  misc_feature (3572)..(3582): n is a, c, g, or t
  misc_feature (3584)..(3585): n is a, c, g, or t
  misc_feature (3588)..(3596): n is a, c, g, or t
  misc_feature (3598)..(3599): n is a, c, g, or t
  misc_feature (3602)..(3603): n is a, c, g, or t
  misc_feature (3605)..(3608): n is a, c, g, or t
  misc_feature (3611)..(3624): n is a, c, g, or t
  misc_feature (3626)..(3636): n is a, c, g, or t
  misc_feature (3639)..(3641): n is a, c, g, or t
  misc_feature (3643)..(3645): n is a, c, g, or t
  misc_feature (3647)..(3651): n is a, c, g, or t
  misc_feature (3654)..(3658): n is a, c, g, or t
  misc_feature (3660)..(3675): n is a, c, g, or t
  misc_feature (3677)..(3678): n is a, c, g, or t
  misc_feature (3680)..(3685): n is a, c, g, or t
  misc_feature (3687)..(3693): n is a, c, g, or t
  misc_feature (3695)..(3704): n is a, c, g, or t
  misc_feature (3706)..(3708): n is a, c, g, or t
  misc_feature (3710)..(3715): n is a, c, g, or t
  misc_feature (3717)..(3717): n is a, c, g, or t
  misc_feature (3720)..(3720): n is a, c, g, or t
  misc_feature (3724)..(3728): n is a, c, g, or t
  misc_feature (3730)..(3731): n is a, c, g, or t
  misc_feature (3733)..(3735): n is a, c, g, or t
  misc_feature (3737)..(3744): n is a, c, g, or t
  misc_feature (3747)..(3756): n is a, c, g, or t
  misc_feature (3758)..(3760): n is a, c, g, or t
  misc_feature (3762)..(3765): n is a, c, g, or t
  misc_feature (3767)..(3767): n is a, c, g, or t
  misc_feature (3769)..(3771): n is a, c, g, or t
  misc_feature (3773)..(3774): n is a, c, g, or t
  misc_feature (3776)..(3790): n is a, c, g, or t
  misc_feature (3792)..(3797): n is a, c, g, or t
  misc_feature (3799)..(3813): n is a, c, g, or t
  misc_feature (3815)..(3820): n is a, c, g, or t
  misc_feature (3822)..(3831): n is a, c, g, or t
  misc_feature (3833)..(3837): n is a, c, g, or t
  misc_feature (3839)..(3847): n is a, c, g, or t
  misc_feature (3849)..(3849): n is a, c, g, or t
  misc_feature (3851)..(3859): n is a, c, g, or t
  misc_feature (3861)..(3865): n is a, c, g, or t
  misc_feature (3867)..(3867): n is a, c, g, or t
  misc_feature (3870)..(3876): n is a, c, g, or t
  misc_feature (3878)..(3878): n is a, c, g, or t
  misc_feature (3880)..(3880): n is a, c, g, or t
  misc_feature (3882)..(3884): n is a, c, g, or t
  misc_feature (3886)..(3888): n is a, c, g, or t
  misc_feature (3890)..(3891): n is a, c, g, or t
  misc_feature (3893)..(3898): n is a, c, g, or t
  misc_feature (3900)..(3902): n is a, c, g, or t
  misc_feature (3904)..(3905): n is a, c, g, or t
  misc_feature (3907)..(3907): n is a, c, g, or t
  misc_feature (3909)..(3912): n is a, c, g, or t
  misc_feature (3914)..(3914): n is a, c, g, or t
  misc_feature (3916)..(3916): n is a, c, g, or t
  misc_feature (3918)..(3927): n is a, c, g, or t
  misc_feature (3929)..(3930): n is a, c, g, or t
  misc_feature (3932)..(3949): n is a, c, g, or t
  misc_feature (3952)..(3952): n is a, c, g, or t
  misc_feature (3954)..(3968): n is a, c, g, or t
  misc_feature (3970)..(3976): n is a, c, g, or t
  misc_feature (3978)..(3980): n is a, c, g, or t
  misc_feature (3982)..(3985): n is a, c, g, or t
  misc_feature (3987)..(3990): n is a, c, g, or t
  misc_feature (3993)..(3994): n is a, c, g, or t
  misc_feature (3996)..(4000): n is a, c, g, or t
cgtatacaggaaatagaaaatcctgaattggctcaagaacgaatgaaagaactttatgagcaaaaaggttatcctaaagattggattgataagcgtttaaggggaattgctattagacaaaatctaactgatgaatggaaggaaagaggtattactgagaaaagtgattatgcaatacttacagccgaaatatctaaagcaacttttggcttaactccttctgaatacaaaaagtataagggattgatgaagaagaatcagaatttgcgtgatcatatgtctgacttagaacttatttttacgatgttgggtgagcgtgtaacaacagaaatttctcaaaaagaaaaaccggatacgtttattgagaataagcaggttgcacaaagaggaggaaatgtagctggagttgctcgtgagcaagcggaaaaagaattagggagaagtattgtatctaatcagaattttttgcttggttctgaattggatacaagtgaacctcaattgcctttcgatactgatgacgaataggggataaatgcttaattagaatttaccatgattaaaaagacattttattttggaaatccagtgtatctctcattaaagaatgcacagttagtaattaaacttccggagattgtgaaaaatgagtcattgccagagacatttaaacagcaatcagaagtaactaagccaatagaagatattggaattgttgttttggatcataagcaaattactataacttcgggagtgctagaagcattattagagaataattgtgctgtaataacttgtgattgtaaaagtatgcctgtaggtttaatgcttcctttatatggaaattcaacccaaaatgaaaggtttaggatgcagctggatgcttctcttcctttaaaaaaacagctatggcagcaaacaatgaaagcaaagatagaaaatcaggcttcagtgctatatacttgtaaaaaagaggaagtaaagtgtatgaaagtttgggcgaatgatgtgaaaagtggtgatcctgataatttggaagctcgtgctgccgcttattactggaagtgtatgttttcggacattgaagggttcacacgggaaagagaagggataccacctaataatttattaaattatggctatgcaattcttcgggcaatagtagctcgtgctttggtaacgagtggacttttacctactttgggaattcatcatcataatcgttataatgcttactgtttggcggatgatgtaatggagccttaccgaccgtatgtagatgaacttgtgtattctattgtaaaagggcatgagaactatgatgagttaacaaaagatttaaaaactattttattgaatattccaacgttagaagtaatgataaatgggaaaagaagtccgttgatggttgctgtagcacaaacgacagcttcactttataaatgttttactggagagcttcgtcgtattatttatcctgagaagtaatggatcgttttagtgaatatcgtattatgtggatattagtgctttttgacttgccaacagaaactaaaaaagataaaaaggcttatatcgattttagaaagaatttacagaaagatggttttactatgtttcaattttctatttatgttcgtcattgtgcaagtagtgagaatgctgaggttcatataaaaagaataaaatcatttttgccagaatatggtcaggttggaataatgtgcataactgataagcaatttgagaatattgaactcttttatgggaagaaaatattatctgttaatacaccaggacaacaattagagttattttgaataaaaaatcccgtaagactacgggattttttaatgaatttacagctcattttctttttctatattgtgatctaacttattgaaatacagcggctaatggcgattgtgctgtattcaatggttcaaagatactaatttgaaagcaaatcacaacnnnnnnnnnnnnnnnntnnnnnnnnnnanngctgtattcaatggttcaaagatactaatttgaaagcaaatcacaacnnnnnnnnnnnnnntnnnnttnnnnnnnngctgtattcaatggttcaaagatactaatttgaaagcaaatcacaacnnnnnnnngnnnnnnnnntnnntnannnnnnnnnnntnnanngntnnaannnnnnnanttnnaannnaannnnnannntnnncnnncnnnnacnnnnnnnnnnnnngctgtattcaatggttcaaagatactaatttgaaagcaaatcacaacngnannntnnnnnntnntnnngnnnnnnnnnnnnnnttnaanggttnaaannnnnnaatttnaaannaaannnnaacnnnntnnnntnnttnnnnnnnnttnnnnnnnnnnnnttnaanggttnaaannnnnnaatttnaaannaaannnnaanatnntnnntnnngtnnntannntnngnnnnnnnnntnnnnnnnnnnnaaannnnnnnnttnnaannnaannnnanncnnnnnnnnnncnntcnnnnnnntnnnnnnnnnnnntnnanngntnnaaaannnnnantttnnaannaaannnnannnnnnnnntnnntnnnannntnnnnnntnnnnntntnntnnanngntnaaaaannnnnatttnnaaaananacannnannnngnnnnnnnnnnaantnnnnnntnnnnnnnnnnnantanntnntnnaannnnnnaanttnnnaannnannacannnnnnnnnnnnatntnntnnnnnnnnnnnnnnntttannnnatnnnnnnnnnannnntnnntgnnaannnnnnnnnancntnnanttnnnnanctnnnnnnntnnnnnnntnnanncnatnnntnnaannaanntnanngnaaannnnnnnnnannnnncnnnnnnnannnnnnnnnnnnnnngnnnnnnnnncnnnnnnnnnaannnnnnnnatngnaanncanacnnannnnncnnnnnnnnnanngnntgnnnnnnnnntnttnanncnnngnntnnnnnnnnnnnannnnnaagnnanannnaannnngntnntnnnnnnnnnnntnnnncnnnnnnnnnaancnntnnnnnnnnnntnntnaatnngaannnanncannnnnnntnntttncnntnnnannnnnnnnnnnnnnnnnaancnnnnnnnnnnaannatnannnnnnannnnnnnnanttnnnnngnnntnnnnnnnnnnnnnntnnntnnnnnnnnnnnnnnnnnnnnnnnnannnnaaaannnnnnnannnnnnnnnnnnnnnnnnnnnttgnnnnnnnnnannnnncnnnnntnnnnnnnnnnnnnnanntnnncnnnnnnnnanncngnnnnnnnncnnnnnnnnnnannnncnnntnnnnnannnnnnnnnnnnncnanantnaannnnnnnnnnntnnnnncannannnancngnntnnnnnnnnannggnancnnnnnannnnnnnnnnnnnnnantannnannannnnntnnannannnnnntnnnnnnannngnnnnnnntnnanannnnnntnnnnnnnnnnnnnnnnnnnannnnnannnnnnnnnnngnnaannnnnnnnnannganngnnnnatnnnnnnnnnnnnnnannnnnnnnnnnaannnannntnnnnnaannnnntnnnnnnnnnnnnnnnntnntnnnnnnannnnnnnannnnnnnnnngnnnannnnnncnaanattnnnnnanntnnncnnnnnnnnaannnnnnnnnngnnntnnnnantnnngnntnnnnnnnnnnnnnnnannnnnnannnnnnnnnnnnnnnannnnnnannnnnnnnnntnnnnntnnnnnnnnnanannnnnnnnntnnnnncnaannnnnnnanancnnntnnnanntnnnnnnannntnntncnnnngntnannnnnnnnnntnnannnnnnnnnnnnnnnnnnttnannnnnnnnnnnnnnnannnnnnntnnngnnnntnnnnatnntnnnnn

SEQ ID NO: 166 - DNA, 4000 bp, Escherichia coli
  misc_feature (1196)..(1196): n is a, c, g, or t
  misc_feature (1400)..(1400): n is a, c, g, or t
  misc_feature (3622)..(3622): n is a, c, g, or t
  misc_feature (3663)..(3663): n is a, c, g, or t
  misc_feature (3675)..(3675): n is a, c, g, or t
agaaaaaagaggatcttgtagtgatactgaaacaatcgatgagactcgagtaatgatgacttgtaacctccctttaaatgaaattttggttgattttaatgatcggttaaaaagtgttacccatggctatggttctatggactatgatatggcggattatgttgaatcctctcttgtacgaatggaaattcttgtaaacgccgaaccagtagatgctttttcaactattgtacacaaggataaggccgagaaccggggtagggtgctatgttctaaattaaaggatatcctgcctcgacaattatttaagatcgccctgcaagcatcggtgggagggaaatttattgcccgtgagactatcagtgcaatgcgtaaagatgttacggccaaatgttacggtggggatatctctcgtaaaagaaaattgttagaaaaacaaaaagaaggaaagaagcgaatgaaacagattggtaatgtgaacattcctcaggaagcattcgtgcaaattttgaaaagctcaacctgatcaattatttatgaccgagaaaataaaagcgaaaagatctcagaaaaagggagcgaaagaaattctacgccttgggcaaaaagccctagactacagaagggatatattgagtattgatcaagttacaagattagagtctgcaactagtgagttaaaaaatgttttgggaaataagacaatttatatagacgaactcgaagaaaaagcagaaaaagtagacattgaattaaaagaatctggtggactctactatcacaagaaagggtgggttgaaaatgtggagatgcttatggtggcggccattgtggtgattggaatcagaagcttttttttacagcctttcattattcccactaattcaatgtatccttccttttttggcatgcagcccaacttatatgaagaggaaaatgaggttcctagcttattggaaagaagtatagataaagtcctcttgggggcatcgcattatcgattaaatgttgaaagtgcaggaaatttatatttggttttgcaaaatgggggaagtttccgatttgccgaagccacttttccgaatggtcgattctttctatttcccaatacggttaaagaatatgtttttgaagtgggaggaaaagaacatacactccaagttcctgctgaattcgattttgataccttgatcgcnaaaaaattcgcggggattgagagtttacgtgacctccctttgatcgtaagccaagaccaagggtttaccgggaatagactaaaattatctaatcagaattatcaaaaaggagatatagcaatcgcgtttgatattttattgggagatgccttattcgtggatcgaatgtcttataattttattacgcctaaatcgggagatccngccgttttccgcaccggttcaattgatgaatttaacagaaagattggtacaccggtccgaaattttattggggaagataaatattatattaaacgcttaattggagaacccggtgatcgtttagagatgaaagttcctgactcaatcttcacaaacggaacggatgttcgtaaaggagtacccggagttctttaccgtaatgagaaaccaatttcaggaaaagttgcttttgatgaaaatcgaaaacgtgcagaaagtttatcaaatgatcccaatgccaagaacccgatgaattatcctggttaccgatcagaaggcttactttcgaaccgcgaagttattactgtccctcaaaaagacgatgtaacaaaccctactggatttaatggatattttatgatgggagataattcaactgatagtttagatggtcgtgcttggggatttgtacctgaaaacgaaattattggacgtgcgtttgtcgtttattatccatttacaaagagatggggtttctccaactaatacatccctgtagacattatagcagtatgacatatttcgcacaatatggattatgtctaattgcgtaatctgtgagttcccttaggcatttaccaagttggttagattctcgtagttcgggagtcttactccatgtcacatcattgccaggtgattttgggattgggaatttagggaagtcttcattcgagtttatcgattttttaaatgtggctggatttagattttggcaaatttgtccagtaggtccaactggttatggtgactccccgtaccaagtattttcctcttctgcaggaaacccctatttgattgattggcatgctcttattgatttaaaaatgataaggcttgatgatctaggttcactacagagtaatccggatcatgatgtaaattatggtcatctttatgaacatttttataccgctgcctcaattgccttttctaattttgtgcaaagtggtgaaagtattgaatctaaatacggaaagtttgatctttttattgaagaaaataaaagttggttagagccctactgctgttatcaggccctcaagaagtccgctctgaataagccttggtggcaatgggataagaatgttaggaaatttagtgcatcgattttagagggtttatcgagtgcacagcttgaaacttataatcttcatttatttctccaatatatatttttctcacagtggaaggagttacggacttacgctcacaaaaaagaagttcaaatccttggggatttaccaatctatgttgctccagactcagctgatgtatgggaaaagcctgaactttttcaagtggatacaaacggagcgggattttcgcatgtagcaggagttcctccagactattttaatgaagatggtcaatattggggaaatccactgtacgactggcccgttcacaaggcagacggttaccaatggtggattaagcgtttggagtcgcaattatccctttttgatgtggttcgaattgatcactttaggggatttcatgattattggagtattccggcagatacttcagatgcaaaggcaggtaaatgggagaacggtcctggaattgatttttggaatgtggttgcaaaatatttccctaccctcccctttttagctgaagatttaggtttgatcaccaagggggttcgatctcttcgagaaagcgctggattaccgggaatggcagttttacagtttgcattcgatggcgatcctgaaaatctttatctaccgcataacttatccccggacctcgttctctacacaggtactcatgataatgatactacctgtggttggtatcattcaactgatgatgaaattcgcgggaattttaggagttactttaatattccgggcgatttcccatcttgggatatgttaaggatggcataccgtacgactgctcaattggtgatcattccaatgcaggatttgctcagtctgggttctgaagcacgcctcaatgaaccaggccattcatttggaaattggacatggcgaatgagtccatggcaacttaagaatatttcagttgaatgttctgcatatctaagaaatcaagctgaaatatcaggtagactagcaaagaagagtgtcgcttcgatcgcaaaattatcctagattaatcacttcacaggcttaatttgaaaagactatttccatactttctattantaaagccctattggtttgccttccttattgcattggtatgnggcgtcatttanggagtctcaagtggatttggtctgccttatatgatcgatcaagtctttcctataatatttcctggtgaaaaattggatgtgcggttaagcacatgggaattatttatgtatatttcttggttcccccttgtctttatcattcgcggtacaagtagctattttaattcttactttattaattattgtggaatccgggtacttgagaaaatcagatttcaggtcttcggaaagcttcagcgcctacctatttctttctttcatcgcaatcaggagggtgaccttcttagtcgaatgatctcagacactggtcagttacaggctgcca

SEQ ID NO: 167 - DNA, 4000 bp, Escherichia coli
  misc_feature (791)..(791): n is a, c, g, or t
  misc_feature (2447)..(2447): n is a, c, g, or t
  misc_feature (2461)..(2461): n is a, c, g, or t
  misc_feature (2469)..(2469): n is a, c, g, or t
  misc_feature (2473)..(2473): n is a, c, g, or t
  misc_feature (2477)..(2477): n is a, c, g, or t
  misc_feature (2479)..(2479): n is a, c, g, or t
  misc_feature (2483)..(2483): n is a, c, g, or t
  misc_feature (2490)..(2490): n is a, c, g, or t
  misc_feature (2494)..(2494): n is a, c, g, or t
  misc_feature (2496)..(2496): n is a, c, g, or t
  misc_feature (2506)..(2506): n is a, c, g, or t
  misc_feature (2511)..(2511): n is a, c, g, or t
  misc_feature (2514)..(2514): n is a, c, g, or t
  misc_feature (2516)..(2516): n is a, c, g, or t
  misc_feature (2518)..(2518): n is a, c, g, or t
  misc_feature (2520)..(2520): n is a, c, g, or t
  misc_feature (2526)..(2526): n is a, c, g, or t
  misc_feature (2534)..(2534): n is a, c, g, or t
  misc_feature (2537)..(2538): n is a, c, g, or t
  misc_feature (2540)..(2540): n is a, c, g, or t
  misc_feature (2542)..(2542): n is a, c, g, or t
  misc_feature (2544)..(2544): n is a, c, g, or t
  misc_feature (2546)..(2547): n is a, c, g, or t
  misc_feature (2549)..(2550): n is a, c, g, or t
  misc_feature (2553)..(2553): n is a, c, g, or t
  misc_feature (2555)..(2555): n is a, c, g, or t
  misc_feature (2559)..(2559): n is a, c, g, or t
  misc_feature (2565)..(2565): n is a, c, g, or t
  misc_feature (2569)..(2569): n is a, c, g, or t
  misc_feature (2583)..(2583): n is a, c, g, or t
  misc_feature (2585)..(2586): n is a, c, g, or t
  misc_feature (2590)..(2590): n is a, c, g, or t
  misc_feature (2594)..(2595): n is a, c, g, or t
  misc_feature (2597)..(2597): n is a, c, g, or t
  misc_feature (2603)..(2603): n is a, c, g, or t
  misc_feature (2606)..(2606): n is a, c, g, or t
  misc_feature (2626)..(2626): n is a, c, g, or t
  misc_feature (2629)..(2629): n is a, c, g, or t
  misc_feature (2635)..(2643): n is a, c, g, or t
  misc_feature (2645)..(2645): n is a, c, g, or t
  misc_feature (2647)..(2653): n is a, c, g, or t
  misc_feature (2655)..(2655): n is a, c, g, or t
  misc_feature (2657)..(2657): n is a, c, g, or t
  misc_feature (2660)..(2660): n is a, c, g, or t
  misc_feature (2666)..(2666): n is a, c, g, or t
  misc_feature (2668)..(2668): n is a, c, g, or t
  misc_feature (2671)..(2673): n is a, c, g, or t
  misc_feature (2675)..(2676): n is a, c, g, or t
  misc_feature (2680)..(2683): n is a, c, g, or t
  misc_feature (2685)..(2685): n is a, c, g, or t
  misc_feature (2688)..(2688): n is a, c, g, or t
  misc_feature (2690)..(2691): n is a, c, g, or t
  misc_feature (2694)..(2694): n is a, c, g, or t
  misc_feature (2697)..(2697): n is a, c, g, or t
  misc_feature (2703)..(2705): n is a, c, g, or t
  misc_feature (2707)..(2707): n is a, c, g, or t
  misc_feature (2709)..(2710): n is a, c, g, or t
  misc_feature (2713)..(2713): n is a, c, g, or t
  misc_feature (2715)..(2715): n is a, c, g, or t
  misc_feature (2717)..(2717): n is a, c, g, or t
  misc_feature (2719)..(2721): n is a, c, g, or t
  misc_feature (2723)..(2726): n is a, c, g, or t
  misc_feature (2732)..(2734): n is a, c, g, or t
  misc_feature (2736)..(2738): n is a, c, g, or t
  misc_feature (2742)..(2744): n is a, c, g, or t
  misc_feature (2747)..(2747): n is a, c, g, or t
  misc_feature (2749)..(2750): n is a, c, g, or t
  misc_feature (2753)..(2753): n is a, c, g, or t
  misc_feature (2755)..(2755): n is a, c, g, or t
  misc_feature (2757)..(2757): n is a, c, g, or t
  misc_feature (2764)..(2766): n is a, c, g, or t
  misc_feature (2771)..(2772): n is a, c, g, or t
  misc_feature (2776)..(2777): n is a, c, g, or t
  misc_feature (2780)..(2782): n is a, c, g, or t
  misc_feature (2785)..(2785): n is a, c, g, or t
  misc_feature (2787)..(2788): n is a, c, g, or t
  misc_feature (2790)..(2790): n is a, c, g, or t
  misc_feature (2792)..(2795): n is a, c, g, or t
  misc_feature (2798)..(2800): n is a, c, g, or t
  misc_feature (2802)..(2805): n is a, c, g, or t
  misc_feature (2807)..(2809): n is a, c, g, or t
  misc_feature (2814)..(2816): n is a, c, g, or t
  misc_feature (2821)..(2825): n is a, c, g, or t
  misc_feature (2827)..(2827): n is a, c, g, or t
  misc_feature (2829)..(2833): n is a, c, g, or t
  misc_feature (2837)..(2837): n is a, c, g, or t
  misc_feature (2839)..(2841): n is a, c, g, or t
  misc_feature (2843)..(2845): n is a, c, g, or t
  misc_feature (2847)..(2847): n is a, c, g, or t
  misc_feature (2849)..(2849): n is a, c, g, or t
  misc_feature (2851)..(2853): n is a, c, g, or t
  misc_feature (2856)..(2857): n is a, c, g, or t
  misc_feature (2859)..(2860): n is a, c, g, or t
  misc_feature (2863)..(2863): n is a, c, g, or t
  misc_feature (2867)..(2869): n is a, c, g, or t
  misc_feature (2871)..(2872): n is a, c, g, or t
  misc_feature (2875)..(2876): n is a, c, g, or t
  misc_feature (2879)..(2879): n is a, c, g, or t
  misc_feature (2883)..(2883): n is a, c, g, or t
  misc_feature (2885)..(2885): n is a, c, g, or t
  misc_feature (2887)..(2892): n is a, c, g, or t
  misc_feature (2898)..(2898): n is a, c, g, or t
  misc_feature (2900)..(2900): n is a, c, g, or t
  misc_feature (2902)..(2908): n is a, c, g, or t
  misc_feature (2910)..(2910): n is a, c, g, or t
  misc_feature (2912)..(2912): n is a, c, g, or t
  misc_feature (2916)..(2916): n is a, c, g, or t
  misc_feature (2918)..(2921): n is a, c, g, or t
  misc_feature (2924)..(2924): n is a, c, g, or t
  misc_feature (2931)..(2931): n is a, c, g, or t
  misc_feature (2933)..(2934): n is a, c, g, or t
  misc_feature (2937)..(2938): n is a, c, g, or t
  misc_feature (2941)..(2943): n is a, c, g, or t
  misc_feature (2945)..(2945): n is a, c, g, or t
  misc_feature (2948)..(2950): n is a, c, g, or t
  misc_feature (2952)..(2952): n is a, c, g, or t
  misc_feature (2955)..(2955): n is a, c, g, or t
  misc_feature (2958)..(2964): n is a, c, g, or t
  misc_feature (2966)..(2966): n is a, c, g, or t
  misc_feature (2968)..(2973): n is a, c, g, or t
  misc_feature (2975)..(2976): n is a, c, g, or t
  misc_feature (2980)..(2980): n is a, c, g, or t
  misc_feature (2982)..(2985): n is a, c, g, or t
  misc_feature (2989)..(2994): n is a, c, g, or t
  misc_feature (2996)..(2996): n is a, c, g, or t
  misc_feature (2998)..(2998): n is a, c, g, or t
  misc_feature (3000)..(3000): n is a, c, g, or t
  misc_feature (3002)..(3004): n is a, c, g, or t
  misc_feature (3006)..(3008): n is a, c, g, or t
  misc_feature (3010)..(3013): n is a, c, g, or t
  misc_feature (3017)..(3017): n is a, c, g, or t
  misc_feature (3020)..(3020): n is a, c, g, or t
  misc_feature (3023)..(3023): n is a, c, g, or t
  misc_feature (3029)..(3029): n is a, c, g, or t
  misc_feature (3031)..(3033): n is a, c, g, or t
  misc_feature (3035)..(3039): n is a, c, g, or t
  misc_feature (3041)..(3041): n is a, c, g, or t
  misc_feature (3043)..(3044): n is a, c, g, or t
  misc_feature (3046)..(3049): n is a, c, g, or t
  misc_feature (3051)..(3057): n is a, c, g, or t
  misc_feature (3059)..(3062): n is a, c, g, or t
  misc_feature (3064)..(3067): n is a, c, g, or t
  misc_feature (3070)..(3071): n is a, c, g, or t
  misc_feature (3076)..(3076): n is a, c, g, or t
  misc_feature (3078)..(3079): n is a, c, g, or t
  misc_feature (3081)..(3081): n is a, c, g, or t
  misc_feature (3085)..(3088): n is a, c, g, or t
  misc_feature (3090)..(3090): n is a, c, g, or t
  misc_feature (3092)..(3098): n is a, c, g, or t
  misc_feature (3100)..(3101): n is a, c, g, or t
  misc_feature (3103)..(3103): n is a, c, g, or t
  misc_feature (3105)..(3107): n is a, c, g, or t
  misc_feature (3110)..(3112): n is a, c, g, or t
  misc_feature (3114)..(3116): n is a, c, g, or t
  misc_feature (3121)..(3122): n is a, c, g, or t
  misc_feature (3124)..(3126): n is a, c, g, or t
  misc_feature (3128)..(3130): n is a, c, g, or t
  misc_feature (3133)..(3139): n is a, c, g, or t
  misc_feature (3143)..(3143): n is a, c, g, or t
  misc_feature (3145)..(3145): n is a, c, g, or t
  misc_feature (3148)..(3148): n is a, c, g, or t
  misc_feature (3150)..(3151): n is a, c, g, or t
  misc_feature (3153)..(3156): n is a, c, g, or t
  misc_feature (3158)..(3158): n is a, c, g, or t
  misc_feature (3161)..(3162): n is a, c, g, or t
  misc_feature (3164)..(3164): n is a, c, g, or t
  misc_feature (3168)..(3169): n is a, c, g, or t
  misc_feature (3172)..(3178): n is a, c, g, or t
  misc_feature (3180)..(3182): n is a, c, g, or t
  misc_feature (3186)..(3186): n is a, c, g, or t
  misc_feature (3189)..(3190): n is a, c, g, or t
  misc_feature (3193)..(3195): n is a, c, g, or t
  misc_feature (3197)..(3198): n is a, c, g, or t
  misc_feature (3200)..(3202): n is a, c, g, or t
  misc_feature (3204)..(3208): n is a, c, g, or t
  misc_feature (3210)..(3210): n is a, c, g, or t
  misc_feature (3212)..(3216): n is a, c, g, or t
  misc_feature (3218)..(3218): n is a, c, g, or t
  misc_feature (3220)..(3222): n is a, c, g, or t
  misc_feature (3225)..(3226): n is a, c, g, or t
  misc_feature (3228)..(3231): n is a, c, g, or t
  misc_feature (3235)..(3238): n is a, c, g, or t
  misc_feature (3240)..(3240): n is a, c, g, or t
  misc_feature (3243)..(3250): n is a, c, g, or t
  misc_feature (3253)..(3256): n is a, c, g, or t
  misc_feature (3259)..(3260): n is a, c, g, or t
  misc_feature (3262)..(3262): n is a, c, g, or t
  misc_feature (3264)..(3265): n is a, c, g, or t
  misc_feature (3267)..(3268): n is a, c, g, or t
  misc_feature (3270)..(3272): n is a, c, g, or t
  misc_feature (3275)..(3275): n is a, c, g, or t
  misc_feature (3278)..(3279): n is a, c, g, or t
  misc_feature (3281)..(3282): n is a, c, g, or t
  misc_feature (3284)..(3287): n is a, c, g, or t
  misc_feature (3289)..(3289): n is a, c, g, or t
  misc_feature (3291)..(3291): n is a, c, g, or t
  misc_feature (3294)..(3294): n is a, c, g, or t
  misc_feature (3298)..(3299): n is a, c, g, or t
  misc_feature (3303)..(3303): n is a, c, g, or t
  misc_feature (3305)..(3305): n is a, c, g, or t
  misc_feature (3307)..(3307): n is a, c, g, or t
  misc_feature (3309)..(3311): n is a, c, g, or t
  misc_feature (3313)..(3315): n is a, c, g, or t
  misc_feature (3319)..(3321): n is a, c, g, or t
  misc_feature (3323)..(3324): n is a, c, g, or t
  misc_feature (3327)..(3327): n is a, c, g, or t
  misc_feature (3330)..(3330): n is a, c, g, or t
  misc_feature (3332)..(3337): n is a, c, g, or t
  misc_feature (3344)..(3346): n is a, c, g, or t
  misc_feature (3348)..(3350): n is a, c, g, or t
  misc_feature (3352)..(3352): n is a, c, g, or t
  misc_feature (3360)..(3361): n is a, c, g, or t
  misc_feature (3363)..(3363): n is a, c, g, or t
  misc_feature (3367)..(3369): n is a, c, g, or t
  misc_feature (3373)..(3374): n is a, c, g, or t
  misc_feature (3381)..(3381): n is a, c, g, or t
  misc_feature (3385)..(3389): n is a, c, g, or t
  misc_feature (3391)..(3394): n is a, c, g, or t
  misc_feature (3396)..(3396): n is a, c, g, or t
  misc_feature (3400)..(3400): n is a, c, g, or t
  misc_feature (3409)..(3411): n is a, c, g, or t
  misc_feature (3414)..(3414): n is a, c, g, or t
  misc_feature (3418)..(3419): n is a, c, g, or t
  misc_feature (3421)..(3421): n is a, c, g, or t
  misc_feature (3423)..(3423): n is a, c, g, or t
  misc_feature (3426)..(3427): n is a, c, g, or t
  misc_feature (3430)..(3430): n is a, c, g, or t
  misc_feature (3433)..(3433): n is a, c, g, or t
  misc_feature (3435)..(3435): n is a, c, g, or t
  misc_feature (3438)..(3441): n is a, c, g, or t
  misc_feature (3444)..(3445): n is a, c, g, or t
  misc_feature (3450)..(3450): n is a, c, g, or t
  misc_feature (3452)..(3453): n is a, c, g, or t
  misc_feature (3455)..(3459): n is a, c, g, or t
  misc_feature (3462)..(3462): n is a, c, g, or t
  misc_feature (3464)..(3465): n is a, c, g, or t
  misc_feature (3467)..(3468): n is a, c, g, or t
  misc_feature (3471)..(3473): n is a, c, g, or t
  misc_feature (3475)..(3475): n is a, c, g, or t
  misc_feature (3478)..(3478): n is a, c, g, or t
  misc_feature (3482)..(3483): n is a, c, g, or t
  misc_feature (3486)..(3486): n is a, c, g, or t
  misc_feature (3490)..(3492): n is a, c, g, or t
  misc_feature (3494)..(3495): n is a, c, g, or t
  misc_feature (3497)..(3498): n is a, c, g, or t
  misc_feature (3502)..(3502): n is a, c, g, or t
  misc_feature (3506)..(3508): n is a, c, g, or t
  misc_feature (3512)..(3515): n is a, c, g, or t
  misc_feature (3519)..(3519): n is a, c, g, or t
  misc_feature (3521)..(3523): n is a, c, g, or t
  misc_feature (3527)..(3534): n is a, c, g, or t
  misc_feature (3536)..(3537): n is a, c, g, or t
  misc_feature (3539)..(3539): n is a, c, g, or t
  misc_feature (3541)..(3541): n is a, c, g, or t
  misc_feature (3544)..(3544): n is a, c, g, or t
  misc_feature (3548)..(3550): n is a, c, g, or t
  misc_feature (3557)..(3559): n is a, c, g, or t
  misc_feature (3561)..(3563): n is a, c, g, or t
  misc_feature (3565)..(3566): n is a, c, g, or t
  misc_feature (3570)..(3570): n is a, c, g, or t
  misc_feature (3572)..(3572): n is a, c, g, or t
  misc_feature (3574)..(3574): n is a, c, g, or t
  misc_feature (3576)..(3578): n is a, c, g, or t
  misc_feature (3580)..(3582): n is a, c, g, or t
  misc_feature (3586)..(3587): n is a, c, g, or t
  misc_feature (3591)..(3591): n is a, c, g, or t
  misc_feature (3595)..(3598): n is a, c, g, or t
  misc_feature (3600)..(3601): n is a, c, g, or t
  misc_feature (3610)..(3610): n is a, c, g, or t
  misc_feature (3612)..(3615): n is a, c, g, or t
  misc_feature (3619)..(3623): n is a, c, g, or t
  misc_feature (3625)..(3625): n is a, c, g, or t
  misc_feature (3627)..(3627): n is a, c, g, or t
  misc_feature (3629)..(3629): n is a, c, g, or t
  misc_feature (3631)..(3631): n is a, c, g, or t
  misc_feature (3633)..(3633): n is a, c, g, or t
  misc_feature (3637)..(3637): n is a, c, g, or t
  misc_feature (3639)..(3641): n is a, c, g, or t
  misc_feature (3645)..(3645): n is a, c, g, or t
  misc_feature (3648)..(3648): n is a, c, g, or t
  misc_feature (3650)..(3652): n is a, c, g, or t
  misc_feature (3659)..(3659): n is a, c, g, or t
  misc_feature (3665)..(3665): n is a, c, g, or t
  misc_feature (3667)..(3667): n is a, c, g, or t
  misc_feature (3671)..(3671): n is a, c, g, or t
  misc_feature (3678)..(3684): n is a, c, g, or t
  misc_feature (3686)..(3686): n is a, c, g, or t
  misc_feature (3688)..(3688): n is a, c, g, or t
  misc_feature (3690)..(3690): n is a, c, g, or t
  misc_feature (3693)..(3693): n is a, c, g, or t
  misc_feature (3698)..(3698): n is a, c, g, or t
  misc_feature (3701)..(3702): n is a, c, g, or t
  misc_feature (3704)..(3704): n is a, c, g, or t
  misc_feature (3706)..(3710): n is a, c, g, or t
  misc_feature (3715)..(3716): n is a, c, g, or t
  misc_feature (3719)..(3722): n is a, c, g, or t
  misc_feature (3724)..(3724): n is a, c, g, or t
  misc_feature (3726)..(3726): n is a, c, g, or t
  misc_feature (3728)..(3729): n is a, c, g, or t
  misc_feature (3732)..(3732): n is a, c, g, or t
  misc_feature (3735)..(3735): n is a, c, g, or t
  misc_feature (3737)..(3737): n is a, c, g, or t
  misc_feature (3739)..(3740): n is a, c, g, or t
  misc_feature (3742)..(3742): n is a, c, g, or t
  misc_feature (3745)..(3746): n is a, c, g, or t
  misc_feature (3748)..(3748): n is a, c, g, or t
  misc_feature (3751)..(3751): n is a, c, g, or t
  misc_feature (3753)..(3753): n is a, c, g, or t
  misc_feature (3756)..(3756): n is a, c, g, or t
  misc_feature (3758)..(3758): n is a, c, g, or t
  misc_feature (3761)..(3765): n is a, c, g, or t
  misc_feature (3769)..(3770): n is a, c, g, or t
  misc_feature (3772)..(3774): n is a, c, g, or t
  misc_feature (3776)..(3776): n is a, c, g, or t
  misc_feature (3784)..(3785): n is a, c, g, or t
  misc_feature (3788)..(3788): n is a, c, g, or t
  misc_feature (3790)..(3795): n is a, c, g, or t
  misc_feature (3798)..(3798): n is a, c, g, or t
  misc_feature (3800)..(3800): n is a, c, g, or t
  misc_feature (3802)..(3804): n is a, c, g, or t
  misc_feature (3806)..(3806): n is a, c, g, or t
  misc_feature (3808)..(3808): n is a, c, g, or t
  misc_feature (3810)..(3815): n is a, c, g, or t
  misc_feature (3818)..(3818): n is a, c, g, or t
  misc_feature (3820)..(3820): n is a, c, g, or t
  misc_feature (3825)..(3827): n is a, c, g, or t
  misc_feature (3829)..(3829): n is a, c, g, or t
  misc_feature (3834)..(3834): n is a, c, g, or t
  misc_feature (3837)..(3837): n is a, c, g, or t
  misc_feature (3839)..(3839): n is a, c, g, or t
  misc_feature (3841)..(3841): n is a, c, g, or t
  misc_feature (3844)..(3845): n is a, c, g, or t
  misc_feature (3848)..(3848): n is a, c, g, or t
  misc_feature (3850)..(3852): n is a, c, g, or t
  misc_feature (3855)..(3855): n is a, c, g, or t
  misc_feature (3857)..(3857): n is a, c, g, or t
  misc_feature (3859)..(3859): n is a, c, g, or t
  misc_feature (3865)..(3865): n is a, c, g, or t
  misc_feature (3867)..(3867): n is a, c, g, or t
  misc_feature (3869)..(3869): n is a, c, g, or t
  misc_feature (3877)..(3877): n is a, c, g, or t
  misc_feature (3879)..(3880): n is a, c, g, or t
  misc_feature (3886)..(3886): n is a, c, g, or t
  misc_feature (3888)..(3888): n is a, c, g, or t
  misc_feature (3890)..(3890): n is a, c, g, or t
  misc_feature (3892)..(3892): n is a, c, g, or t
  misc_feature (3894)..(3895): n is a, c, g, or t
  misc_feature (3901)..(3901): n is a, c, g, or t
  misc_feature (3904)..(3904): n is a, c, g, or t
  misc_feature (3912)..(3912): n is a, c, g, or t
  misc_feature (3915)..(3916): n is a, c, g, or t
  misc_feature (3919)..(3919): n is a, c, g, or t
  misc_feature (3926)..(3927): n is a, c, g, or t
  misc_feature (3939)..(3942): n is a, c, g, or t
  misc_feature (3945)..(3945): n is a, c, g, or t
  misc_feature (3947)..(3949): n is a, c, g, or t
  misc_feature (3951)..(3951): n is a, c, g, or t
  misc_feature (3954)..(3963): n is a, c, g, or t
  misc_feature (3967)..(3967): n is a, c, g, or t
  misc_feature (3969)..(3971): n is a, c, g, or t
  misc_feature (3977)..(3977): n is a, c, g, or t
  misc_feature (3980)..(3980): n is a, c, g, or t
  misc_feature (3982)..(3982): n is a, c, g, or t
  misc_feature (3985)..(3985): n is a, c, g, or t
  misc_feature (3987)..(3991): n is a, c, g, or t
  misc_feature (3993)..(3993): n is a, c, g, or t
  misc_feature (3995)..(3995): n is a, c, g, or t
  misc_feature (3997)..(4000): n is a, c, g, or t
tcgcagttaagcatgcttatgccattgcactaacctcatgatttccgaccatgattagcataccttcgtgctcctccgttactctttgggaggagaccgccccagtcaaactacccaccacacagtgtcctcgatccggattacggacctgagttagaacctcaaacataccagggtggtatttcaaggatggctccactaagacttgcgtcccagtttcaaagcctcccacctatcctacacaaataggttcaaagttcactgtgaagctatagtaaaggttcacggggtctttccgtctagccgcggatacactgcatcttaacagcgatttcaatttcactgagtctcgggtggagacagtgtggccgtcgttacgccattcgtgcaggtcggaacttacccgacaaggaatttcgctaccttaggaccgttatagttacggccgccgtttaccggggcttcgatcaagagcttcgccgaagctaaccccatcaattaaccttccggcaccgggcaggcgtcacaccgtatacgtccactttcgtgtttgcacagtgctgtgtttttaataaacagtcgcagccacctggtatcttcggccgccaacagcttagggagcaagtcccatcaccatcagcggcgtaccttctcccgaagttacggtaccattttgcctagttccttcacccgagttctctcaagcgccttggtattctctacctgaccacctgtgtcggtttggggtacggtcactcaatacctgatgcttagaagcttttcctggaagnatggcatcaaccacttcagtcctaatggacctcgtcatcacgcctcagccttaagggagtccggatttacctaaactcccagcctacacgcttaaacacggacaaccaacgccgtgctggactagccttctccgtccctccttcgcaatattgagtggtgcaggaatattaacctgcttcccatcgactacgctcttcagcctcgccttaggggccgactcaccctaccctgattagcattggataggaaaccttggtcttccggcgggggagcttttcactccccttatcgttactcatgtcagcattcgcacttctgatacctccaggatgcctctcagctttcccttcaacggcctacagaacgctcctctaccacgcatgcaagcatgcgtccgtagcttcggtggtatgtttgagccccgttatatcttccgcgcaggccgattcgactagtgagctattacgctttctttaaaggatggctgcttctaagccaacctcctagctgtctaaaccttcccacatcgtttcccacttaacatacactttgggaccttagctgacggtctgggttgtttccctttccacgacggacgttagcacccgccgtgtgtctcccgtgattgcactcattggtattcggagtttgcatcgggttggtaagtcgggatgaccccctagccgaaacagtgctctacccccaatggtgagacacgaggcgctacctaaatagctttcgaggagaaccagctatctccgggcttgattagcctttcactccgacccacagctcatccccgcatttttcaacatacgtgggttcggtcctccagttgatgttactcaaccttcaacctggccatgggtagatcgcccggtttcgggtctaatcctagcaactatacgccctattaagactcggtttccctacgcctcccctattcggttaagcttgctactaaaattaagtcgctgacccattatacaaaaggtacgcagtcaccgaataaatcggctcccactgcttgtacgtacacggtttcaggatctatttcactcccctcacaggggttcttttcgcctttccctcacggtactggttcactatcggtcagtcaggagtatttagccttggaggatggtccccccatgttcagtcaagatttctcgtgtcccgacctactcgttttcacctaaaatgccttttcgcgtacggggctatcacccactatggcgtaactttccagctacttccgctaaaacataataaacttaagggctaatccccgttcgctcgccgctactaggggaatctcaattgatttcttttcctcggggtacttagatgtttcagttctcccggttcgcctcttatacctatgtattcagtataagatacccagcttacgctgggtgggtttccccattcggatatctctggatcataggttgtttaccaccttcccaaagcttttcgcaggttaccacgtccttcatcgcctctgactgcctaggcatccaccgtgcacgcttattcacttgaccatataacccaaaagggtcgcagtaattctgacaaattaccttcaatcaaatttacgataaaccctatcactagggccttcggataagtcgctcgataaaacacatatnagttaattagaaantgaataantaantgtntnttanctaaacnttgntncaacgtgatngctanaanangntncaacgnttggtttnaanncnancncnngnnacnangtgnttaaanactnattaacttcatggntnngggncaanncnttaatnganatcacaaatccatttttttnaanagcagnnnnnnnnnangnnnnnnngncnttnaccatnanggnnnanntacnnnngnccncnntcnttnatcaannnantnnttntnancnnntnnnnggtggnnntnnntttnnngangnnatncngncccaggnnnccctnnggcnnccnnnttncnncntnnnnccnnncnnnnannncaaannngtgannnnncncnnnnnggtnannntnnncncntnnnttnnannccnctcnnntnntgnnacnggcngngnnnnnnaggccngngnnnnnnntnancgcnannnnctnattcgcnannacnngcnnntncgnnntnacnaannnnnnntncnnnnnncnntccngnnnncgannnnnntncngngnnngnnncnnnntcgnggnttngcaacncnnngnnnnntncnntnnnncnnnnnnntnnnncnnnncannagggncnngntgannnnangnnnnnnncnncntnnnccnnntnnncaccnncnnncnnnttnnnnnnnccancnttntnngnnnncnaannangacnnggnnnnnnntnnntacnggnnttnnncnnannncnnnnnanannnnntnannncanncnnnnagcnnnngncannnnnnnnccnnnngcnncnanntnncnnnagnaanntnncnnnntntnaanaccnngtangntntnnngnnntgcnnngnnttnaancnnnnnntccaccnnntnnncnggcccccnncnattnnnttgnnttttaancttnnnnncnnnntncccnggcggtctnnntancgcnntngnttnnccnctnanggnnnnagnnccccnanngnnnnnagncnncnnttnnngngtngacnnccngggnnncnnannctgnttgnnncccnnnntttngnnnctcnnnnnnnntnncnanccngggnnncgccttnnncnnngnngttncntncnnnannnacgnntttnaccnnnncnnaggaaattncnnnncccnnnnntntncncnantttncnnntttnggntnnnattcctnggttgngnccanggctttnnnnnnncncntnacnaaccnccnncncnnnnnttacnnccnnnnantncnnttnacncntnnanccnncntantnccncngcnnnnngcanngnnntngccggtgnntcntnnnnnngtnangnnncngngnnnnnntantnaacannntnctttnctncncnctnnaantnnnttncnanccgaangncntcttcacncnngcggcntngntncnncagggnttnccccattntgnnatnttccccnntgctgcctcccnnnngantnnngnccnnnnnnnnnntccngnnnggctgntcntnctntnnnnncngntnnnn

SEQ ID NO: 168 - DNA, 4000 bp, Escherichia coli
  misc_feature (1357)..(1357): n is a, c, g, or t
  misc_feature (2863)..(2864): n is a, c, g, or t
  misc_feature (2867)..(2868): n is a, c, g, or t
  misc_feature (2874)..(2874): n is a, c, g, or t
  misc_feature (2876)..(2877): n is a, c, g, or t
  misc_feature (2883)..(2883): n is a, c, g, or t
  misc_feature (2887)..(2888): n is a, c, g, or t
  misc_feature (2890)..(2894): n is a, c, g, or t
  misc_feature (2896)..(2897): n is a, c, g, or t
  misc_feature (2899)..(2901): n is a, c, g, or t
  misc_feature (2906)..(2908): n is a, c, g, or t
  misc_feature (2910)..(2911): n is a, c, g, or t
  misc_feature (2913)..(2913): n is a, c, g, or t
  misc_feature (2915)..(2922): n is a, c, g, or t
  misc_feature (2929)..(2929): n is a, c, g, or t
  misc_feature (2931)..(2932): n is a, c, g, or t
  misc_feature (2934)..(2937): n is a, c, g, or t
  misc_feature (2939)..(2939): n is a, c, g, or t
  misc_feature (2941)..(2942): n is a, c, g, or t
  misc_feature (2944)..(2947): n is a, c, g, or t
  misc_feature (2949)..(2949): n is a, c, g, or t
  misc_feature (2952)..(2955): n is a, c, g, or t
  misc_feature (2957)..(2957): n is a, c, g, or t
  misc_feature (2959)..(2959): n is a, c, g, or t
  misc_feature (2963)..(2964): n is a, c, g, or t
  misc_feature (2970)..(2970): n is a, c, g, or t
  misc_feature (2975)..(2980): n is a, c, g, or t
  misc_feature (2982)..(2984): n is a, c, g, or t
  misc_feature (2987)..(2988): n is a, c, g, or t
  misc_feature (2990)..(2992): n is a, c, g, or t
  misc_feature (2994)..(2996): n is a, c, g, or t
  misc_feature (2998)..(2998): n is a, c, g, or t
  misc_feature (3001)..(3001): n is a, c, g, or t
  misc_feature (3003)..(3003): n is a, c, g, or t
  misc_feature (3006)..(3009): n is a, c, g, or t
  misc_feature (3016)..(3020): n is a, c, g, or t
  misc_feature (3024)..(3025): n is a, c, g, or t
  misc_feature (3028)..(3031): n is a, c, g, or t
  misc_feature (3034)..(3034): n is a, c, g, or t
  misc_feature (3038)..(3040): n is a, c, g, or t
  misc_feature (3043)..(3047): n is a, c, g, or t
  misc_feature (3049)..(3049): n is a, c, g, or t
  misc_feature (3052)..(3054): n is a, c, g, or t
  misc_feature (3057)..(3057): n is a, c, g, or t
  misc_feature (3059)..(3060): n is a, c, g, or t
  misc_feature (3062)..(3062): n is a, c, g, or t
  misc_feature (3064)..(3064): n is a, c, g, or t
  misc_feature (3067)..(3071): n is a, c, g, or t
  misc_feature (3074)..(3075): n is a, c, g, or t
  misc_feature (3079)..(3080): n is a, c, g, or t
  misc_feature (3083)..(3083): n is a, c, g, or t
  misc_feature (3086)..(3087): n is a, c, g, or t
  misc_feature (3089)..(3090): n is a, c, g, or t
  misc_feature (3093)..(3095): n is a, c, g, or t
  misc_feature (3097)..(3097): n is a, c, g, or t
  misc_feature (3100)..(3102): n is a, c, g, or t
  misc_feature (3106)..(3107): n is a, c, g, or t
  misc_feature (3109)..(3115): n is a, c, g, or t
  misc_feature (3117)..(3121): n is a, c, g, or t
  misc_feature (3123)..(3123): n is a, c, g, or t
  misc_feature (3125)..(3125): n is a, c, g, or t
  misc_feature (3128)..(3131): n is a, c, g, or t
  misc_feature (3135)..(3137): n is a, c, g, or t
  misc_feature (3142)..(3142): n is a, c, g, or t
  misc_feature (3145)..(3146): n is a, c, g, or t
  misc_feature (3150)..(3150): n is a, c, g, or t
  misc_feature (3152)..(3153): n is a, c, g, or t
  misc_feature (3155)..(3156): n is a, c, g, or t
  misc_feature (3158)..(3158): n is a, c, g, or t
  misc_feature (3160)..(3160): n is a, c, g, or t
  misc_feature (3165)..(3166): n is a, c, g, or t
  misc_feature (3168)..(3168): n is a, c, g, or t
  misc_feature (3170)..(3170): n is a, c, g, or t
  misc_feature (3176)..(3179): n is a, c, g, or t
  misc_feature (3182)..(3182): n is a, c, g, or t
agccgccacgacttcgaggggcccgcccgcgacggcttcgccgaatggccgatcacctacgacgaactcgccccgtggtacagccacgtcgagcgcttcgtcgggatcagcgggaaccgcgatggcgtcgagggtctgcccgacggcgagttcctcccggcgtgggagatgaatgacgccgagcgctcgatggccgggcgcatcgaggacgcgttccccggccgccgcgtcgtgcagggccgctgcgcccaccttaccgaggcccgcccggaacacctcgcgcagggccgcggccggtgccagtcccgcaacctctgctaccgcggctgcccgttcggcggctacttctcctccaattcctccaccctgccttgggccgcgcgcaccgggaacctcaccgtccgccccggctccgtcgtcgagtccatcctccacgacgacgccaccggccgcgcgtcgggggtccgggtgatcgacgccgcgaccaaggccgtgaccgagtacttcgcgaaggtgatcttcgtgaacgcggcctgcctcaacacgaacctgattttgctgaactcgaggtcgcgccggtaccccgcgggcctcggcaacgaccacgggctgctcggccgccacgtggccttccacaactaccgcggcagcctcaacgcttcgctcgaaggcttcgccgattcctattactccggccgccggcccacccagccgatgatgcccaacttccgcaacgtcacgcggcaggagacggatttccagcgcggatatatggtgttcttcagcgcgtcccgccgcggctggacccgcggccaaggcgcgcccgggatcggggccgcctacaaggaggagctgactcttcctggcccttggggcatctatatgatgatgcagggcgagaccatcccgcggtacgagaaccacgtgcggctctccaccgaccagcgtgacccgttcggcattccgcaattggtcacctccatcggctacaccgagaatgacgagcggatgatccgcgatttcctcgcgcagggccgcgcgatgcttgaggcggccggcgcccgcgacatccgcgcgaccgatgaccgccgcaacccggggttggatatccacgagatgggtggcgcgaggatgggccgcgacccgcggacctcgctgctcaaccgctggaaccagttccatacctgcccgaacgtgttcgtcaccgatggcgccgcgatggcctcgacgggcgtgcagaatccgtccctcacctttatggcgctcactgcccgggccgcccggcacgccgtcgaggagctgcggaaaggcaccctgtgaaccgtcgcaccctgcttcgccacgccgcccagctcgnggccgccgccgcgctcggctccctgccccaccggggctggtccgcgctgccgcgccccgacggctggagcgcggccgaggaggcgctgctcgacgccatcggcgaaaccattctgcccgccaccccgggttccccgggggcgggttcggtcgcgatcgggcgcttcattttgcggatgaccgccgactgccatccgcccgccgcggcggacgcggtgcggcgactgctgggtgaggtggcgagccgcgctcaagcggcgggggcccgcccgttcccggagctcccagccgccgagcaggagcgcctactcgtggccttggagcgccagccgccgtccgcccgtgccggggtggccccgtggcggcacgtgaaggacctgacgttgctggggtatttcacggccgaggcgggcgcgacccgggccctgcgctacgatccggtgcccggggcctaccgcggctcggttcccctgcgtcccggcgaccgcgcctgggcgacctgaggccgcggctccggcgccaattggtgaataaccggtgaataaggttggactcaacttattcaccgttccgggctgtggagcgaatgcgaggaactcctgctttcatttcggcccggcgcgcgcatgttcgagacgttccttgatagaacagtcgcagtgcaacggcctgaaaaacgccgttgagagcacgactgggatattcccgggcaaccggggaatggatggcggcaactggtgccgccctcccctcggcgcgacgcgagtcgcgcccaggcatatatcaccagttcctctggccggagtcgtgtccggtcagtccacgcacgaatcaggaactgtgcggcgaggcgtgattagaaaccacgcccagccgagtcaggtccgcgggaagtttcgaaccgcggattcacgcagtcaccccagagggtatcggttgctactgcgccgaccagaacgccagcgcctcacccggcgggaccaccccgccagaaggccctgtccccacgcggggaaagggcgcgcaagggaggggcgaaggcggggagcgcacggacccggcaaagtccgtacacctcctccgggagcggggccgcaaaacggcgtcactcccctgcaaacgcgaaacgcaacctgagaggcaagaggtcagacccgtaacacggggccaacggccggctaaaccccggcgccgtccccgtggtcacggtgccgacgtgtagcccttcgcaggcgcgtcagcaccacgtccggcgcgaagcccccggcagggggcgtccgaaccgggcgcagaggcctcactcaacaaatctcggccggagacggccgagacggtcccgccatgagaccgaaattccgcctgccgcggagagtggcgtcgggaaacacaccgcccgcgaaagcgagagcgcccaagcgtgtgtgatcgggaaagagcgcgtggcgaacgcccactcccacataagccccggagaccgaaaggtttccggggctttttgttggccggnnagnncgcccngnnccccgncccnncnnnnncnngnnncgcgnnncnncngnnnnnnnncagcccngnncnnnncnanncnnnngnctnnnngncnatannccctgnctccnnnnnncnnngcnngnnncnnntnccnanctnnnnccttcgnnnnncctnnggnnnnccntcannnttnnnnncnttnnngcncnntncnccnnnnngcnnccgnnggnttnncnnagnnncnccnnngganntnnnnnnnannnnngnanggnnnngccnnncaagngcnnccangnngnngncnagccnncncnccgggnnnnaangcgcggacgggttccgggtggcgtctatggacgccacgcacagctccgatccgccgatcaaccctttaagccttttgcggctcccctccgttgccggagcgattcgtgcggtatgggacccgtatcgcttcgcccggggcggcgcgcccaccttcgctaaagctacggcgggcgggcccccggctacatcgaaccgcggccggtccagtctgccgttcattccggactcaagcggcttggtgtggctggggcgcgtcgccccggtgatggcggacgaatagcatttccgcacagccatccgctctccggatcccgtccccggcgcctatgggcgccacgcccagctccgatccgccgatcgaccctctgagccttttgcggccatcgcctccggtcttttcgaggttttcaggcgaccgcggcggatcgcaccgccgcatccgaaaactggatgctcacccgcgcgccgccggccggggaacgcgcggtccgcaggcgccagccctgcgtctcgcacagccggcgggccagcgcgagtcccagcccgtaaccccgcggccgcacctcctcgccggcatccgggaaacccgggccctcatcgtcgaccgtgagggtggcgtcctccgaccaggccaccgtgaccccgccctcgggcgcgtgctggagggcgttgcccaccaggttatgcaccagcatcaggagaacctcgcgatcggccaggacgcgcgagtccggcggaatcgcgaccgtgaggatccgcgccggatccggccggatggcccgttgatcctcgatcgcctcctccgcaaccgcgcgca

SEQ ID NO: 169 - DNA, 4000 bp, Escherichia coli
  misc_feature (1)..(389): n is a, c, g, or t
  misc_feature (391)..(596): n is a, c, g, or t
  misc_feature (598)..(602): n is a, c, g, or t
  misc_feature (604)..(620): n is a, c, g, or t
  misc_feature (622)..(624): n is a, c, g, or t
  misc_feature (626)..(627): n is a, c, g, or t
  misc_feature (629)..(638): n is a, c, g, or t
  misc_feature (640)..(651): n is a, c, g, or t
  misc_feature (653)..(666): n is a, c, g, or t
  misc_feature (668)..(669): n is a, c, g, or t
  misc_feature (674)..(681): n is a, c, g, or t
  misc_feature (683)..(692): n is a, c, g, or t
  misc_feature (694)..(701): n is a, c, g, or t
  misc_feature (703)..(705): n is a, c, g, or t
  misc_feature (707)..(722): n is a, c, g, or t
  misc_feature (725)..(770): n is a, c, g, or t
  misc_feature (772)..(773): n is a, c, g, or t
  misc_feature (775)..(830): n is a, c, g, or t
  misc_feature (832)..(835): n is a, c, g, or t
  misc_feature (837)..(870): n is a, c, g, or t
  misc_feature (872)..(901): n is a, c, g, or t
  misc_feature (903)..(947): n is a, c, g, or t
  misc_feature (949)..(950): n is a, c, g, or t
  misc_feature (953)..(954): n is a, c, g, or t
  misc_feature (957)..(960): n is a, c, g, or t
  misc_feature (964)..(965): n is a, c, g, or t
  misc_feature (968)..(969): n is a, c, g, or t
  misc_feature (972)..(976): n is a, c, g, or t
  misc_feature (978)..(978): n is a, c, g, or t
  misc_feature (980)..(983): n is a, c, g, or t
  misc_feature (985)..(986): n is a, c, g, or t
  misc_feature (988)..(990): n is a, c, g, or t
  misc_feature (992)..(993): n is a, c, g, or t
  misc_feature (995)..(997): n is a, c, g, or t
  misc_feature (999)..(1005): n is a, c, g, or t
  misc_feature (1007)..(1011): n is a, c, g, or t
  misc_feature (1014)..(1015): n is a, c, g, or t
  misc_feature (1019)..(1019): n is a, c, g, or t
  misc_feature (1021)..(1023): n is a, c, g, or t
  misc_feature (1025)..(1028): n is a, c, g, or t
  misc_feature (1030)..(1030): n is a, c, g, or t
  misc_feature (1033)..(1036): n is a, c, g, or t
  misc_feature (1038)..(1039): n is a, c, g, or t
  misc_feature (1042)..(1042): n is a, c, g, or t
  misc_feature (1044)..(1044): n is a, c, g, or t
  misc_feature (1046)..(1046): n is a, c, g, or t
  misc_feature (1051)..(1052): n is a, c, g, or t
  misc_feature (1057)..(1057): n is a, c, g, or t
  misc_feature (1061)..(1062): n is a, c, g, or t
  misc_feature (1064)..(1064): n is a, c, g, or t
  misc_feature (1068)..(1069): n is a, c, g, or t
  misc_feature (1072)..(1072): n is a, c, g, or t
  misc_feature (1074)..(1074): n is a, c, g, or t
  misc_feature (1076)..(1079): n is a, c, g, or t
  misc_feature (1081)..(1084): n is a, c, g, or t
  misc_feature (1090)..(1092): n is a, c, g, or t
  misc_feature (1095)..(1107): n is a, c, g, or t
  misc_feature (1111)..(1117): n is a, c, g, or t
  misc_feature (1119)..(1120): n is a, c, g, or t
  misc_feature (1122)..(1122): n is a, c, g, or t
  misc_feature (1124)..(1125): n is a, c, g, or t
  misc_feature (1127)..(1127): n is a, c, g, or t
  misc_feature (1129)..(1131): n is a, c, g, or t
  misc_feature (1133)..(1133): n is a, c, g, or t
  misc_feature (1135)..(1144): n is a, c, g, or t
  misc_feature (1146)..(1146): n is a, c, g, or t
  misc_feature (1149)..(1149): n is a, c, g, or t
  misc_feature (1152)..(1153): n is a, c, g, or t
  misc_feature (1155)..(1159): n is a, c, g, or t
  misc_feature (1161)..(1163): n is a, c, g, or t
  misc_feature (1167)..(1170): n is a, c, g, or t
  misc_feature (1175)..(1179): n is a, c, g, or t
  misc_feature (1182)..(1188): n is a, c, g, or t
  misc_feature (1191)..(1194): n is a, c, g, or t
  misc_feature (1198)..(1198): n is a, c, g, or t
  misc_feature (1200)..(1202): n is a, c, g, or t
  misc_feature (1204)..(1205): n is a, c, g, or t
  misc_feature (1207)..(1209): n is a, c, g, or t
  misc_feature (1211)..(1211): n is a, c, g, or t
  misc_feature (1213)..(1220): n is a, c, g, or t
  misc_feature (1223)..(1231): n is a, c, g, or t
  misc_feature (1233)..(1234): n is a, c, g, or t
  misc_feature (1236)..(1238): n is a, c, g, or t
  misc_feature (1240)..(1243): n is a, c, g, or t
  misc_feature (1245)..(1247): n is a, c, g, or t
  misc_feature (1249)..(1250): n is a, c, g, or t
  misc_feature (1252)..(1253): n is a, c, g, or t
  misc_feature (1255)..(1255): n is a, c, g, or t
  misc_feature (1258)..(1258): n is a, c, g, or t
  misc_feature (1260)..(1264): n is a, c, g, or t
  misc_feature (1267)..(1276): n is a, c, g, or t
  misc_feature (1280)..(1280): n is a, c, g, or t
  misc_feature (1282)..(1285): n is a, c, g, or t
  misc_feature (1287)..(1288): n is a, c, g, or t
  misc_feature (1291)..(1296): n is a, c, g, or t
  misc_feature (1304)..(1306): n is a, c, g, or t
  misc_feature (1308)..(1309): n is a, c, g, or t
  misc_feature (1314)..(1314): n is a, c, g, or t
  misc_feature (1317)..(1318): n is a, c, g, or t
  misc_feature (1320)..(1320): n is a, c, g, or t
  misc_feature (1326)..(1329): n is a, c, g, or t
  misc_feature (1334)..(1334): n is a, c, g, or t
  misc_feature (1341)..(1341): n is a, c, g, or t
  misc_feature (1344)..(1345): n is a, c, g, or t
  misc_feature (1348)..(1349): n is a, c, g, or t
  misc_feature (1352)..(1355): n is a, c, g, or t
  misc_feature (1357)..(1357): n is a, c, g, or t
  misc_feature (1359)..(1359): n is a, c, g, or t
  misc_feature (1361)..(1362): n is a, c, g, or t
  misc_feature (1364)..(1366): n is a, c, g, or t
  misc_feature (1368)..(1368): n is a, c, g, or t
  misc_feature (1373)..(1374): n is a, c, g, or t
  misc_feature (1378)..(1378): n is a, c, g, or t
  misc_feature (1380)..(1382): n is a, c, g, or t
  misc_feature (1387)..(1387): n is a, c, g, or t
  misc_feature (1390)..(1391): n is a, c, g, or t
  misc_feature (1395)..(1397): n is a, c, g, or t
  misc_feature (1404)..(1404): n is a, c, g, or t
  misc_feature (1406)..(1406): n is a, c, g, or t
  misc_feature (1408)..(1409): n is a, c, g, or t
  misc_feature (1423)..(1423): n is a, c, g, or t
  misc_feature (1428)..(1429): n is a, c, g, or t
  misc_feature (1435)..(1435): n is a, c, g, or t
  misc_feature (1438)..(1438): n is a, c, g, or t
  misc_feature (1440)..(1441): n is a, c, g, or t
  misc_feature (1443)..(1443): n is a, c, g, or t
  misc_feature (1446)..(1446): n is a, c, g, or t
  misc_feature (1452)..(1452): n is a, c, g, or t
  misc_feature (1455)..(1455): n is a, c, g, or t
  misc_feature (1457)..(1462): n is a, c, g, or t
  misc_feature (1464)..(1464): n is a, c, g, or t
  misc_feature (1468)..(1468): n is a, c, g, or t
  misc_feature (1472)..(1472): n is a, c, g, or t
  misc_feature (1474)..(1475): n is a, c, g, or t
  misc_feature (1478)..(1478): n is a, c, g, or t
  misc_feature (1480)..(1482): n is a, c, g, or t
  misc_feature (1486)..(1489): n is a, c, g, or t
  misc_feature (1492)..(1493): n is a, c, g, or t
  misc_feature (1497)..(1497): n is a, c, g, or t
  misc_feature (1499)..(1499): n is a, c, g, or t
  misc_feature (1502)..(1502): n is a, c, g, or t
  misc_feature (1504)..(1507): n is a, c, g, or t
  misc_feature (1512)..(1512): n is a, c, g, or t
  misc_feature (1514)..(1514): n is a, c, g, or t
  misc_feature (1516)..(1516): n is a, c, g, or t
  misc_feature (1518)..(1518): n is a, c, g, or t
  misc_feature (1520)..(1522): n is a, c, g, or t
  misc_feature (1524)..(1524): n is a, c, g, or t
  misc_feature (1529)..(1529): n is a, c, g, or t
  misc_feature (1532)..(1532): n is a, c, g, or t
  misc_feature (1535)..(1536): n is a, c, g, or t
  misc_feature (1540)..(1541): n is a, c, g, or t
  misc_feature (1544)..(1545): n is a, c, g, or t
  misc_feature (1547)..(1547): n is a, c, g, or t
  misc_feature (1555)..(1556): n is a, c, g, or t
  misc_feature (1559)..(1559): n is a, c, g, or t
  misc_feature (1563)..(1564): n is a, c, g, or t
  misc_feature (1566)..(1571): n is a, c, g, or t
  misc_feature (1573)..(1575): n is a, c, g, or t
  misc_feature (1580)..(1581): n is a, c, g, or t
  misc_feature (1585)..(1585): n is a, c, g, or t
  misc_feature (1587)..(1587): n is a, c, g, or t
  misc_feature (1589)..(1589): n is a, c, g, or t
  misc_feature (1591)..(1591): n is a, c, g, or t
  misc_feature (1593)..(1593): n is a, c, g, or t
  misc_feature (1595)..(1595): n is a, c, g, or t
  misc_feature (1597)..(1597): n is a, c, g, or t
  misc_feature (1599)..(1600): n is a, c, g, or t
  misc_feature (1603)..(1603): n is a, c, g, or t
  misc_feature (1607)..(1607): n is a, c, g, or t
  misc_feature (1611)..(1611): n is a, c, g, or t
  misc_feature (1613)..(1614): n is a, c, g, or t
  misc_feature (1616)..(1616): n is a, c, g, or t
  misc_feature (1622)..(1622): n is a, c, g, or t
  misc_feature (1630)..(1630): n is a, c, g, or t
  misc_feature (1632)..(1632): n is a, c, g, or t
  misc_feature (1635)..(1635): n is a, c, g, or t
  misc_feature (1638)..(1638): n is a, c, g, or t
  misc_feature (1640)..(1640): n is a, c, g, or t
  misc_feature (1644)..(1644): n is a, c, g, or t
  misc_feature (1648)..(1650): n is a, c, g, or t
  misc_feature (1657)..(1658): n is a, c, g, or t
  misc_feature (1660)..(1662): n is a, c, g, or t
  misc_feature (1665)..(1665): n is a, c, g, or t
  misc_feature (1667)..(1667): n is a, c, g, or t
  misc_feature (1675)..(1675): n is a, c, g, or t
  misc_feature (1682)..(1682): n is a, c, g, or t
  misc_feature (1684)..(1684): n is a, c, g, or t
  misc_feature (1687)..(1687): n is a, c, g, or t
  misc_feature (1690)..(1690): n is a, c, g, or t
  misc_feature (1695)..(1695): n is a, c, g, or t
  misc_feature (1697)..(1700): n is a, c, g, or t
  misc_feature (1703)..(1703): n is a, c, g, or t
  misc_feature (1705)..(1705): n is a, c, g, or t
  misc_feature (1708)..(1708): n is a, c, g, or t
  misc_feature (1720)..(1722): n is a, c, g, or t
  misc_feature (1724)..(1724): n is a, c, g, or t
  misc_feature (1726)..(1726): n is a, c, g, or t
  misc_feature (1732)..(1733): n is a, c, g, or t
  misc_feature (1735)..(1738): n is a, c, g, or t
  misc_feature (1742)..(1743): n is a, c, g, or t
  misc_feature (1747)..(1747): n is a, c, g, or t
  misc_feature (1751)..(1751): n is a, c, g, or t
  misc_feature (1754)..(1754): n is a, c, g, or t
  misc_feature (1756)..(1759): n is a, c, g, or t
  misc_feature (1761)..(1763): n is a, c, g, or t
  misc_feature (1768)..(1768): n is a, c, g, or t
  misc_feature (2024)..(2024): n is a, c, g, or t
  misc_feature (3341)..(3341): n is a, c, g, or t
  misc_feature (3413)..(3413): n is a, c, g, or t
  misc_feature (3729)..(3729): n is a, c, g, or t
nnnnnnnnnnnnnnnnnnnnnnnnnnnnnnnnnnnnnnnnnnnnnnnnnnnnnnnnnnnnnnnnnnnnnnnnnnnnnnnnnnnnnnnnnnnnnnnnnnnnnnnnnnnnnnnnnnnnnnnnnnnnnnnnnnnnnnnnnnnnnnnnnnnnnnnnnnnnnnnnnnnnnnnnnnnnnnnnnnnnnnnnnnnnnnnnnnnnnnnnnnnnnnnnnnnnnnnnnnnnnnnnnnnnnnnnnnnnnnnnnnnnnnnnnnnnnnnnnnnnnnnnnnnnnnnnnnnnnnnnnnnnnnnnnnnnnnnnnnnnnnnnnnnnnnnnnnnnnnnnnnnnnnnnnnnnnnnnnnnnnnnnnnnnnnnnnnnnnnnnnnnnnnnnnnnnnnnnnnnnnnnnnnnnnannnnnnnnnnnnnnnnnnnnnnnnnnnnnnnnnnnnnnnnnnnnnnnnnnnnnnnnnnnnnnnnnnnnnnnnnnnnnnnnnnnnnnnnnnnnnnnnnnnnnnnnnnnnnnnnnnnnnnnnnnnnnnnnnnnnnnnnnnnnnnnnnnnnnnnnnnnnnnnnnnnnnnnnnnnnnnnnnnnnnnnnnnnnnnnnnnnnnnnnnnnnnncnnnnncnnnnnnnnnnnnnnnnncnnncnncnnnnnnnnnncnnnnnnnnnnnncnnnnnnnnnnnnnncnncaccnnnnnnnncnnnnnnnnnncnnnnnnnncnnncnnnnnnnnnnnnnnnnccnnnnnnnnnnnnnnnnnnnnnnnnnnnnnnnnnnnnnnnnnnnnnncnncnnnnnnnnnnnnnnnnnnnnnnnnnnnnnnnnnnnnnnnnnnnnnnnnnnnnnnnntnnnntnnnnnnnnnnnnnnnnnnnnnnnnnnnnnnnnnncnnnnnnnnnnnnnnnnnnnnnnnnnnnnnncnnnnnnnnnnnnnnnnnnnnnnnnnnnnnnnnnnnnnnnnnnnnnannccnncannnncacnnccnncannnnnancnnnnannannncnncnnnannnnnnncnnnnnccnntttntnnnannnncnttnnnntnnatntntntcttnnctttntctnntntatnnctntncnnnnannnncacccnnnccnnnnnnnnnnnnncccnnnnnnnanncncnncngnnncnannnnnnnnnncnccnccnnannnnncnnncccnnnncccannnnncannnnnnncgnnnncggngnnncnnannngncnnnnnnnnccnnnnnnnnnanntnnncnnnncnnncnncnngnccntnnnnncgnnnnnnnnnnccgncnnnncnnccnnnnnnttgttcannncnncatcnccnntncccttnnnnttttncagctcntcnnccnnttnnnncncncnntnnntntgacnntatncnnnaatcnctnncgcnnnagccggncngnnacccggcaatgccnccagnncggcanaananncngtnttgacnttnannnnnncnaaanagantnncgnannnacgnnnncanngacncnaantnnnnatttntncntnannntnttccnatnacnngttnnatnnantcaaccgnnccngctnnannnnnntnnnacttnnccgnananantncnanannacngtanaacncnncnctattncatataantncanacnanatantaannnaaatacnntnnnatntnaaatattntaaacantnaancgnaactntnnnnacntnatnttcaagaataannncntngttatnntnnnntaanntaancaanaanannnnannngtcancaaaccgacagaaccgacaggcatgtaaaaagcccccgacatcagtcgggggcttcggaatgggtgtttggcggtgacctactttcacatggaagaaccacactatcatcggcgctgagtcgtttcacggtcctgttcgggatgggaaggcgtgggaccaactcgctatggccgccaaacttaaactgttacaaatcggtaaagccttaatcaatatatttggtgatgactgaatcagtcagtaagcttttatctnttgaagttcttcaaatgatagagtcaagcctcacgagcaattagtatgggttagcttcacgcgttaccgcgcttccacaccccacctatcaacgtcctggtctcgaacgactctttagtgtggttaaaccacaagggaagtctcatcttcaggcgagtttcgcgcttagatgctttcagcgcttatctcttccgaacttagctacccggctatgcaactggcgttacaaccggtacaccagaggttcgtccactccggtcctctcgtactaggagcagcccccgtcaaacttccaacgcccactgcagatagggaccaaactgtctcacgacgttttaaacccagctcacgtaccactttaaatggcgaacagccatacccttgggaccgactacagccccaggatgtgatgagccgacatcgaggtgccaaactccgccgtcgatatgaactcttgggcggaatcagcctgttatccccggagtaccttttatccgttgagcgatggcccttccatacagaaccaccggatcactatgtcctgctttcgcacctgctcgacttgtcggtctcgcagttaagctaccttttgccattgcactatcagtccgatttccgaccggacctaggtaaccttcgaactcctccgttactctttgggaggagaccgccccagtcaaactgcctaccatgcacggtccccgacccggattacgggtctgggttagaacctcaaagacaccagggtggtatttcaaggacggctccacagagactggcgtctctgcttcaaagcctcccacctatcctacacaagtgacttcaaagtccaatgcaaagctacagtaaaggttcacggggtctttccgtctagcagcgggtagattgcatcttcacaaccacttcaacttcgctgagtctcgggaggagacagtgtggccatcgttacgccattcgtgcgggtcggaacttacccgacaaggaatttcgctaccttaggaccgttatagttacggccgccgtttactggggcttcgatccgatgcttgcacatcttcaattaaccttccagcaccgggcaggcgtcacaccctatacgtccactttcgtgttagcagagtgctgtgtttttaataaacagtcgcagccacctattctctgcgaccctccagggcttacggagcaagtccttaaccttagagggcataccttctcccgaagttacggtatcaatttgccgagttccttctcccgagttctctcaagcgccttagaattctcatcctgcccacctgtgtcggtttgcggtacggttcnattcaaactgaagcttagtggcttttcctggaagcgtggtatcggttacttcatgtccgtagacactcgtcntcacttctcggtgttaagaagacccggatttgcctaagtcttccacctaccggcttaaacaagctattccaacagcttgctaacctaaccttctccgtccccacatcgcatttgaatcaagtacaggaatattaacctgtttcccatcgactacgcatttctgcctcgccttaggggccgactcaccctacgccgatgaacgttgcgtaggaaaccttgggctttcggcgagcgggcttttcacccgctttatcgctactcatgtcaacattcgcacttctgatacctccagcacactttacaatgcaccttcatnggcctacagaacgctcccctaccatgccagtaaactggcatccgcagcttcggttatagatttgagccccgttacatcttccgcgcaggacgactcgaccagtgagctattacgctttctttaaatgatggctgcttctaagccaacatcctggctgtctgggccttcccacttcgtttaccacttaatctatcatttgggaccttagctggcggtctgggttgtttccctcttgacaacggacgttagcacccgctgtctgtctcccgag

SEQ ID NO: 170 - DNA, 4000 bp, Escherichia coli
  misc_feature (2866)..(2866): n is a, c, g, or t
  misc_feature (2917)..(2917): n is a, c, g, or t
  misc_feature (2962)..(2962): n is a, c, g, or t
  misc_feature (3010)..(3010): n is a, c, g, or t
  misc_feature (3022)..(3022): n is a, c, g, or t
  misc_feature (3036)..(3036): n is a, c, g, or t
  misc_feature (3051)..(3051): n is a, c, g, or t
  misc_feature (3076)..(3076): n is a, c, g, or t
  misc_feature (3091)..(3091): n is a, c, g, or t
  misc_feature (3097)..(3097): n is a, c, g, or t
  misc_feature (3100)..(3100): n is a, c, g, or t
  misc_feature (3109)..(3109): n is a, c, g, or t
  misc_feature (3121)..(3121): n is a, c, g, or t
  misc_feature (3130)..(3130): n is a, c, g, or t
  misc_feature (3138)..(3138): n is a, c, g, or t
  misc_feature (3140)..(3140): n is a, c, g, or t
  misc_feature (3142)..(3142): n is a, c, g, or t
  misc_feature (3149)..(3149): n is a, c, g, or t
  misc_feature (3157)..(3157): n is a, c, g, or t
  misc_feature (3252)..(3252): n is a, c, g, or t
  misc_feature (3268)..(3268): n is a, c, g, or t
  misc_feature (3301)..(3301): n is a, c, g, or t
  misc_feature (3304)..(3304): n is a, c, g, or t
  misc_feature (3328)..(3328): n is a, c, g, or t
  misc_feature (3364)..(3364): n is a, c, g, or t
  misc_feature (3391)..(3391): n is a, c, g, or t
  misc_feature (3418)..(3418): n is a, c, g, or t
  misc_feature (3474)..(3474): n is a, c, g, or t
  misc_feature (3517)..(3517): n is a, c, g, or t
  misc_feature (3607)..(3607): n is a, c, g, or t
  misc_feature (3628)..(3628): n is a, c, g, or t
  misc_feature (3637)..(3637): n is a, c, g, or t
  misc_feature (3640)..(3640): n is a, c, g, or t
  misc_feature (3652)..(3652): n is a, c, g, or t
  misc_feature (3664)..(3664): n is a, c, g, or t
  misc_feature (3670)..(3670): n is a, c, g, or t
  misc_feature (3676)..(3676): n is a, c, g, or t
  misc_feature (3697)..(3697): n is a, c, g, or t
  misc_feature (3705)..(3705): n is a, c, g, or t
  misc_feature (3715)..(3715): n is a, c, g, or t
  misc_feature (3727)..(3727): n is a, c, g, or t
  misc_feature (3729)..(3730): n is a, c, g, or t
  misc_feature (3732)..(3733): n is a, c, g, or t
  misc_feature (3735)..(3737): n is a, c, g, or t
  misc_feature (3739)..(3740): n is a, c, g, or t
  misc_feature (3742)..(3745): n is a, c, g, or t
  misc_feature (3747)..(3747): n is a, c, g, or t
  misc_feature (3749)..(3757): n is a, c, g, or t
  misc_feature (3759)..(3759): n is a, c, g, or t
  misc_feature (3761)..(3765): n is a, c, g, or t
  misc_feature (3768)..(3778): n is a, c, g, or t
  misc_feature (3782)..(3784): n is a, c, g, or t
  misc_feature (3786)..(3797): n is a, c, g, or t
  misc_feature (3800)..(3804): n is a, c, g, or t
  misc_feature (3806)..(3808): n is a, c, g, or t
  misc_feature (3810)..(3811): n is a, c, g, or t
  misc_feature (3814)..(3817): n is a, c, g, or t
  misc_feature (3819)..(3819): n is a, c, g, or t
  misc_feature (3821)..(3821): n is a, c, g, or t
  misc_feature (3823)..(3825): n is a, c, g, or t
  misc_feature (3828)..(3833): n is a, c, g, or t
  misc_feature (3836)..(3846): n is a, c, g, or t
  misc_feature (3848)..(3848): n is a, c, g, or t
  misc_feature (3850)..(3850): n is a, c, g, or t
  misc_feature (3852)..(3857): n is a, c, g, or t
  misc_feature (3859)..(3860): n is a, c, g, or t
  misc_feature (3862)..(3862): n is a, c, g, or t
  misc_feature (3864)..(3872): n is a, c, g, or t
  misc_feature (3874)..(3874): n is a, c, g, or t
  misc_feature (3878)..(3885): n is a, c, g, or t
  misc_feature (3887)..(3904): n is a, c, g, or t
  misc_feature (3906)..(3909): n is a, c, g, or t
  misc_feature (3911)..(3916): n is a, c, g, or t
  misc_feature (3918)..(3920): n is a, c, g, or t
  misc_feature (3922)..(3927): n is a, c, g, or t
  misc_feature (3930)..(3932): n is a, c, g, or t
  misc_feature (3934)..(3941): n is a, c, g, or t
  misc_feature (3943)..(3944): n is a, c, g, or t
  misc_feature (3946)..(3949): n is a, c, g, or t
  misc_feature (3951)..(3955): n is a, c, g, or t
  misc_feature (3957)..(3958): n is a, c, g, or t
  misc_feature (3960)..(3964): n is a, c, g, or t
  misc_feature (3966)..(3973): n is a, c, g, or t
  misc_feature (3975)..(3980): n is a, c, g, or t
  misc_feature (3983)..(3986): n is a, c, g, or t
  misc_feature (3989)..(3992): n is a, c, g, or t
  misc_feature (3995)..(3997): n is a, c, g, or t
  misc_feature (3999)..(4000): n is a, c, g, or t
cgttccacgactaccaccgcgacggacagatgcgcacggacggcaattacggagcgacgatcccctaccagccgaacagctacggcgaatggcaggacagcccgaacctgaaagaaccgcctttggaggtgaacggtgccatctacaattacgacgaacgggaactcgacagcgactatttcacccaaccgggcaagctctggcggctgatgtcggccgaagaccaacgggcgacgtgcgagaacacggcccgcgcgatgggcgacagcgccctcttcatcaaacagcggcacgtgcgcaactgctcctacgccgatcccgaatacggcaaaggcgtggcgaaggcattgggtatcgactatgaggaagccctgaaagcggaggacccggcacacccgacgtgggatccccgcaacaaaaagtgattcgcagcagacgcaccgaaaggaggttcctccatttcgttaagatcgctacaaaatcccggatgaatatgtattcatccgggattttacgcaatacgtcctcttcaccctgtccgaacgccccgcaaaacaaggcccgtccggcacgaacggcccgacgcgaaaagcctcatacgatgggatcgatgacgcctccgcctccgccactctttccggctccgcaggctttctcccctcgacaacgatacttcgaaaaatgccagccgacaccttgctcccggcgacaacatcgacaggccggtccgcacaagcggatcggtttccttgcaagaggcaatcaaggacggtattccagcatcgttccgggacattggacatacctttacggggtcttggccggctccgtaaaatacaatgccggactgcgatcccgcactttcgggagccgcaatccggcgctgcgaatttcaaaaggcactatgcctgcggcgtatcgtcgccgcctttattgcgattacggttgcgatttcggttacgacgacgcccccggtcccggctgccgcgattaccctcgccacgaccttctccgtggcgggactccacattcgcagccgcgacgacaccttctgcaggtaccggaccggcactcttcgcaccgtcgcgtccacggctccgaccacgtcccccgctgcgtccgtttccgccacggcccgacccactgcgtccccggcggccgccatgaccggaaaaagcggcggggttatattcagggcctgcacctacggcttccggcaaggacaatttcggaatctcccgctcgataaactcctcgatacggtggaatttaccctgctcctcctcgttcacgaacgtaacggcccgccccgtagcgctggcccgcgccgtgcggccgatgcgatggatataatcttcgggatcgtgcggcacgtcataattgatgaccatgccgatatcctcgatgtcgataccgcgtgcgacgatgtccgtcgctacgagaatcctcactttattattcttaaaatcgagcatcacctgctcgcgtttctcctgatccagatcggagtgcatgggagccacgtcgagcttcatacgcttgagcgtatgggccaactccttgaccttttgtttggaagaggagaaaatgatcgtcttggactccgaaggccaggagaacatctcgcggacgatccccagcttttggccctcgtaacagatataagcaccctgttcgatcgcctcgttgggcttcgaaatggcgatattgacctcggcgggatcgttcagaatctgcttggccatctgccggatcttgggcggcagcgtcgcggagaacatcagcgtctgccgcgatttgggcatataggaaacgatctgcataatgtcgtcgtaaaaacccatatcgagcatacggtcggcctcgtccagaatcaggtaatccacatgcgaaagatcgacgcggctgttcataaggtgcgaaatcaggcgtccgggcgtggcgatcaccacatcggcacccatttgcaggccgcgcttctgctggtcccagccgcggccgtcgccgccgccgtaaattacggcggtagaaacgggcatatagtaggaaaagccctggaactgcatgtcgatctgctgtgccaactcgcgcgtgggtacgataatgaccgatttcacgacgttcttctcattgccttcgagcagcagccggttcagcagcggcagcgtataggcagccgtcttgcccgtaccggtctgggcgcaggcgataatatcgcgcccgtccagaatgatcggaatggtctgctcctgcacaggagtcatctcctgaaaattcatggcgtcgatgccgtccagcacctcgtcttccagatcgagttcgtcaaatctcatactatgcgttttctttcttttccaattattacacttcaaacgggcgggttctttcgaccaactctccctgcaacgtcgccgacgaggaggcggtcacccgcacccgcacgtaatccccgatccggcactcgccgcgatcgaagaccaccaccttattctgcgacgtacgtccgaaaagctgccggtcgctgcgcttggaagtaccttccaccagaatttcgaactctttgccgacatcgcgggcgttgctttcggccgaaagcgtattctgcaaggcgatgatttcgttcaaacgggccgtcttgaccgaatccggcacatcgtcgggcatgtgacgttgagcgaacgtatcgggccgctcggaatacttgaacatataggcgaattcataccccacctcccgcatcagcgaaagcgtctgccgatgatcctcgtccgtttcgctgcagaatccggcgatcaggtcggtcgtaatcgcgcaatcgggcatatagcggcggatagcggcgatgcggtcgaggtaccattcgcgngtatatttgcggttcatcttctcgagcatccgcgacgatcccgactgggcnggcaggtggatgcagcggcagatgttgggtttcgacgccatcacntcgagcagacggtcgctcatgtccttgggatgcgacgttgcgaaccgnacgcgcaacagnggcgaaatttcggncacaaggcgcatcanctccggaaaatcgaccgctccatancgatacgaattgacnttctgnccnaacagcgtnacctcccggtanccgttctcnaacaggcngngngcttcgntcagaatngtctgcggatcgcggctgcgctccacgccccgcgtataaggcaccacgcagtacgaacaatagttgttgcacccgcgcatgatggcgatataacngctcacgccgttgcgntcgagccgcacgggagcgatttcggcgtaggtntcntcgcgggaaagcaggacattgacnccccggccgccttcgcccgcttcgcgcaccaggcgnggcaggtcgcggtacgcatccggaccngcgacgatatccacggggttctccccntcgagcagccgttcccgcaaacgttcggccatacaaccgataataccgacgagcantcccggccggcggcggcgcagatgagccatctcccgcaaacgnccccaaatgcgctgttcggcattatctcggatcgaacaggtattgatcagaacgacatccgcctcctcgatcttgtcggtatagacatanccctcctgctgcatgatcgcnacgacgatntcngtatcgccgacnttcatctgacanccgtangtttcnacaaaaagtttacggcccgcnccctgcancggacgcaangtatttatcttntnntnntnnntnntnnnnanannnnnnnnncncnnnnnaannnnnnnnnnnaaannngnnnnnnnnnnnncgnnnnncnnntnnccnnnntntntnnnaannnnnntgnnnnnnnnnnncncncnnnnnngnnangnnnnnnnnncnctcnnnnnnnntnnnnnnnnnnnnnnnnnncnnnnannnnnntnnngnnnnnntcnnntnnnnnnnncnntnnnncnnnnncnncnnnnngnnnnnnnncnnnnnnaannnnatnnnnttnnncnn

SEQ ID NO: 171 - DNA, 4000 bp, Escherichia coli
  misc_feature (295)..(295): n is a, c, g, or t
  misc_feature (1247)..(1247): n is a, c, g, or t
  misc_feature (1309)..(1309): n is a, c, g, or t
  misc_feature (1355)..(1355): n is a, c, g, or t
  misc_feature (1520)..(1520): n is a, c, g, or t
  misc_feature (1529)..(1529): n is a, c, g, or t
  misc_feature (1550)..(1550): n is a, c, g, or t
  misc_feature (1574)..(1574): n is a, c, g, or t
  misc_feature (2224)..(2224): n is a, c, g, or t
  misc_feature (2262)..(2262): n is a, c, g, or t
  misc_feature (2322)..(2323): n is a, c, g, or t
  misc_feature (2340)..(2341): n is a, c, g, or t
  misc_feature (2349)..(2349): n is a, c, g, or t
  misc_feature (2352)..(2352): n is a, c, g, or t
  misc_feature (2358)..(2359): n is a, c, g, or t
  misc_feature (2361)..(2361): n is a, c, g, or t
  misc_feature (2364)..(2364): n is a, c, g, or t
  misc_feature (2367)..(2367): n is a, c, g, or t
  misc_feature (2370)..(2371): n is a, c, g, or t
  misc_feature (2373)..(2373): n is a, c, g, or t
  misc_feature (2375)..(2375): n is a, c, g, or t
  misc_feature (2379)..(2379): n is a, c, g, or t
  misc_feature (2382)..(2387): n is a, c, g, or t
  misc_feature (2389)..(2389): n is a, c, g, or t
  misc_feature (2392)..(2393): n is a, c, g, or t
  misc_feature (2395)..(2397): n is a, c, g, or t
  misc_feature (2401)..(2402): n is a, c, g, or t
  misc_feature (2404)..(2406): n is a, c, g, or t
  misc_feature (2408)..(2413): n is a, c, g, or t
  misc_feature (2417)..(2418): n is a, c, g, or t
  misc_feature (2423)..(2426): n is a, c, g, or t
  misc_feature (2429)..(2429): n is a, c, g, or t
  misc_feature (2433)..(2433): n is a, c, g, or t
  misc_feature (2435)..(2435): n is a, c, g, or t
  misc_feature (2439)..(2439): n is a, c, g, or t
  misc_feature (2441)..(2441): n is a, c, g, or t
  misc_feature (2443)..(2447): n is a, c, g, or t
  misc_feature (2449)..(2449): n is a, c, g, or t
  misc_feature (2456)..(2457): n is a, c, g, or t
  misc_feature (2465)..(2466): n is a, c, g, or t
  misc_feature (2468)..(2469): n is a, c, g, or t
  misc_feature (2471)..(2472): n is a, c, g, or t
  misc_feature (2474)..(2475): n is a, c, g, or t
  misc_feature (2477)..(2479): n is a, c, g, or t
  misc_feature (2481)..(2481): n is a, c, g, or t
  misc_feature (2483)..(2484): n is a, c, g, or t
  misc_feature (2486)..(2489): n is a, c, g, or t
  misc_feature (2492)..(2493): n is a, c, g, or t
  misc_feature (2497)..(2498): n is a, c, g, or t
  misc_feature (2501)..(2501): n is a, c, g, or t
  misc_feature (2504)..(2507): n is a, c, g, or t
  misc_feature (2510)..(2510): n is a, c, g, or t
  misc_feature (2512)..(2515): n is a, c, g, or t
  misc_feature (2518)..(2521): n is a, c, g, or t
  misc_feature (2523)..(2523): n is a, c, g, or t
  misc_feature (2527)..(2528): n is a, c, g, or t
  misc_feature (2530)..(2531): n is a, c, g, or t
  misc_feature (2533)..(2534): n is a, c, g, or t
  misc_feature (2536)..(2536): n is a, c, g, or t
  misc_feature (2538)..(2539): n is a, c, g, or t
  misc_feature (2541)..(2543): n is a, c, g, or t
  misc_feature (2545)..(2548): n is a, c, g, or t
  misc_feature (2550)..(2552): n is a, c, g, or t
  misc_feature (2554)..(2554): n is a, c, g, or t
  misc_feature (2556)..(2557): n is a, c, g, or t
  misc_feature (2559)..(2561): n is a, c, g, or t
  misc_feature (2563)..(2573): n is a, c, g, or t
  misc_feature (2575)..(2576): n is a, c, g, or t
  misc_feature (2580)..(2583): n is a, c, g, or t
  misc_feature (2585)..(2590): n is a, c, g, or t
  misc_feature (2597)..(2598): n is a, c, g, or t
  misc_feature (2603)..(2604): n is a, c, g, or t
  misc_feature (2606)..(2607): n is a, c, g, or t
  misc_feature (2609)..(2609): n is a, c, g, or t
  misc_feature (2611)..(2618): n is a, c, g, or t
  misc_feature (2621)..(2627): n is a, c, g, or t
  misc_feature (2629)..(2639): n is a, c, g, or t
  misc_feature (2641)..(2648): n is a, c, g, or t
  misc_feature (2650)..(2651): n is a, c, g, or t
  misc_feature (2653)..(2653): n is a, c, g, or t
  misc_feature (2656)..(2656): n is a, c, g, or t
  misc_feature (2658)..(2662): n is a, c, g, or t
  misc_feature (2667)..(2667): n is a, c, g, or t
  misc_feature (2669)..(2672): n is a, c, g, or t
  misc_feature (2674)..(2680): n is a, c, g, or t
  misc_feature (2682)..(2684): n is a, c, g, or t
  misc_feature (2686)..(2686): n is a, c, g, or t
  misc_feature (2688)..(2693): n is a, c, g, or t
  misc_feature (2695)..(2695): n is a, c, g, or t
  misc_feature (2697)..(2701): n is a, c, g, or t
  misc_feature (2703)..(2709): n is a, c, g, or t
  misc_feature (2711)..(2719): n is a, c, g, or t
  misc_feature (2721)..(2734): n is a, c, g, or t
  misc_feature (2736)..(2741): n is a, c, g, or t
  misc_feature (2743)..(2744): n is a, c, g, or t
  misc_feature (2746)..(2746): n is a, c, g, or t
  misc_feature (2749)..(2754): n is a, c, g, or t
  misc_feature (2757)..(2762): n is a, c, g, or t
  misc_feature (2765)..(2766): n is a, c, g, or t
  misc_feature (2769)..(2769): n is a, c, g, or t
  misc_feature (2771)..(2772): n is a, c, g, or t
  misc_feature (2774)..(2778): n is a, c, g, or t
  misc_feature (2780)..(2780): n is a, c, g, or t
  misc_feature (2782)..(2782): n is a, c, g, or t
  misc_feature (2785)..(2788): n is a, c, g, or t
  misc_feature (2791)..(2796): n is a, c, g, or t
  misc_feature (2798)..(2798): n is a, c, g, or t
  misc_feature (2801)..(2801): n is a, c, g, or t
  misc_feature (2803)..(2805): n is a, c, g, or t
  misc_feature (2807)..(2807): n is a, c, g, or t
  misc_feature (2809)..(2813): n is a, c, g, or t
  misc_feature (2818)..(2822): n is a, c, g, or t
  misc_feature (2825)..(2825): n is a, c, g, or t
  misc_feature (2828)..(2828): n is a, c, g, or t
  misc_feature (2834)..(2835): n is a, c, g, or t
  misc_feature (2838)..(2840): n is a, c, g, or t
  misc_feature (2843)..(2843): n is a, c, g, or t
  misc_feature (2845)..(2846): n is a, c, g, or t
  misc_feature (2848)..(2850): n is a, c, g, or t
  misc_feature (2852)..(2852): n is a, c, g, or t
  misc_feature (2854)..(2854): n is a, c, g, or t
  misc_feature (2856)..(2859): n is a, c, g, or t
  misc_feature (2861)..(2861): n is a, c, g, or t
  misc_feature (2863)..(2865): n is a, c, g, or t
  misc_feature (2868)..(2869): n is a, c, g, or t
  misc_feature (2872)..(2873): n is a, c, g, or t
  misc_feature (2875)..(2877): n is a, c, g, or t
  misc_feature (2882)..(2883): n is a, c, g, or t
  misc_feature (2886)..(2888): n is a, c, g, or t
  misc_feature (2890)..(2892): n is a, c, g, or t
  misc_feature (2895)..(2895): n is a, c, g, or t
  misc_feature (2897)..(2900): n is a, c, g, or t
  misc_feature (2902)..(2905): n is a, c, g, or t
  misc_feature (2909)..(2916): n is a, c, g, or t
  misc_feature (2918)..(2919): n is a, c, g, or t
  misc_feature (2921)..(2925): n is a, c, g, or t
  misc_feature (2927)..(2927): n is a, c, g, or t
  misc_feature (2929)..(2932): n is a, c, g, or t
  misc_feature (2937)..(2937): n is a, c, g, or t
  misc_feature (2939)..(2939): n is a, c, g, or t
  misc_feature (2941)..(2941): n is a, c, g, or t
  misc_feature (2943)..(2943): n is a, c, g, or t
  misc_feature (2945)..(2945): n is a, c, g, or t
  misc_feature (2947)..(2947): n is a, c, g, or t
  misc_feature (2950)..(2952): n is a, c, g, or t
  misc_feature (2954)..(2958): n is a, c, g, or t
  misc_feature (2960)..(2961): n is a, c, g, or t
  misc_feature (2963)..(2963): n is a, c, g, or t
  misc_feature (2965)..(2966): n is a, c, g, or t
  misc_feature (2969)..(2972): n is a, c, g, or t
  misc_feature (2974)..(2978): n is a, c, g, or t
  misc_feature (2981)..(2984): n is a, c, g, or t
  misc_feature (2986)..(2987): n is a, c, g, or t
  misc_feature (2989)..(2990): n is a, c, g, or t
  misc_feature (2992)..(2993): n is a, c, g, or t
  misc_feature (2995)..(2996): n is a, c, g, or t
  misc_feature (2998)..(3004): n is a, c, g, or t
  misc_feature (3007)..(3008): n is a, c, g, or t
  misc_feature (3010)..(3012): n is a, c, g, or t
  misc_feature (3016)..(3016): n is a, c, g, or t
  misc_feature (3018)..(3020): n is a, c, g, or t
  misc_feature (3022)..(3027): n is a, c, g, or t
  misc_feature (3030)..(3030): n is a, c, g, or t
  misc_feature (3032)..(3034): n is a, c, g, or t
  misc_feature (3039)..(3041): n is a, c, g, or t
  misc_feature (3043)..(3043): n is a, c, g, or t
  misc_feature (3045)..(3047): n is a, c, g, or t
  misc_feature (3050)..(3054): n is a, c, g, or t
  misc_feature (3057)..(3063): n is a, c, g, or t
  misc_feature (3065)..(3068): n is a, c, g, or t
  misc_feature (3070)..(3070): n is a, c, g, or t
  misc_feature (3072)..(3082): n is a, c, g, or t
  misc_feature (3086)..(3087): n is a, c, g, or t
  misc_feature (3089)..(3089): n is a, c, g, or t
  misc_feature (3091)..(3093): n is a, c, g, or t
  misc_feature (3096)..(3097): n is a, c, g, or t
  misc_feature (3102)..(3102): n is a, c, g, or t
  misc_feature (3104)..(3105): n is a, c, g, or t
  misc_feature (3107)..(3110): n is a, c, g, or t
  misc_feature (3113)..(3113): n is a, c, g, or t
  misc_feature (3115)..(3115): n is a, c, g, or t
  misc_feature (3117)..(3117): n is a, c, g, or t
  misc_feature (3119)..(3126): n is a, c, g, or t
  misc_feature (3130)..(3132): n is a, c, g, or t
  misc_feature (3134)..(3136): n is a, c, g, or t
  misc_feature (3140)..(3140): n is a, c, g, or t
  misc_feature (3142)..(3144): n is a, c, g, or t
  misc_feature (3146)..(3146): n is a, c, g, or t
  misc_feature (3149)..(3152): n is a, c, g, or t
  misc_feature (3154)..(3162): n is a, c, g, or t
  misc_feature (3164)..(3164): n is a, c, g, or t
  misc_feature (3167)..(3167): n is a, c, g, or t
  misc_feature (3169)..(3171): n is a, c, g, or t
  misc_feature (3173)..(3174): n is a, c, g, or t
  misc_feature (3176)..(3179): n is a, c, g, or t
  misc_feature (3185)..(3189): n is a, c, g, or t
  misc_feature (3191)..(3191): n is a, c, g, or t
  misc_feature (3193)..(3193): n is a, c, g, or t
  misc_feature (3195)..(3196): n is a, c, g, or t
  misc_feature (3200)..(3204): n is a, c, g, or t
  misc_feature (3206)..(3206): n is a, c, g, or t
  misc_feature (3208)..(3208): n is a, c, g, or t
  misc_feature (3210)..(3211): n is a, c, g, or t
  misc_feature (3213)..(3223): n is a, c, g, or t
  misc_feature (3225)..(3228): n is a, c, g, or t
  misc_feature (3230)..(3231): n is a, c, g, or t
  misc_feature (3233)..(3239): n is a, c, g, or t
  misc_feature (3241)..(3241): n is a, c, g, or t
  misc_feature (3243)..(3249): n is a, c, g, or t
  misc_feature (3251)..(3251): n is a, c, g, or t
  misc_feature (3253)..(3254): n is a, c, g, or t
  misc_feature (3256)..(3263): n is a, c, g, or t
  misc_feature (3265)..(3267): n is a, c, g, or t
  misc_feature (3270)..(3270): n is a, c, g, or t
  misc_feature (3272)..(3272): n is a, c, g, or t
  misc_feature (3278)..(3281): n is a, c, g, or t
  misc_feature (3285)..(3289): n is a, c, g, or t
  misc_feature (3291)..(3296): n is a, c, g, or t
  misc_feature (3298)..(3300): n is a, c, g, or t
  misc_feature (3303)..(3305): n is a, c, g, or t
  misc_feature (3308)..(3308): n is a, c, g, or t
  misc_feature (3310)..(3316): n is a, c, g, or t
  misc_feature (3320)..(3320): n is a, c, g, or t
  misc_feature (3322)..(3332): n is a, c, g, or t
  misc_feature (3335)..(3337): n is a, c, g, or t
  misc_feature (3339)..(3340): n is a, c, g, or t
  misc_feature (3344)..(3347): n is a, c, g, or t
  misc_feature (3349)..(3351): n is a, c, g, or t
  misc_feature (3353)..(3355): n is a, c, g, or t
  misc_feature (3357)..(3359): n is a, c, g, or t
  misc_feature (3361)..(3368): n is a, c, g, or t
  misc_feature (3373)..(3390): n is a, c, g, or t
  misc_feature (3393)..(3395): n is a, c, g, or t
  misc_feature (3397)..(3398): n is a, c, g, or t
  misc_feature (3400)..(3404): n is a, c, g, or t
  misc_feature (3406)..(3406): n is a, c, g, or t
  misc_feature (3408)..(3413): n is a, c, g, or t
  misc_feature (3418)..(3419): n is a, c, g, or t
  misc_feature (3421)..(3421): n is a, c, g, or t
  misc_feature (3423)..(3426): n is a, c, g, or t
  misc_feature (3430)..(3431): n is a, c, g, or t
  misc_feature (3433)..(3442): n is a, c, g, or t
  misc_feature (3446)..(3457): n is a, c, g, or t
  misc_feature (3459)..(3460): n is a, c, g, or t
  misc_feature (3462)..(3467): n is a, c, g, or t
  misc_feature (3469)..(3471): n is a, c, g, or t
  misc_feature (3473)..(3478): n is a, c, g, or t
  misc_feature (3480)..(3483): n is a, c, g, or t
  misc_feature (3485)..(3489): n is a, c, g, or t
  misc_feature (3491)..(3491): n is a, c, g, or t
  misc_feature (3493)..(3494): n is a, c, g, or t
  misc_feature (3498)..(3499): n is a, c, g, or t
  misc_feature (3501)..(3501): n is a, c, g, or t
  misc_feature (3504)..(3508): n is a, c, g, or t
  misc_feature (3512)..(3512): n is a, c, g, or t
  misc_feature (3514)..(3518): n is a, c, g, or t
  misc_feature (3520)..(3527): n is a, c, g, or t
  misc_feature (3529)..(3529): n is a, c, g, or t
  misc_feature (3531)..(3531): n is a, c, g, or t
  misc_feature (3533)..(3534): n is a, c, g, or t
  misc_feature (3538)..(3539): n is a, c, g, or t
  misc_feature (3541)..(3541): n is a, c, g, or t
  misc_feature (3543)..(3548): n is a, c, g, or t
  misc_feature (3551)..(3552): n is a, c, g, or t
  misc_feature (3554)..(3554): n is a, c, g, or t
  misc_feature (3557)..(3557): n is a, c, g, or t
  misc_feature (3559)..(3559): n is a, c, g, or t
  misc_feature (3563)..(3567): n is a, c, g, or t
  misc_feature (3570)..(3575): n is a, c, g, or t
  misc_feature (3577)..(3578): n is a, c, g, or t
  misc_feature (3580)..(3584): n is a, c, g, or t
  misc_feature (3587)..(3589): n is a, c, g, or t
  misc_feature (3591)..(3591): n is a, c, g, or t
  misc_feature (3593)..(3599): n is a, c, g, or t
  misc_feature (3601)..(3602): n is a, c, g, or t
  misc_feature (3605)..(3607): n is a, c, g, or t
  misc_feature (3609)..(3614): n is a, c, g, or t
  misc_feature (3616)..(3617): n is a, c, g, or t
  misc_feature (3619)..(3619): n is a, c, g, or t
  misc_feature (3621)..(3625): n is a, c, g, or t
  misc_feature (3627)..(3633): n is a, c, g, or t
  misc_feature (3635)..(3635): n is a, c, g, or t
  misc_feature (3637)..(3637): n is a, c, g, or t
  misc_feature (3639)..(3647): n is a, c, g, or t
  misc_feature (3649)..(3651): n is a, c, g, or t
  misc_feature (3653)..(3655): n is a, c, g, or t
  misc_feature (3657)..(3657): n is a, c, g, or t
  misc_feature (3659)..(3662): n is a, c, g, or t
  misc_feature (3664)..(3668): n is a, c, g, or t
  misc_feature (3670)..(3675): n is a, c, g, or t
  misc_feature (3677)..(3678): n is a, c, g, or t
  misc_feature (3680)..(3680): n is a, c, g, or t
  misc_feature (3682)..(3682): n is a, c, g, or t
  misc_feature (3684)..(3686): n is a, c, g, or t
  misc_feature (3689)..(3694): n is a, c, g, or t
  misc_feature (3696)..(3697): n is a, c, g, or t
  misc_feature (3699)..(3702): n is a, c, g, or t
  misc_feature (3704)..(3705): n is a, c, g, or t
  misc_feature (3707)..(3708): n is a, c, g, or t
  misc_feature (3711)..(3716): n is a, c, g, or t
  misc_feature (3718)..(3719): n is a, c, g, or t
  misc_feature (3721)..(3721): n is a, c, g, or t
  misc_feature (3723)..(3724): n is a, c, g, or t
  misc_feature (3728)..(3731): n is a, c, g, or t
  misc_feature (3733)..(3733): n is a, c, g, or t
  misc_feature (3735)..(3743): n is a, c, g, or t
  misc_feature (3745)..(3745): n is a, c, g, or t
  misc_feature (3747)..(3749): n is a, c, g, or t
  misc_feature (3754)..(3759): n is a, c, g, or t
  misc_feature (3762)..(3763): n is a, c, g, or t
  misc_feature (3765)..(3765): n is a, c, g, or t
  misc_feature (3767)..(3769): n is a, c, g, or t
  misc_feature (3771)..(3772): n is a, c, g, or t
  misc_feature (3774)..(3774): n is a, c, g, or t
  misc_feature (3776)..(3780): n is a, c, g, or t
  misc_feature (3782)..(3785): n is a, c, g, or t
  misc_feature (3787)..(3788): n is a, c, g, or t
  misc_feature (3791)..(3799): n is a, c, g, or t
  misc_feature (3801)..(3804): n is a, c, g, or t
  misc_feature (3806)..(3806): n is a, c, g, or t
  misc_feature (3808)..(3810): n is a, c, g, or t
  misc_feature (3812)..(3812): n is a, c, g, or t
  misc_feature (3816)..(3818): n is a, c, g, or t
  misc_feature (3820)..(3820): n is a, c, g, or t
  misc_feature (3823)..(3826): n is a, c, g, or t
  misc_feature (3830)..(3830): n is a, c, g, or t
  misc_feature (3832)..(3832): n is a, c, g, or t
  misc_feature (3834)..(3838): n is a, c, g, or t
  misc_feature (3840)..(3842): n is a, c, g, or t
  misc_feature (3844)..(3845): n is a, c, g, or t
  misc_feature (3848)..(3850): n is a, c, g, or t
  misc_feature (3855)..(3857): n is a, c, g, or t
  misc_feature (3860)..(3860): n is a, c, g, or t
  misc_feature (3862)..(3862): n is a, c, g, or t
  misc_feature (3865)..(3865): n is a, c, g, or t
  misc_feature (3868)..(3869): n is a, c, g, or t
  misc_feature (3871)..(3878): n is a, c, g, or t
  misc_feature (3880)..(3884): n is a, c, g, or t
  misc_feature (3888)..(3890): n is a, c, g, or t
  misc_feature (3892)..(3892): n is a, c, g, or t
  misc_feature (3894)..(3894): n is a, c, g, or t
  misc_feature (3896)..(3896): n is a, c, g, or t
  misc_feature (3898)..(3898): n is a, c, g, or t
  misc_feature (3900)..(3902): n is a, c, g, or t
  misc_feature (3904)..(3912): n is a, c, g, or t
  misc_feature (3915)..(3923): n is a, c, g, or t
  misc_feature (3925)..(3926): n is a, c, g, or t
  misc_feature (3929)..(3929): n is a, c, g, or t
  misc_feature (3931)..(3932): n is a, c, g, or t
  misc_feature (3934)..(3936): n is a, c, g, or t
  misc_feature (3938)..(3941): n is a, c, g, or t
  misc_feature (3943)..(3943): n is a, c, g, or t
  misc_feature (3945)..(3945): n is a, c, g, or t
  misc_feature (3954)..(3954): n is a, c, g, or t
  misc_feature (3956)..(3957): n is a, c, g, or t
  misc_feature (3960)..(3961): n is a, c, g, or t
  misc_feature (3963)..(3966): n is a, c, g, or t
  misc_feature (3968)..(3979): n is a, c, g, or t
  misc_feature (3981)..(3981): n is a, c, g, or t
  misc_feature (3983)..(3995): n is a, c, g, or t
  misc_feature (3997)..(3997): n is a, c, g, or t
  misc_feature (3999)..(3999): n is a, c, g, or t
cgagttacggacaaaatttatttcatgatggcctgggtttgcggcctggaactgttgctgctcgggtttttcatcacttatcaagttatcgcacgtaaattcctttgggtaatggcgcccgcgaccgatgttatgagtggatatgtattagcgatggctgccacatgggctttttcgtattccctcagatctggatctcacgttcggatagatgtgttgctcccttacatgagtaaaaacatccgagcgattgctgactgggtggccgtattctccgttgcgttcttcgcttacntcacagcgtggaagatgtgggcgaatgttgtggacaactaccaacggggtgtcgttaccaatgactacccactcacgccgctttttatacctaaaatagttgttgctctgggcttcacacttctagtcattaccgcagtgcagatgatgatatcgttgattactgaggcatggctgcccaggttgcacaagaaactgggaggcgacgagatccaatccttagacgtaatgggccaagaagaagcggcgggcgcagcgtagcttgggcccggcctaggttccaaaggatatctgatttagtaaaatcctctgtaactggggattgagagggtattaaaagtggcgttaggtgtagcgtttggcctaatgggggcatttttcatggcgggactgtatgtcgccgccgctctgggatgcctctctctagtcatcatgtggttcttctccgatgctcccctctggaacatcatggcgaacaaagcatgggaatcaaacacaagcttcatcctcgtggctgtccctctgttcatcttaatgggcgagttgatgaaccgcagcggaatgggcgagaaaatgtattccgcaatatctaaatggatcttctttcttccgggaggcctgatccacaccaacattgtatcttgcgccatctttgcagcttgctccggatctagtgttgcaacatcggcaacgatcagtcgtgtatcgctcccgtcgttccggcaacgcggttactccgagcggatggtgattggatccttagctgcaggtgggaccttgggaatcttgattcctcccagtatcagcttgatcatctatggtgttctagtagaagaatcaattgggagactgtatctcgccggattcattcccgggttcatgctcgctggcatcttcatgttaatgattgcggggctggccatcgtgtggaagggtatggcgccgcgagaagnaggggcgggcttcagttcatgggacggctgggtggacaggatagtcagtctagtaggcctantcccaatgatcgtgctgatattcatcgtcttaggcagcatttatgngggttgggcgactcccagtgaggcagccgcgttcggtgtctctggtgctttcgccttggcaattctcatgaattctcagggcatagtcgcaccaatttttgctaaattcctaatgttgaccggattgatcaatatagtctctgatagcttcaaagaagaaatganatctcacangatgccagattgggcggtgtngagggcaacgttaaacactaactncgatatcgttgtaagcgcaatgatatctactatgcgtaccactggaatgatcttcctgataatcctcgccgcctttaccttgagttttgcattcgcccggttgggaatttctgcgcagatcgcggatacgatcaccagttgggatctgtctccaactatgctggtactcgtgctgatcgtgttctacctaatacttggcactttcatggaaagcttcgcgatgatggtcacgaccgtgcccatcctggtacctaccttggagcaggctggtgttgatctggtttggttcggcatcatcatggtgatattggttgaagctgcgttgattagtcctccggaggggattaacctttatgtgctccacggagtacggcaggatgtcgaccgcgagcaagcgcgactcgcaaatgagattgtgaaagagagcactatcgccgacgtatggataggcgtactaccgtttatggcttgtatgggaatcaccgttgtactagttatgctttttccgcagatcgctctatggctgcctgatctggtcaaaggtagccggtaacggtcaaatctcgattcccgggacgattgagaagagcttcgaccccgtgttagaaccgaattgaatatcgcaaggagttcagaaatgctaagattcngattaactgccatgttgctggtcgtggtttcaattatnctggtcggttgcggttcggatccgaccgcagcccccgcagcccccgcagcccccgcagcnnccgcagcggccgcagcnnccgcagcnccngcagcnncngcngcnccnncngntccnacnnnnnnanaannannngaannannngnnnnnnacgnngccgnnnnggncggngnggtngncnnnnnanacctggnngacctggnngnncnngnngnnncngnngnnnnggnngacnncgncgnnnncgncnnnntcnnnncnctcnntnncnncnannannncnnnnannncnannannncnnnnnnnnnnngnngatnnnnannnnnnccaatcnnaccanncnnancnnnnnnnncannnnnnncnnnnnnnnnnncnnnnnnnncnncnggncnnnnngggcntnnnngnnnnnnnannngncnnnnnngncnnnnntnnnnnnncnnnnnnnnngnnnnnnnnnnnnnntnnnnnncnncntcnnnnnnttnnnnnnggnnggncnngnnnnncncnacnnnntcnnnnnngncgnannngncnnnnncgccnnnnncgncgnctacgnnggnnncgngnngnnngncntnnnngncnnnganntcnngnnnctctnngannncnnnganannnngnnnnaagnnnnnnnngnnannnnngngnnnntcgangngntngngncgnnngnnnnngnngngnncgnnnngnnnnnccnnnncnncnncnncnncnnnnnnnacnncnnntacntnnncnnnnnnganannnttgannncntnnnagnnnnnaannnnnnnannnncngnnnnnnnnnnncggnntngnnngannggatngnngnnnnggncncntnnnnnnnnttcnnngnnntctncnnngnctnnnnannnnnnnnncnggncnnngnngnnnntggtgnnnnngntncnnacgnnnnncncngnnannnnnnnnnnnannnnannannnnnnngntnnnnnnntngnncnnnnnnnncnnngtnancaacgnnnncaannnnnannnnnncnnntcnnnccncnnnnnnntccngnnnnnnnnnnncgnnnannccgnnnngnnngnnntnnngnnnnnnnngatcnnnnnnnnnnnnnnnnnnatnnngnncnnnnngnannnnnnggaanncntnnnnttcnnannnnnnnnnnaagnnnnnnnnnnnnanngnnnnnncnnngnnnnnntnnnncnnnnntngnngaanngngtnnnnngcgncnnnnncnnnnnnnncncngnnatcnncnannnnnncanngnccncntcgnnnnnctnnnnnncnnannnnncgnnncngnnnnnnngnngannnannnnnnannangnnnnncnnnnnnncngncnnnnnnnnngnnntnnnanannnngnnnnncnnnnnngnncncngnnnacnnnnnngnncnnnntnntnnggnnnnnngnngngnnggcnnnngngnnnnnnnnncngnnntaccnnnnnnacnncnannncnncnannnnncnnnnannacnnnnnnnnncnnnnangnnntnaagnnnangannnncagnangnnnnncnnngnnctnnncgacnnnatngncgncanngnnnnnnnngnnnnnttcnnngnantntncnnngnnnnnnnnngcnnnnnnnnngnnacngnngnnncnnnngngncctgcgggncnngcnngnnnngnnnnnnnnnnnncnannnnnnnnnnnnncngnt

SEQ ID NO: 172 - DNA, 4000 bp, Escherichia coli
  misc_feature (1)..(6): n is a, c, g, or t
  misc_feature (8)..(15): n is a, c, g, or t
  misc_feature (17)..(29): n is a, c, g, or t
  misc_feature (32)..(52): n is a, c, g, or t
  misc_feature (54)..(62): n is a, c, g, or t
  misc_feature (64)..(75): n is a, c, g, or t
  misc_feature (77)..(117): n is a, c, g, or t
  misc_feature (119)..(120): n is a, c, g, or t
  misc_feature (122)..(127): n is a, c, g, or t
  misc_feature (129)..(182): n is a, c, g, or t
  misc_feature (184)..(211): n is a, c, g, or t
  misc_feature (213)..(236): n is a, c, g, or t
  misc_feature (238)..(240): n is a, c, g, or t
  misc_feature (242)..(292): n is a, c, g, or t
  misc_feature (294)..(299): n is a, c, g, or t
  misc_feature (301)..(304): n is a, c, g, or t
  misc_feature (306)..(349): n is a, c, g, or t
  misc_feature (351)..(352): n is a, c, g, or t
  misc_feature (354)..(357): n is a, c, g, or t
  misc_feature (359)..(362): n is a, c, g, or t
  misc_feature (364)..(419): n is a, c, g, or t
  misc_feature (421)..(436): n is a, c, g, or t
  misc_feature (438)..(469): n is a, c, g, or t
  misc_feature (471)..(477): n is a, c, g, or t
  misc_feature (479)..(495): n is a, c, g, or t
  misc_feature (497)..(497): n is a, c, g, or t
  misc_feature (499)..(528): n is a, c, g, or t
  misc_feature (530)..(540): n is a, c, g, or t
  misc_feature (542)..(547): n is a, c, g, or t
  misc_feature (549)..(660): n is a, c, g, or t
  misc_feature (662)..(686): n is a, c, g, or t
  misc_feature (688)..(709): n is a, c, g, or t
  misc_feature (711)..(751): n is a, c, g, or t
  misc_feature (753)..(763): n is a, c, g, or t
  misc_feature (765)..(796): n is a, c, g, or t
  misc_feature (798)..(807): n is a, c, g, or t
  misc_feature (809)..(818): n is a, c, g, or t
  misc_feature (820)..(901): n is a, c, g, or t
  misc_feature (903)..(929): n is a, c, g, or t
  misc_feature (931)..(1038): n is a, c, g, or t
  misc_feature (1041)..(1044): n is a, c, g, or t
  misc_feature (1046)..(1047): n is a, c, g, or t
  misc_feature (1049)..(1062): n is a, c, g, or t
  misc_feature (1064)..(1077): n is a, c, g, or t
  misc_feature (1079)..(1079): n is a, c, g, or t
  misc_feature (1083)..(1083): n is a, c, g, or t
  misc_feature (1085)..(1117): n is a, c, g, or t
  misc_feature (1119)..(1147): n is a, c, g, or t
  misc_feature (1149)..(1149): n is a, c, g, or t
  misc_feature (1151)..(1153): n is a, c, g, or t
  misc_feature (1155)..(1185): n is a, c, g, or t
  misc_feature (1187)..(1187): n is a, c, g, or t
  misc_feature (1190)..(1195): n is a, c, g, or t
  misc_feature (1197)..(1198): n is a, c, g, or t
  misc_feature (1200)..(1202): n is a, c, g, or t
  misc_feature (1204)..(1219): n is a, c, g, or t
  misc_feature (1221)..(1229): n is a, c, g, or t
  misc_feature (1231)..(1236): n is a, c, g, or t
  misc_feature (1238)..(1241): n is a, c, g, or t
  misc_feature (1243)..(1244): n is a, c, g, or t
  misc_feature (1246)..(1257): n is a, c, g, or t
  misc_feature (1260)..(1260): n is a, c, g, or t
  misc_feature (1264)..(1264): n is a, c, g, or t
  misc_feature (1266)..(1267): n is a, c, g, or t
  misc_feature (1269)..(1275): n is a, c, g, or t
  misc_feature (1277)..(1278): n is a, c, g, or t
  misc_feature (1281)..(1287): n is a, c, g, or t
  misc_feature (1289)..(1289): n is a, c, g, or t
  misc_feature (1291)..(1291): n is a, c, g, or t
  misc_feature (1293)..(1296): n is a, c, g, or t
  misc_feature (1299)..(1300): n is a, c, g, or t
  misc_feature (1302)..(1303): n is a, c, g, or t
  misc_feature (1305)..(1307): n is a, c, g, or t
  misc_feature (1310)..(1313): n is a, c, g, or t
  misc_feature (1984)..(1984): n is a, c, g, or t
  misc_feature (1986)..(1987): n is a, c, g, or t
  misc_feature (1999)..(1999): n is a, c, g, or t
  misc_feature (2322)..(2327): n is a, c, g, or t
  misc_feature (2330)..(2330): n is a, c, g, or t
  misc_feature (2379)..(2379): n is a, c, g, or t
  misc_feature (2394)..(2394): n is a, c, g, or t
  misc_feature (2447)..(2447): n is a, c, g, or t
  misc_feature (2453)..(2453): n is a, c, g, or t
  misc_feature (2457)..(2458): n is a, c, g, or t
  misc_feature (2572)..(2572): n is a, c, g, or t
  misc_feature (2576)..(2576): n is a, c, g, or t
  misc_feature (2578)..(2578): n is a, c, g, or t
  misc_feature (2592)..(2592): n is a, c, g, or t
  misc_feature (2604)..(2604): n is a, c, g, or t
  misc_feature (2609)..(2609): n is a, c, g, or t
  misc_feature (2615)..(2615): n is a, c, g, or t
  misc_feature (2643)..(2643): n is a, c, g, or t
  misc_feature (2653)..(2655): n is a, c, g, or t
  misc_feature (2658)..(2659): n is a, c, g, or t
  misc_feature (2664)..(2670): n is a, c, g, or t
  misc_feature (2681)..(2688): n is a, c, g, or t
  misc_feature (2694)..(2694): n is a, c, g, or t
  misc_feature (2697)..(2698): n is a, c, g, or t
  misc_feature (2700)..(2701): n is a, c, g, or t
  misc_feature (2704)..(2704): n is a, c, g, or t
  misc_feature (2708)..(2708): n is a, c, g, or t
  misc_feature (2710)..(2710): n is a, c, g, or t
  misc_feature (2712)..(2713): n is a, c, g, or t
  misc_feature (2723)..(2723): n is a, c, g, or t
  misc_feature (2725)..(2725): n is a, c, g, or t
  misc_feature (2730)..(2731): n is a, c, g, or t
  misc_feature (2740)..(2740): n is a, c, g, or t
  misc_feature (2743)..(2743): n is a, c, g, or t
  misc_feature (2750)..(2750): n is a, c, g, or t
  misc_feature (2760)..(2761): n is a, c, g, or t
  misc_feature (2764)..(2764): n is a, c, g, or t
  misc_feature (2767)..(2767): n is a, c, g, or t
  misc_feature (2812)..(2812): n is a, c, g, or t
  misc_feature (2824)..(2824): n is a, c, g, or t
  misc_feature (2837)..(2837): n is a, c, g, or t
  misc_feature (2857)..(2857): n is a, c, g, or t
  misc_feature (2931)..(2931): n is a, c, g, or t
  misc_feature (2934)..(2934): n is a, c, g, or t
  misc_feature (2944)..(2944): n is a, c, g, or t
  misc_feature (2948)..(2949): n is a, c, g, or t
  misc_feature (2953)..(2953): n is a, c, g, or t
  misc_feature (2990)..(2997): n is a, c, g, or t
  misc_feature (2999)..(3003): n is a, c, g, or t
  misc_feature (3006)..(3010): n is a, c, g, or t
  misc_feature (3012)..(3022): n is a, c, g, or t
  misc_feature (3025)..(3025): n is a, c, g, or t
  misc_feature (3027)..(3027): n is a, c, g, or t
  misc_feature (3029)..(3029): n is a, c, g, or t
  misc_feature (3031)..(3033): n is a, c, g, or t
  misc_feature (3035)..(3038): n is a, c, g, or t
  misc_feature (3041)..(3042): n is a, c, g, or t
  misc_feature (3044)..(3046): n is a, c, g, or t
  misc_feature (3048)..(3050): n is a, c, g, or t
  misc_feature (3052)..(3056): n is a, c, g, or t
  misc_feature (3058)..(3058): n is a, c, g, or t
  misc_feature (3060)..(3066): n is a, c, g, or t
  misc_feature (3068)..(3068): n is a, c, g, or t
  misc_feature (3070)..(3072): n is a, c, g, or t
  misc_feature (3074)..(3077): n is a, c, g, or t
  misc_feature (3079)..(3079): n is a, c, g, or t
  misc_feature (3081)..(3081): n is a, c, g, or t
  misc_feature (3084)..(3084): n is a, c, g, or t
  misc_feature (3086)..(3087): n is a, c, g, or t
  misc_feature (3089)..(3111): n is a, c, g, or t
  misc_feature (3113)..(3121): n is a, c, g, or t
  misc_feature (3123)..(3123): n is a, c, g, or t
  misc_feature (3125)..(3126): n is a, c, g, or t
  misc_feature (3128)..(3130): n is a, c, g, or t
  misc_feature (3132)..(3132): n is a, c, g, or t
  misc_feature (3134)..(3134): n is a, c, g, or t
  misc_feature (3136)..(3138): n is a, c, g, or t
  misc_feature (3140)..(3142): n is a, c, g, or t
  misc_feature (3145)..(3145): n is a, c, g, or t
  misc_feature (3147)..(3155): n is a, c, g, or t
  misc_feature (3157)..(3157): n is a, c, g, or t
  misc_feature (3162)..(3162): n is a, c, g, or t
  misc_feature (3164)..(3165): n is a, c, g, or t
  misc_feature (3168)..(3178): n is a, c, g, or t
  misc_feature (3180)..(3183): n is a, c, g, or t
  misc_feature (3185)..(3186): n is a, c, g, or t
  misc_feature (3188)..(3188): n is a, c, g, or t
  misc_feature (3190)..(3190): n is a, c, g, or t
  misc_feature (3192)..(3192): n is a, c, g, or t
  misc_feature (3194)..(3195): n is a, c, g, or t
  misc_feature (3197)..(3197): n is a, c, g, or t
  misc_feature (3201)..(3204): n is a, c, g, or t
  misc_feature (3206)..(3217): n is a, c, g, or t
  misc_feature (3219)..(3219): n is a, c, g, or t
  misc_feature (3221)..(3223): n is a, c, g, or t
  misc_feature (3225)..(3225): n is a, c, g, or t
  misc_feature (3227)..(3227): n is a, c, g, or t
  misc_feature (3229)..(3229): n is a, c, g, or t
  misc_feature (3231)..(3237): n is a, c, g, or t
  misc_feature (3239)..(3239): n is a, c, g, or t
  misc_feature (3241)..(3241): n is a, c, g, or t
  misc_feature (3243)..(3245): n is a, c, g, or t
  misc_feature (3250)..(3258): n is a, c, g, or t
  misc_feature (3260)..(3261): n is a, c, g, or t
  misc_feature (3263)..(3263): n is a, c, g, or t
  misc_feature (3265)..(3275): n is a, c, g, or t
  misc_feature (3277)..(3279): n is a, c, g, or t
  misc_feature (3281)..(3282): n is a, c, g, or t
  misc_feature (3284)..(3288): n is a, c, g, or t
  misc_feature (3292)..(3292): n is a, c, g, or t
  misc_feature (3294)..(3308): n is a, c, g, or t
  misc_feature (3311)..(3314): n is a, c, g, or t
  misc_feature (3317)..(3317): n is a, c, g, or t
  misc_feature (3322)..(3325): n is a, c, g, or t
  misc_feature (3327)..(3336): n is a, c, g, or t
  misc_feature (3338)..(3341): n is a, c, g, or t
  misc_feature (3344)..(3346): n is a, c, g, or t
  misc_feature (3348)..(3353): n is a, c, g, or t
  misc_feature (3355)..(3357): n is a, c, g, or t
  misc_feature (3360)..(3360): n is a, c, g, or t
  misc_feature (3362)..(3366): n is a, c, g, or t
  misc_feature (3368)..(3370): n is a, c, g, or t
  misc_feature (3372)..(3372): n is a, c, g, or t
  misc_feature (3374)..(3377): n is a, c, g, or t
  misc_feature (3379)..(3380): n is a, c, g, or t
  misc_feature (3382)..(3391): n is a, c, g, or t
  misc_feature (3394)..(3394): n is a, c, g, or t
  misc_feature (3396)..(3396): n is a, c, g, or t
  misc_feature (3399)..(3402): n is a, c, g, or t
  misc_feature (3404)..(3404): n is a, c, g, or t
  misc_feature (3407)..(3418): n is a, c, g, or t
  misc_feature (3420)..(3420): n is a, c, g, or t
  misc_feature (3422)..(3422): n is a, c, g, or t
  misc_feature (3425)..(3431): n is a, c, g, or t
  misc_feature (3433)..(3446): n is a, c, g, or t
  misc_feature (3448)..(3449): n is a, c, g, or t
  misc_feature (3452)..(3452): n is a, c, g, or t
  misc_feature (3456)..(3462): n is a, c, g, or t
  misc_feature (3464)..(3473): n is a, c, g, or t
  misc_feature (3475)..(3477): n is a, c, g, or t
  misc_feature (3479)..(3482): n is a, c, g, or t
  misc_feature (3484)..(3486): n is a, c, g, or t
  misc_feature (3488)..(3490): n is a, c, g, or t
  misc_feature (3493)..(3497): n is a, c, g, or t
  misc_feature (3499)..(3500): n is a, c, g, or t
  misc_feature (3503)..(3504): n is a, c, g, or t
  misc_feature (3506)..(3508): n is a, c, g, or t
  misc_feature (3511)..(3520): n is a, c, g, or t
  misc_feature (3522)..(3522): n is a, c, g, or t
  misc_feature (3526)..(3526): n is a, c, g, or t
  misc_feature (3528)..(3537): n is a, c, g, or t
  misc_feature (3541)..(3542): n is a, c, g, or t
  misc_feature (3544)..(3545): n is a, c, g, or t
  misc_feature (3547)..(3557): n is a, c, g, or t
  misc_feature (3559)..(3592): n is a, c, g, or t
  misc_feature (3594)..(3600): n is a, c, g, or t
  misc_feature (3602)..(3610): n is a, c, g, or t
  misc_feature (3613)..(3616): n is a, c, g, or t
  misc_feature (3618)..(3618): n is a, c, g, or t
  misc_feature (3620)..(3622): n is a, c, g, or t
  misc_feature (3624)..(3624): n is a, c, g, or t
  misc_feature (3626)..(3626): n is a, c, g, or t
  misc_feature (3629)..(3634): n is a, c, g, or t
  misc_feature (3636)..(3639): n is a, c, g, or t
  misc_feature (3641)..(3646): n is a, c, g, or t
  misc_feature (3648)..(3655): n is a, c, g, or t
  misc_feature (3657)..(3658): n is a, c, g, or t
  misc_feature (3660)..(3663): n is a, c, g, or t
  misc_feature (3665)..(3671): n is a, c, g, or t
  misc_feature (3673)..(3673): n is a, c, g, or t
  misc_feature (3675)..(3675): n is a, c, g, or t
  misc_feature (3677)..(3678): n is a, c, g, or t
  misc_feature (3680)..(3690): n is a, c, g, or t
  misc_feature (3692)..(3694): n is a, c, g, or t
  misc_feature (3696)..(3696): n is a, c, g, or t
  misc_feature (3698)..(3698): n is a, c, g, or t
  misc_feature (3701)..(3705): n is a, c, g, or t
  misc_feature (3708)..(3709): n is a, c, g, or t
  misc_feature (3711)..(3711): n is a, c, g, or t
  misc_feature (3713)..(3726): n is a, c, g, or t
  misc_feature (3728)..(3729): n is a, c, g, or t
  misc_feature (3731)..(3735): n is a, c, g, or t
  misc_feature (3739)..(3743): n is a, c, g, or t
  misc_feature (3746)..(3746): n is a, c, g, or t
  misc_feature (3748)..(3748): n is a, c, g, or t
  misc_feature (3750)..(3758): n is a, c, g, or t
  misc_feature (3760)..(3767): n is a, c, g, or t
  misc_feature (3769)..(3769): n is a, c, g, or t
  misc_feature (3771)..(3773): n is a, c, g, or t
  misc_feature (3775)..(3779): n is a, c, g, or t
  misc_feature (3781)..(3784): n is a, c, g, or t
  misc_feature (3786)..(3787): n is a, c, g, or t
  misc_feature (3789)..(3790): n is a, c, g, or t
  misc_feature (3792)..(3796): n is a, c, g, or t
  misc_feature (3799)..(3799): n is a, c, g, or t
  misc_feature (3801)..(3801): n is a, c, g, or t
  misc_feature (3803)..(3812): n is a, c, g, or t
  misc_feature (3814)..(3816): n is a, c, g, or t
  misc_feature (3818)..(3819): n is a, c, g, or t
  misc_feature (3821)..(3825): n is a, c, g, or t
  misc_feature (3827)..(3827): n is a, c, g, or t
  misc_feature (3829)..(3830): n is a, c, g, or t
  misc_feature (3834)..(3844): n is a, c, g, or t
  misc_feature (3846)..(3850): n is a, c, g, or t
  misc_feature (3852)..(3852): n is a, c, g, or t
  misc_feature (3854)..(3854): n is a, c, g, or t
  misc_feature (3857)..(3857): n is a, c, g, or t
  misc_feature (3859)..(3859): n is a, c, g, or t
  misc_feature (3861)..(3870): n is a, c, g, or t
  misc_feature (3872)..(3882): n is a, c, g, or t
  misc_feature (3884)..(3896): n is a, c, g, or t
  misc_feature (3898)..(3898): n is a, c, g, or t
  misc_feature (3900)..(3900): n is a, c, g, or t
  misc_feature (3902)..(3903): n is a, c, g, or t
  misc_feature (3905)..(3907): n is a, c, g, or t
  misc_feature (3909)..(3919): n is a, c, g, or t
  misc_feature (3922)..(3923): n is a, c, g, or t
  misc_feature (3926)..(3935): n is a, c, g, or t
  misc_feature (3937)..(3940): n is a, c, g, or t
  misc_feature (3943)..(3944): n is a, c, g, or t
  misc_feature (3947)..(3948): n is a, c, g, or t
  misc_feature (3950)..(3957): n is a, c, g, or t
  misc_feature (3960)..(3963): n is a, c, g, or t
  misc_feature (3965)..(3965): n is a, c, g, or t
  misc_feature (3967)..(3967): n is a, c, g, or t
  misc_feature (3969)..(3970): n is a, c, g, or t
  misc_feature (3972)..(3985): n is a, c, g, or t
  misc_feature (3987)..(3988): n is a, c, g, or t
  misc_feature (3993)..(3993): n is a, c, g, or t
  misc_feature (3996)..(3996): n is a, c, g, or t
  misc_feature (3998)..(3999): n is a, c, g, or t
nnnnnnannnnnnnnannnnnnnnnnnnnttnnnnnnnnnnnnnnnnnnnnnannnnnnnnnannnnnnnnnnnntnnnnnnnnnnnnnnnnnnnnnnnnnnnnnnnnnnnnnnnnnannannnnnnannnnnnnnnnnnnnnnnnnnnnnnnnnnnnnnnnnnnnnnnnnnnnnnnnnnnnannnnnnnnnnnnnnnnnnnnnnnnnnnnannnnnnnnnnnnnnnnnnnnnnnnannnannnnnnnnnnnnnnnnnnnnnnnnnnnnnnnnnnnnnnnnnnnnnnnnnnnannnnnnannnnannnnnnnnnnnnnnnnnnnnnnnnnnnnnnnnnnnnnnnnnnnnannannnnannnnannnnnnnnnnnnnnnnnnnnnnnnnnnnnnnnnnnnnnnnnnnnnnnnnnnnnnnnannnnnnnnnnnnnnnnannnnnnnnnnnnnnnnnnnnnnnnnnnnnnnnannnnnnnannnnnnnnnnnnnnnnnanannnnnnnnnnnnnnnnnnnnnnnnnnnnnnannnnnnnnnnnannnnnntnnnnnnnnnnnnnnnnnnnnnnnnnnnnnnnnnnnnnnnnnnnnnnnnnnnnnnnnnnnnnnnnnnnnnnnnnnnnnnnnnnnnnnnnnnnnnnnnnnnnnnnnnnnnnnnnannnnnnnnnnnnnnnnnnnnnnnnnannnnnnnnnnnnnnnnnnnnnnannnnnnnnnnnnnnnnnnnnnnnnnnnnnnnnnnnnnnnnnannnnnnnnnnnannnnnnnnnnnnnnnnnnnnnnnnnnnnnnnnannnnnnnnnnannnnnnnnnntnnnnnnnnnnnnnnnnnnnnnnnnnnnnnnnnnnnnnnnnnnnnnnnnnnnnnnnnnnnnnnnnnnnnnnnnnnnnnnnnnnannnnnnnnnnnnnnnnnnnnnnnnnnnannnnnnnnnnnnnnnnnnnnnnnnnnnnnnnnnnnnnnnnnnnnnnnnnnnnnnnnnnnnnnnnnnnnnnnnnnnnnnnnnnnnnnnnnnnnnnnnnnnnnnnnnnnnaannnnannannnnnnnnnnnnnnannnnnnnnnnnnnnanaaanannnnnnnnnnnnnnnnnnnnnnnnnnnnnnnnncnnnnnnnnnnnnnnnnnnnnnnnnnnnnntncnnnannnnnnnnnnnnnnnnnnnnnnnnnnnnnnncnttnnnnnntnntnnntnnnnnnnnnnnnnnnntnnnnnnnnnannnnnnannnntnnannnnnnnnnnnnaanaaanannannnnnnnannaannnnnnntncncnnnnccnngnngnnnggnnnngacgtacataagcttacgggttattagtactactcgactatgacattactgcctttacatctatagcctatcaacgtggtcatcttccacgacccttaaaagaaatctcatcttgtggtgggtttcgcgcttatatgctttcagcgcttatcccttccaaacgtagctactctgcggtgctcctggcggaacaacagatacaccagaggtttgtccaattcggtcctctcgtactagaatcagatccactcaaatttctaacgcccacagtagatagagaccgaactgtctcacgacgttctgaacccagctcgcgtgccactttaatgggcgaacagcccaacccttgggaccttctccagccccaggatgtgacgagccgacatcgaggtgccaaacccccccgtcgatatgagctcttgggggagatcagcctgttatccccggcgtaccttttatcctttgagcgatggcccttccatgcggaaccaccggatcactatgctctactttcgtacctgatcgacctgtatgtctctcagtcaagctcccttatgccattgcactctacgcacggttaccaagcgtgctgagggaacctttagaagcctccgttactcttttggaggcgaccaccccagtcaaactacccaccaagcaatgtcccccgnannacggggttaganctcagataagcaaagggtggtatttcaacaatgactccacaacgcctagcgacgccacttcatagtctcccacctatcctacacatcacttatccaagaccaatactaagctatagtaaaggtgcacagggtcttttcgtcccactgcgggtaatcggcatcttcaccgatactacaatttcaccgagctcatggctgagacagtgtccagatcgttacaccattcgtgcaggtcggaacttacccgacaaggaatttcgctaccttaggaccgttatagttacggccgccgtttactggggcttcaattcaatgcttctccnnnnnnatnacatctcctcttaaccttccagcaccgggcaggtgtcaggccctatacntcatcttacgatttngcagagccctgtgtttttgataaacagtcgcctggaccttttcactgcggccngcattnctgnnggcgacctttctcccgaagttacaggtctattttgcctaattccttagccatgaatctctcgagcaccttaggattctctcctcgactacctgtgtcggtttacggtacgggtncttntnatctaagtttagangtttttcttggnagccnttaggnacactatctctttgtccgaagactccgngtactatcannnttnnccaannnnnnnggatttgcctnnnnnnnntatagntanntnnttnaacnancnnttccgtcagntngcggnnctttcatcnctncgtcacnccatcacaannaanagnagtacgggaatattaacccgttggccatcgactgtccctttcggnttcgccttaggncccgactaacccncagctgattagcatagctgnggaaaccttagtctttcggtgtgcgggtttctcgcccgcattatcgttacttatgcctacattttcttttctanccngtccagcatncctnncganacaccttcaaccctgttagaatgctcccctaccactnnnnnnnntnnnnnaannnnnannnnnnnnnnnatntntntnnncnnnnttnntnnncnnncnnnnncncnnnnnnngngnnntnnnncncnctntnnannnnnnnnnnnnnnnnnnnnnnnannnnnnnnntntnngnnnananannncnnnttntnnnnnnnnnanatatntnnggnnnnnnnnnnngnnnntnngntntntnncnctcnnnnannnnnnnnnnnncncnnncncncncnnnnnnnananannntatannnnnnnnngnntntnnnnnnnnnnngnnngnngnnnnncccncnnnnnnnnnnnnnnnctnnnnctntatannnntnnnnnnnnnncnnnncannnannnnnntnnnggngnnnnngnnntntnnnngnntnnnnnnnnnntcncnccnnnncncannnnnnnnnnnnantnttnnnnnnnannnnnnnnnnnnnncnnctntgtnnnnnnncnnnnnnnnnncnnncnnnngnnnannncannnnntnncgnntnnnacnnnnnnnnnnancgcncnnnnnnnnnnctcnntnncnnnnnnnnnnngnnnnnnnnnnnnnnnnnnnnnnnnnnnnnnnnnncnnnnnnncnnnnnnnnnaannnncncnnncncnccnnnnnngnnnncnnnnnncnnnnnnnngnntnnnntnnnnnnntntntnncnnnnnnnnnnncnnntntnttnnnnnctnncncnnnnnnnnnnnnnncnntnnnnntctnnnnngtntntnnnnnnnnngnnnnnnnncncnnnannnnnannnngnntnncnnnnnccncncnnnnnnnnnnannncnntnnnnntntnntctnnnnnnnnnnngnnnnncncnctntntnnnnnnnnnntnnnnnnnnnnntnnnnnnnnnnnnnanananntnnngnnnnnnnnnnnccnnaannnnnnnnnnannnnttnngtnngnnnnnnnncgnnnncncncnncnnnnnnnnnnnnnncnnttttnttntnnt

SEQ ID NO: 173 - DNA, 4000 bp, Escherichia coli
  misc_feature (40)..(40): n is a, c, g, or t
  misc_feature (82)..(82): n is a, c, g, or t
  misc_feature (885)..(885): n is a, c, g, or t
  misc_feature (894)..(894): n is a, c, g, or t
  misc_feature (1930)..(1931): n is a, c, g, or t
  misc_feature (1933)..(1933): n is a, c, g, or t
  misc_feature (1942)..(1943): n is a, c, g, or t
  misc_feature (1958)..(1958): n is a, c, g, or t
  misc_feature (1963)..(1964): n is a, c, g, or t
  misc_feature (1969)..(1969): n is a, c, g, or t
  misc_feature (1972)..(1972): n is a, c, g, or t
  misc_feature (1984)..(1985): n is a, c, g, or t
  misc_feature (1987)..(1987): n is a, c, g, or t
  misc_feature (1990)..(1990): n is a, c, g, or t
  misc_feature (1996)..(1996): n is a, c, g, or t
  misc_feature (1999)..(1999): n is a, c, g, or t
  misc_feature (2583)..(2583): n is a, c, g, or t
  misc_feature (2612)..(2612): n is a, c, g, or t
  misc_feature (2661)..(2661): n is a, c, g, or t
  misc_feature (2695)..(2695): n is a, c, g, or t
  misc_feature (2697)..(2697): n is a, c, g, or t
  misc_feature (2754)..(2754): n is a, c, g, or t
  misc_feature (2762)..(2762): n is a, c, g, or t
  misc_feature (2779)..(2779): n is a, c, g, or t
  misc_feature (2782)..(2783): n is a, c, g, or t
  misc_feature (2807)..(2807): n is a, c, g, or t
  misc_feature (2810)..(2810): n is a, c, g, or t
  misc_feature (2814)..(2814): n is a, c, g, or t
  misc_feature (2825)..(2825): n is a, c, g, or t
  misc_feature (2828)..(2828): n is a, c, g, or t
  misc_feature (2831)..(2831): n is a, c, g, or t
  misc_feature (2837)..(2837): n is a, c, g, or t
  misc_feature (2847)..(2847): n is a, c, g, or t
  misc_feature (2852)..(2852): n is a, c, g, or t
  misc_feature (2864)..(2864): n is a, c, g, or t
  misc_feature (2871)..(2871): n is a, c, g, or t
  misc_feature (2885)..(2885): n is a, c, g, or t
  misc_feature (2887)..(2888): n is a, c, g, or t
  misc_feature (2900)..(2900): n is a, c, g, or t
  misc_feature (2903)..(2903): n is a, c, g, or t
  misc_feature (2924)..(2925): n is a, c, g, or t
  misc_feature (2927)..(2927): n is a, c, g, or t
  misc_feature (2936)..(2936): n is a, c, g, or t
  misc_feature (2963)..(2963): n is a, c, g, or t
  misc_feature (2993)..(2993): n is a, c, g, or t
  misc_feature (2999)..(2999): n is a, c, g, or t
  misc_feature (3029)..(3029): n is a, c, g, or t
  misc_feature (3047)..(3047): n is a, c, g, or t
  misc_feature (3050)..(3051): n is a, c, g, or t
  misc_feature (3053)..(3053): n is a, c, g, or t
  misc_feature (3074)..(3074): n is a, c, g, or t
  misc_feature (3082)..(3083): n is a, c, g, or t
  misc_feature (3086)..(3086): n is a, c, g, or t
  misc_feature (3103)..(3103): n is a, c, g, or t
  misc_feature (3107)..(3107): n is a, c, g, or t
  misc_feature (3118)..(3118): n is a, c, g, or t
  misc_feature (3125)..(3125): n is a, c, g, or t
  misc_feature (3137)..(3137): n is a, c, g, or t
  misc_feature (3142)..(3143): n is a, c, g, or t
  misc_feature (3146)..(3146): n is a, c, g, or t
  misc_feature (3152)..(3152): n is a, c, g, or t
  misc_feature (3158)..(3158): n is a, c, g, or t
  misc_feature (3161)..(3162): n is a, c, g, or t
  misc_feature (3170)..(3171): n is a, c, g, or t
  misc_feature (3182)..(3182): n is a, c, g, or t
  misc_feature (3191)..(3191): n is a, c, g, or t
  misc_feature (3194)..(3194): n is a, c, g, or t
  misc_feature (3203)..(3203): n is a, c, g, or t
  misc_feature (3208)..(3209): n is a, c, g, or t
  misc_feature (3212)..(3212): n is a, c, g, or t
  misc_feature (3224)..(3224): n is a, c, g, or t
  misc_feature (3227)..(3227): n is a, c, g, or t
  misc_feature (3229)..(3230): n is a, c, g, or t
  misc_feature (3233)..(3234): n is a, c, g, or t
  misc_feature (3236)..(3236): n is a, c, g, or t
  misc_feature (3239)..(3240): n is a, c, g, or t
  misc_feature (3247)..(3247): n is a, c, g, or t
  misc_feature (3249)..(3249): n is a, c, g, or t
  misc_feature (3251)..(3251): n is a, c, g, or t
  misc_feature (3260)..(3260): n is a, c, g, or t
  misc_feature (3263)..(3263): n is a, c, g, or t
  misc_feature (3266)..(3266): n is a, c, g, or t
  misc_feature (3274)..(3275): n is a, c, g, or t
  misc_feature (3281)..(3282): n is a, c, g, or t
  misc_feature (3296)..(3296): n is a, c, g, or t
  misc_feature (3302)..(3302): n is a, c, g, or t
  misc_feature (3305)..(3305): n is a, c, g, or t
  misc_feature (3317)..(3317): n is a, c, g, or t
  misc_feature (3320)..(3320): n is a, c, g, or t
  misc_feature (3326)..(3326): n is a, c, g, or t
  misc_feature (3341)..(3341): n is a, c, g, or t
  misc_feature (3364)..(3365): n is a, c, g, or t
  misc_feature (3368)..(3368): n is a, c, g, or t
  misc_feature (3383)..(3384): n is a, c, g, or t
  misc_feature (3386)..(3386): n is a, c, g, or t
  misc_feature (3395)..(3397): n is a, c, g, or t
  misc_feature (3402)..(3408): n is a, c, g, or t
  misc_feature (3410)..(3410): n is a, c, g, or t
  misc_feature (3413)..(3417): n is a, c, g, or t
  misc_feature (3419)..(3426): n is a, c, g, or t
  misc_feature (3428)..(3431): n is a, c, g, or t
  misc_feature (3433)..(3437): n is a, c, g, or t
  misc_feature (3439)..(3439): n is a, c, g, or t
  misc_feature (3441)..(3441): n is a, c, g, or t
  misc_feature (3443)..(3443): n is a, c, g, or t
  misc_feature (3445)..(3445): n is a, c, g, or t
  misc_feature (3447)..(3448): n is a, c, g, or t
  misc_feature (3450)..(3451): n is a, c, g, or t
  misc_feature (3455)..(3456): n is a, c, g, or t
  misc_feature (3458)..(3459): n is a, c, g, or t
  misc_feature (3462)..(3463): n is a, c, g, or t
  misc_feature (3465)..(3466): n is a, c, g, or t
  misc_feature (3470)..(3470): n is a, c, g, or t
  misc_feature (3473)..(3474): n is a, c, g, or t
  misc_feature (3476)..(3476): n is a, c, g, or t
  misc_feature (3478)..(3478): n is a, c, g, or t
  misc_feature (3480)..(3480): n is a, c, g, or t
  misc_feature (3482)..(3483): n is a, c, g, or t
  misc_feature (3487)..(3487): n is a, c, g, or t
  misc_feature (3489)..(3489): n is a, c, g, or t
  misc_feature (3496)..(3497): n is a, c, g, or t
  misc_feature (3500)..(3500): n is a, c, g, or t
  misc_feature (3504)..(3504): n is a, c, g, or t
  misc_feature (3508)..(3510): n is a, c, g, or t
  misc_feature (3513)..(3513): n is a, c, g, or t
  misc_feature (3515)..(3517): n is a, c, g, or t
  misc_feature (3520)..(3522): n is a, c, g, or t
  misc_feature (3525)..(3526): n is a, c, g, or t
  misc_feature (3531)..(3531): n is a, c, g, or t
  misc_feature (3533)..(3534): n is a, c, g, or t
  misc_feature (3536)..(3536): n is a, c, g, or t
  misc_feature (3539)..(3544): n is a, c, g, or t
  misc_feature (3546)..(3547): n is a, c, g, or t
  misc_feature (3549)..(3549): n is a, c, g, or t
  misc_feature (3555)..(3558): n is a, c, g, or t
  misc_feature (3560)..(3562): n is a, c, g, or t
  misc_feature (3564)..(3564): n is a, c, g, or t
  misc_feature (3568)..(3570): n is a, c, g, or t
  misc_feature (3574)..(3574): n is a, c, g, or t
  misc_feature (3578)..(3580): n is a, c, g, or t
  misc_feature (3582)..(3582): n is a, c, g, or t
  misc_feature (3585)..(3586): n is a, c, g, or t
  misc_feature (3589)..(3590): n is a, c, g, or t
  misc_feature (3593)..(3597): n is a, c, g, or t
  misc_feature (3600)..(3602): n is a, c, g, or t
  misc_feature (3604)..(3604): n is a, c, g, or t
  misc_feature (3606)..(3606): n is a, c, g, or t
  misc_feature (3609)..(3611): n is a, c, g, or t
  misc_feature (3615)..(3615): n is a, c, g, or t
  misc_feature (3617)..(3619): n is a, c, g, or t
  misc_feature (3621)..(3624): n is a, c, g, or t
  misc_feature (3626)..(3626): n is a, c, g, or t
  misc_feature (3630)..(3630): n is a, c, g, or t
  misc_feature (3632)..(3635): n is a, c, g, or t
  misc_feature (3637)..(3637): n is a, c, g, or t
  misc_feature (3641)..(3641): n is a, c, g, or t
  misc_feature (3643)..(3643): n is a, c, g, or t
  misc_feature (3645)..(3646): n is a, c, g, or t
  misc_feature (3651)..(3651): n is a, c, g, or t
  misc_feature (3653)..(3653): n is a, c, g, or t
  misc_feature (3656)..(3668): n is a, c, g, or t
  misc_feature (3670)..(3671): n is a, c, g, or t
  misc_feature (3675)..(3675): n is a, c, g, or t
  misc_feature (3679)..(3679): n is a, c, g, or t
  misc_feature (3682)..(3686): n is a, c, g, or t
  misc_feature (3690)..(3690): n is a, c, g, or t
  misc_feature (3692)..(3693): n is a, c, g, or t
  misc_feature (3696)..(3698): n is a, c, g, or t
  misc_feature (3700)..(3701): n is a, c, g, or t
  misc_feature (3703)..(3704): n is a, c, g, or t
  misc_feature (3707)..(3707): n is a, c, g, or t
  misc_feature (3710)..(3710): n is a, c, g, or t
  misc_feature (3712)..(3721): n is a, c, g, or t
  misc_feature (3723)..(3725): n is a, c, g, or t
  misc_feature (3727)..(3727): n is a, c, g, or t
  misc_feature (3731)..(3731): n is a, c, g, or t
  misc_feature (3735)..(3737): n is a, c, g, or t
  misc_feature (3744)..(3745): n is a, c, g, or t
  misc_feature (3748)..(3748): n is a, c, g, or t
  misc_feature (3752)..(3752): n is a, c, g, or t
  misc_feature (3754)..(3755): n is a, c, g, or t
  misc_feature (3757)..(3759): n is a, c, g, or t
  misc_feature (3763)..(3763): n is a, c, g, or t
  misc_feature (3765)..(3766): n is a, c, g, or t
  misc_feature (3768)..(3768): n is a, c, g, or t
  misc_feature (3771)..(3771): n is a, c, g, or t
  misc_feature (3774)..(3774): n is a, c, g, or t
  misc_feature (3776)..(3776): n is a, c, g, or t
  misc_feature (3778)..(3787): n is a, c, g, or t
  misc_feature (3789)..(3790): n is a, c, g, or t
  misc_feature (3792)..(3792): n is a, c, g, or t
  misc_feature (3796)..(3797): n is a, c, g, or t
  misc_feature (3799)..(3802): n is a, c, g, or t
  misc_feature (3808)..(3808): n is a, c, g, or t
  misc_feature (3813)..(3813): n is a, c, g, or t
  misc_feature (3819)..(3822): n is a, c, g, or t
  misc_feature (3825)..(3827): n is a, c, g, or t
  misc_feature (3832)..(3832): n is a, c, g, or t
  misc_feature (3834)..(3834): n is a, c, g, or t
  misc_feature (3837)..(3839): n is a, c, g, or t
  misc_feature (3841)..(3841): n is a, c, g, or t
  misc_feature (3843)..(3843): n is a, c, g, or t
  misc_feature (3845)..(3846): n is a, c, g, or t
  misc_feature (3848)..(3848): n is a, c, g, or t
  misc_feature (3853)..(3854): n is a, c, g, or t
  misc_feature (3856)..(3856): n is a, c, g, or t
  misc_feature (3858)..(3858): n is a, c, g, or t
  misc_feature (3860)..(3863): n is a, c, g, or t
  misc_feature (3870)..(3871): n is a, c, g, or t
  misc_feature (3874)..(3876): n is a, c, g, or t
  misc_feature (3879)..(3879): n is a, c, g, or t
  misc_feature (3885)..(3885): n is a, c, g, or t
  misc_feature (3888)..(3889): n is a, c, g, or t
  misc_feature (3891)..(3893): n is a, c, g, or t
  misc_feature (3898)..(3898): n is a, c, g, or t
  misc_feature (3903)..(3903): n is a, c, g, or t
  misc_feature (3905)..(3905): n is a, c, g, or t
  misc_feature (3907)..(3907): n is a, c, g, or t
  misc_feature (3909)..(3909): n is a, c, g, or t
  misc_feature (3912)..(3916): n is a, c, g, or t
  misc_feature (3918)..(3918): n is a, c, g, or t
  misc_feature (3920)..(3921): n is a, c, g, or t
  misc_feature (3924)..(3925): n is a, c, g, or t
  misc_feature (3928)..(3928): n is a, c, g, or t
  misc_feature (3931)..(3931): n is a, c, g, or t
  misc_feature (3933)..(3937): n is a, c, g, or t
  misc_feature (3939)..(3939): n is a, c, g, or t
  misc_feature (3944)..(3944): n is a, c, g, or t
  misc_feature (3946)..(3946): n is a, c, g, or t
  misc_feature (3948)..(3949): n is a, c, g, or t
  misc_feature (3953)..(3954): n is a, c, g, or t
  misc_feature (3957)..(3959): n is a, c, g, or t
  misc_feature (3963)..(3966): n is a, c, g, or t
  misc_feature (3968)..(3968): n is a, c, g, or t
  misc_feature (3970)..(3973): n is a, c, g, or t
  misc_feature (3975)..(3978): n is a, c, g, or t
  misc_feature (3982)..(3985): n is a, c, g, or t
  misc_feature (3989)..(3990): n is a, c, g, or t
  misc_feature (3993)..(3994): n is a, c, g, or t
  misc_feature (3996)..(3996): n is a, c, g, or t
  misc_feature (3998)..(3999): n is a, c, g, or t
aaaagccacagaagccgcaaaaaaagccaacgatgcggcngcattggcaaacgaaaaagctgtggcggcagatacggcggcngggcgtgtgaatgccgcaataacgcaagccaataccgctgccacaaacgctcaacaacaagcgtcagccgcaggagaagcggcggcagaagcaacggaaagtgtggctgaaatgaacgccgccctcgcccgtttggaagaattggagcagacaatcacggctaaagaccgtaaacagccaacgggaatggaattagagtttcctaaaaaaataacaaaaggaaacaaagacattctgagagtaatagctaccctatccccggcgggaacgggtaacaatgtccttttcttgggcgatgacaaagcggtttccgttgcccctgacggttttctgaccgtgaacagtgtcggcataagcaaaatacacgtcattccgacagaaaacacaagcatttatcgaaccattgatattgaagtcgttccgcagtctgtcaggctttgcacgaaatcaactttgcgcctaaccgcaaatggcaaattcaggttcaattaaaataatttttcaacaaataaaacttttaaattatggcactatcaacagatgaagaaaacaaagtaagggaaatcattgaagcgttcacaaacggaaaacgattgagtgacttacccaatgtttctgggaataacccattcaatcttttgtgtgaggtcttagaagacggagaaagcaaaaaagcagctctcgcaactatgttgccttatatggaagagcagtgtatgtacggcattgagcgagacaagaccgtttcatcacgtttagtaacccgaattggcaatactgctcttcacaagtcccttcccgtncataaccgnatgaggggctgtcttcttgacgatgacggcaacgtggttgaatatctcaatccacgtgattggacggggcatgtcagagacggttcacggggacaagtcatggtcgagtttggggacttctattgccgttttgaaacaagcgcaaatattgagcgggtcaaattctctctctttcctcttcccggctatcgttatgttcctttgatgtacgtatcggcatacgaagctactgttcagagaagtacgaacaagctatcttctgtggtcaatacaacggctgactaccgaggcggtgcaaatcaggctgactgggacacactctcaaaaacggttctcggaagaccagctacacaaatcagccgcacgaatttcagaacgtatgcccgaaacagaaaagcgggcagcactaagtggaactgtatgacgtatgacgttcaaaagatgctctattggctctttgttgttgaatacgcaacgctcaactctcaggaggctttcaacacccaattgacggctgagggctatcgtcaaggcggtctcggagacggggttacaacacttgacagcggcaaatggaacacgtttaacggttattatccttttatcccttgtggctatacggatgaactcggaaacggaacaggcgaaaaagaatataccatgcccactgaatatgacgcttcttcaaagaaagtcaaagtgtgccgttatcgtggtatcgaaaacccgtttgggcatatttggcagtggactgatggcatcaacgtacgcattaatcccggctcgaacggcttgtcagaagtctttgtttgctctgacccctcaaaattcaatgacagtaactataacggatatagtcatgttgggaatgaagcccgtgccgagggatatgttaaagaaattatttttggagaaagcggcgaaatcattcctgctctcgtaggcggcggttctaccacatatttctgtgactatcactatacaaacatccctgcttcggtggctctccgtggtgtcctgttcggcggtagcgcgnntnacggtgcgnntgcgggtctcgcttntgcgnnttcgnctnacgccccctcgnntncgnctgcgnatntcggttctcgcctttgctttatacccacgtcagcgtaacacgctttgagtgataaccttttccctgcctctttgtggggcagggttcaaataataacagtataaaacgatgattgaagaaatgaacaacataccaaaagaagatgacggaagcctcgctttcctgaatatcccgagagatgaaaacagcaggagtttcaattgtgatgaaacgacacaatcaaaactcgtaaacaccacgttttgggtggttgatttcattgaagaagttccgacaagattcagcaaggctaaaggagtaaaaggtcagacgcttgtaaaaatcaagccatcaaaagacagtttggaatcagatgccaagaaatttttcactggttcatccgacattctttatgttttgaagaaaatcaaagaaatgaataagtttccccgaaaagttactttgaggggtaacggtaacagatattattttgaataagaaaacaatgaaataacaaaataaaaaggtgggtcattcttgtggtgtcctgttcagcggtaacgcgaataacagtgcgaatgcaggtctcgcttatgcgaattcgnataacaccccctcgaatacgaatgcgaanatcggttctcacctatgctttaaaattggttttgacaatatgaaacaanataaaagaatgacagccttgccacttggcaaaananttcaagcaaacctcctaaaagtgttggtaggaacgcctgttgtatgggctaccgaanactctgantaagaaaagcaaagcanaannatgaaaagaataggtaatttatanaanaaantaatctccgtnganaanttgcgngaagctgacnaaaangcacgcaaaggnaaaacanacacatacggagtnanngttcacgacaanaancgtgaagcaaatattcttgcnntncatgaagcnttgctgacaaagacgttcaaaacctcnccttatgatgtcttcacgatttttgaaccnaagganaggcttattttccgtcttccgtactatccngacagaatagtacatcangcnntnatgaatgttcttgaaccgatntgggtcannacnttcacgcacaatacttnttcntgtgtcaaggnacgtggnatagaggggtgngcccnncanataganaaaatnatnnagaagtannaaggcaagccnttatactgnctnaaaattganataannaantattatccctcnatnanncannangtnntaaaaanantngtacgccgnaanatnaaagacanngacctnntgtggcttcttgangaaatnatngacagcgcaganggncttccnatcgggaactatctntcacaatatctcgccaacctgtnnttntgctatttcatgcanngngtgaacgannnattgnnnnnnnangcnnnnnannnnnnnnannnnannnnntntntntntnnannaaannannaanngnnggangcnntnanananntaananaaatganngangatnaacnnnaantnnnaannnaannaaacnannanatnnnnnnannancagccnnnngnnntnacannnacgngcgnnngnttnnttnngtnnnnnacnnntncnacnnnaatnannnannnntnaganannnnanaaanangnntttcngncannnnnnnnnnnnncnnaacngacntannnnnttgntnnacnnnanngnntanaancnnnnnnnnnncnnntngctnggtnnngcaaaanntantganannannnattnannanaancantnannnnnnnnnntnntnatgnnannnntttatnacaancagccnnnnaannnggagncngtnnnanangnnanttacnntnancnnnncaacatnnagnnngtngaaaanccnncnnncgttnaaccnancnanctnnnnncngnngannaanccncnnnnnangaacnangnnaatnngannnagcnnnngngnnnncnnnncttnnnncaannaanntnanng

SEQ ID NO: 174 - DNA, 4000 bp, Escherichia coli
  misc_feature (493)..(493): n is a, c, g, or t
  misc_feature (1985)..(1985): n is a, c, g, or t
  misc_feature (1998)..(1998): n is a, c, g, or t
  misc_feature (2001)..(2001): n is a, c, g, or t
  misc_feature (2398)..(2398): n is a, c, g, or t
  misc_feature (2409)..(2409): n is a, c, g, or t
  misc_feature (3567)..(3567): n is a, c, g, or t
  misc_feature (3577)..(3577): n is a, c, g, or t
  misc_feature (3691)..(3691): n is a, c, g, or t
  misc_feature (3733)..(3733): n is a, c, g, or t
  misc_feature (3741)..(3741): n is a, c, g, or t
  misc_feature (3757)..(3757): n is a, c, g, or t
  misc_feature (3790)..(3790): n is a, c, g, or t
  misc_feature (3835)..(3835): n is a, c, g, or t
  misc_feature (3880)..(3880): n is a, c, g, or t
  misc_feature (3925)..(3925): n is a, c, g, or t
  misc_feature (3931)..(3931): n is a, c, g, or t
  misc_feature (3934)..(3934): n is a, c, g, or t
  misc_feature (3995)..(3995): n is a, c, g, or t
tttacctgatacaacagggccatgatttgctaaaagtacggcagacctttttccagccagaccctttatagcttcgcccatcgctggatcgcctgggacaaaaaaaggtaaaagtttgactttgcccaataacataatcgaataaggagtaaaagaaggtaaaatattatcttcattaacgtcaggcaacatagaaagtgcaacagaatgagttgaatgaagatgcacaactgctccagatttcattcctcttgtttcataaaatgcttgatgtaatggaagttcttttgttggggttgaattacctattaatttgccatccttagttacttttacaatttgattgggatcaagtcgaccaaaagatgaccctgaaggagtaacaagaatgtcgtcattatttaatctaactgaaatgttacctgtagacccatgagtaagccctctatcaaacatagaagatgcaaacatacacattttttctcttaatttnctttcagtcataatttaaacataacctaataattacttttagtacccaaaaagtttaaataaagtacctatggatattcctataacagtatgactccaaattgctaaagaacatgctaataagggagagggtgttttgatagcaagaaaaccttttccaagaattggcatgaaaaaaaaccagggaattacaacgctcaacaaaccgaattttataccatcaaaaaaggatgcaataaagatttcgtatttgattaaaataaaaaaaacaaaagaataaagtatggcaacactataatgaactagccagccaattaataattcttttttaattactggttcgttatctatatctggattgtaaattttacccttagaaattgatagaacaaaccatctacctacaacggcccaatctgaaggattgatcccaaatgaaaacttcaaaaacctttgccataaatccattgcacaacatgaaataacaccaataattataatatgaaacaattccatcactgatcctctaaagatttaattttttctagcaatgcttttactaacaatataaaagataatataggaaaatctattttaaattatacttttagcaaacacactaaatacaaaaacccaaggagaatgatttatggctaattttaatggacaaactgcagttattactggtggtgcacaaggtattggcttagcaactgcaaaaagatttattgaagatggctgtgaagtgatgatttgggacgttgatgaaaagatggggttggaagcatctaaagaattaaaatgtcaatttctaaaagtagatcaaactgaaaatgatttggttgaagaagcaacaaaaaagacaattcaactaatgaaaaaaattgatattttagtgtgtagtgctggaattgcaggtcctacattttctacatgggactacccaattgaagaatggtccaaagtatttaatgttaatgtaaacggtgttttttactgtaacaaacatgtagttaaaacaatgcgcgacaatggttacggcagaataataaatattgcatctattgcaggtaaagaaggaaacccaaacgcatctgcatattcagcatctaaagcagcagttattgctctaaccaagtcacttggtaaagaaacagcagatcatgatattgcagtcaattgtataaccccagcaacagctaaaacaagaattttagatcaagtctctcaagaatttattgattacatgatttccaaaatacctagaaacaggtttgtaaaagttgaagaaattgcttctctaattacatttttagcaagtaaagaaaatagttttactactgcaggtgtttttgatatttcaggtggtagagctacatattagattggtgaggatttttaggagatcctctgcaccttaatttaaaagctaataatcagggaggtaattattagcaggtcatcaaacaaacgggggagttttattcaatatnatcacactactgnttntcaccgaaaatgaatattggtctattcataataaataataattgagttttttgataaaaaattaatcacttaaatcatataattttaagaattgtataaaaattaatcattctatatatctgtgttaagttccataattgcagaaagtataactactgcaaacaaagcaagtcccattcccctatttacccaaacttgtttattagaagctaaagaccatttttttaaacttatacctaaccacaaccagagtatgtgtattggtatccaaatagaatttactattaagaacttagtaagaatttctgtattatatgaacttatccccagtgacaaaacaacaaataaatgaccttgaacaacataggcctttggattaacaaattgtaaaaaaatnccttcatatanctttggtgcctttgaagtttctttaaatcctgttttattatctgaagtagctatcctccaagatagaaaagataaataagacaatgataaaacaagaaaagttaattcaacaccgtcaatttcaaataaaaattgtttaaaacctaaaacaactagtaaagcaactccatttgtacccaagaataaaccaatgagatacataataccgactctccaaccaaagcctgcaccaactccagccagagaaaggacaccagggccaggggttaccatcattaaaaaactaataattatataagaagtcatgaaaatacatagagctaaactctatacctttagatcaattaatgtaatgttttgtagatttactatactaaggattaaatcatagcaatattataaaaataactttccaggattcattattttattaggatcaaatgcatttttaacctttttcattatatccacagcaccaccaagctcttttaacatatactttcttttaccttgcccaacaccgtgttctccagtacaagttccatccattctaatagctctttcagatattctgataagaaaatcatctagtttttttaactcttcatcactctttttatctatcaataaagctacatgaaagtttccatctcctgcatgacttacaataggacctattaattcattttttttcatatcctctattgtttctgtaatacaatcagataatttagaaatgggaacacaaacatcagttgaataaatttctgcttctggtcttacagctttacaagaccaataagcgtcatgtctagctttccataacttatttctatcttcattgttagacgtccattcaaaatcattacccccaaaatctgacgctatttcaccaaataattctgattgctctttaacagatgtctcactgccatgaaattccagcaataatagaggagcttctggtaagtttgttttagaataattatttacagctataacttgagccgtatcaagaaattcaattctagctacaggaattcctgcttgaactgtcatgataacagcatcggttgcatctttgacagatggaaagcttactctaccccctgctaaaacttcaggtataccataaagtttcaaagtaatttcagtggnaatacccaangtaccctcagaaccaaccattaaacgtgttaaatcatatccagctgaactttttcttgctttattagcagtttttatgatttgaccatctggggtgaccacttcaagcgcaatnacattatctttcatagtcccatatcttacggcatttgttccngatgcccnagttgctgtcataccnccaattgaagcattagcacctggatcaattggnaaaaaaagacctgtatctcttaaatgtgtatttaactgttccctngttacccctggttgaactaccactaaaagatcttcctgataaacnttaatgattttattcatattattcatatcaattgaaattcctccntatggngcntttatatgaccttcgaaagaagaacccacgccaaaaggaattattggacatttgtattcantacaa

SEQ ID NO: 175 - DNA, 4000 bp, Escherichia coli
  misc_feature (1)..(144): n is a, c, g, or t
  misc_feature (289)..(289): n is a, c, g, or t
  misc_feature (321)..(321): n is a, c, g, or t
  misc_feature (1942)..(1942): n is a, c, g, or t
  misc_feature (1956)..(1957): n is a, c, g, or t
  misc_feature (1959)..(1960): n is a, c, g, or t
  misc_feature (1962)..(1963): n is a, c, g, or t
  misc_feature (1969)..(1969): n is a, c, g, or t
  misc_feature (1976)..(1977): n is a, c, g, or t
  misc_feature (1980)..(1981): n is a, c, g, or t
  misc_feature (1984)..(1984): n is a, c, g, or t
  misc_feature (1986)..(1987): n is a, c, g, or t
  misc_feature (1992)..(1992): n is a, c, g, or t
  misc_feature (1994)..(1994): n is a, c, g, or t
  misc_feature (1996)..(1996): n is a, c, g, or t
  misc_feature (2003)..(2003): n is a, c, g, or t
  misc_feature (2007)..(2008): n is a, c, g, or t
  misc_feature (2011)..(2012): n is a, c, g, or t
  misc_feature (2017)..(2017): n is a, c, g, or t
  misc_feature (2020)..(2020): n is a, c, g, or t
  misc_feature (2022)..(2023): n is a, c, g, or t
nnnnnnnnnnnnnnnnnnnnnnnnnnnnnnnnnnnnnnnnnnnnnnnnnnnnnnnnnnnnnnnnnnnnnnnnnnnnnnnnnnnnnnnnnnnnnnnnnnnnnnnnnnnnnnnnnnnnnnnnnnnnnnnnnnnnnnnnnnnnnnnncgcgacgggagcatatccaggccgcgggcattttgatatttgcccggttgaaacatgccaacgcgggcaggacatcattcagccatcattcaaagcctcggcggagcagttgctcaccgcgccgcatttccggcataaacgcaanacgatgtggagcaaaccaaacgaaaaccgatnttgttgttgaagttatcgggttcgttcctgttgcgatacgaacagcgggcgttgtttcgattgttgttccacgaaccgccgcgcaacacgcgggcctgctcttgaatgagcccttcattacgttcatcccgcagttcaactgcggaatgaacgatcatgacactttcttccagcctcccaacagctttccgatttcggctaccattgtggaggcgtgacgatactggccttccttgatccaatcccatttctggcttaagcgcaaatacaaacggacttttctcaactcggtatcggcgtttttcaatttttccacacgagccaagccgcggtcggcatttgcttcaatcagcagttcctgaaaattcaacgcggcattctgtaatcgtctcgtgatcacaaaccgctggctgcgcggaaaattctccgtgatcggcaaaagccaggagacgaaatcataggtgcgcgtgaaaatgaccatttcctcagtcatacaacagattgaactccttgagcatggattggcgcaggcgaagcgtatctgcgtaacgcacgtgattgatccagccctgcacggaagcgcggacggtttccctgccagcgacttgtgtcaaataccgtaatttgcggcggtaggcaaaacccttgcgttgtttgacgcgccgataatcgggaaagagccgaaaaccaagaaaagggattcccttttcgacagaatgcgggtgcgcgctccccttatgaatcgtcaggcgcaatcgttccaatcgtttgacaatcgcatcgcgccatttcatcatttcagttttgttattgccaaacaaaaggaagtcgtccacgtaacggagatacgcgctacaacccagttcgcggcggataaaatgatcgaagggactcaggtaacaatttgcccataattgggatgtgagattgccaatcggcaggccgcgcggacggttggccgccaggagggtgtcgttgggaaaatataccatatcgtattcgcctgtcaatacgccccgcccgctggcaaggatgcgatctatcagccacaacgcgctttcatcgggcaacatggattccaatgtttctcgcaaaatggcatggtcaatgcttggaaaaaattgggcgatatcgcattgcaaaacgtattgatatttacgcgcatattgctggcaacgatctatggcgcggtgtgtgcctttgccaacgcgattggcgaaactatcagcgatgaacagcctctcgaaatacggcacagtgacgttgcacagcgcatgatgcgccactctgtcgcgaaacggcgcggcggagatcaaacgctttttgggttcgtggatgtaaaagttgctgtattcgccgggcaggtaggttcgctccttcaactcggtttccagttcgagcaagttatccgcaagcaaagattcgaactgcgccgttgccccgcgcccgcgtttgccgcgcgaggcattttcataagccaaacgcagattaacccaatcgcaaacttgttcgtgaaggttcattttttcaaaatcgactcgccttacggcgagaggggattcagagattcagagcgcagagattcagagttcagagacgggaatgatggggagcaaaccanacgaaaaccgaggnngnngnngaagtnatcgggnncgnnccngnngcganangnacagcgngcgnngtnncgatngcngnnccacgaaccgccgcgcaacacgcgggccgaaccgctctgggggcctcgcgggtctaaaacaccatccttgcggtttcgatactcgtcttcgctataccaatccaggcaccattcccagacgttgccgatcatgtcttgcgccttgtatgaacttgcgccatttggatacatgccaacgggggatgtgcccccgatttttttctcggcttcatctgtatttgccttacctgagtcccattcattatcccaggcccataaaaatccttctgcgccgcgcgcggcatgttcccattgcgcttcagttggcaaacgaaattgctttgcagttatgcggcttaaccaattgcaatatgcttccacttcaaaccacgaaacgcccacaacgggcaggttggaaccattccactttgggttgtcccaccaaaatgggcggtcccggcgttctacgggtctttccgccagccattctttccattgtttccgcgtttcttcatcaggcagccatgaaagatccgattcccatgcgcctgtgcgccatttacgcccagtctcactccaccaggttgcctgcgggtcgtaaccgccctgctcccaaaaacagcggtattctgcattggtcaccggatatttgccgatggaatattcagaaagcaggacatcatgcgcgggcttttcatcaccccaactctgcgcctcttgttccttgataattttttcatcttcttcgcttgtccccatgcgaaagacaccagcaggaatggagaccatttcaggaaggataacttttacatctttttcaagcgagatggtaaaacgcgggtcgccaatttcgccgagggccaagccgagacgatatcgcaaatctactcccacggtgggaggattcttctcaagaattcctttcagcatttcaggtaattgctttttctcaaccgcaaacagatttttaacctgttcagttggattcttcaaaatatcagcaagcgcaaccccggcaatcgtcaaagcatagtcatgacgatcaggatcctgggcggtatccatcaaacactgcataagtttcttggctttattatcatttgagtatgccagaaaacccaccgccaggagcaatggctcaatccattgatcgctcttgccatgaacgtgtttttgaagaacagggatccattgctcctccaatttttgcgccatatgatgtccagccagaaattcccggaaacgacgaatgtaaaaatcataactcttgccgtcctggcgaagtaacccacccctgcgcgcaaccaaatcaagaaaatcggatgccttttgctgggcagtctctttttctgcgccgaatcttttccaaaatacttctgcggaaatcaattcgtcggcaaaaattgaatctttctcctcatcgtgcaaaatataagcaattaacgccatgtcatcaaaacgctgatttgccggccgtcctccccataacgtcgcatctgagactgcctgcccctgtttatgcgggtcggtcaggagggcttttactgcctgctcaaatagttcggcgcgctggcttggaaggtcacgactatgataataaaccagcgcgaagatattgatcatcaacggcgtggttgccatctcatttacaaggggattctcgatacgccgcaaaagatccctggctttattatcggcatcggtcaacgtcggataaacagcatcgcaccagagttcgataatgctgacgcgtttctcagaggttataggcaaaacggctgccgtatcgaaatcaatgagctggctggttatttctgcggcagaaggccgcgtagtgaccagataaatatttctggatgaatttctattatccgccacaacgccttcaacagcggcgcgaacatccgggcgatctgcaaattccacttcgtccataccatcaaacatcacaagacagcctttgcgtagaagatggcgaaatagatcatctggaagatt

SEQ ID NO: 176 - DNA, 4000 bp, Escherichia coli
  misc_feature (2482)..(2482): n is a, c, g, or t
  misc_feature (2623)..(2623): n is a, c, g, or t
  misc_feature (2631)..(2631): n is a, c, g, or t
  misc_feature (2641)..(2642): n is a, c, g, or t
  misc_feature (2646)..(2646): n is a, c, g, or t
  misc_feature (2665)..(2665): n is a, c, g, or t
  misc_feature (2676)..(2676): n is a, c, g, or t
  misc_feature (2686)..(2686): n is a, c, g, or t
  misc_feature (2689)..(2689): n is a, c, g, or t
  misc_feature (2698)..(2698): n is a, c, g, or t
  misc_feature (2704)..(2704): n is a, c, g, or t
  misc_feature (2707)..(2707): n is a, c, g, or t
  misc_feature (2720)..(2720): n is a, c, g, or t
  misc_feature (2723)..(2723): n is a, c, g, or t
  misc_feature (2731)..(2731): n is a, c, g, or t
  misc_feature (2758)..(2758): n is a, c, g, or t
  misc_feature (2760)..(2760): n is a, c, g, or t
  misc_feature (2764)..(2764): n is a, c, g, or t
  misc_feature (2776)..(2776): n is a, c, g, or t
  misc_feature (2778)..(2779): n is a, c, g, or t
  misc_feature (2781)..(2785): n is a, c, g, or t
  misc_feature (2788)..(2797): n is a, c, g, or t
  misc_feature (2799)..(2801): n is a, c, g, or t
  misc_feature (2803)..(2807): n is a, c, g, or t
  misc_feature (2809)..(2809): n is a, c, g, or t
  misc_feature (2811)..(2811): n is a, c, g, or t
  misc_feature (2813)..(2814): n is a, c, g, or t
  misc_feature (2816)..(2817): n is a, c, g, or t
  misc_feature (2819)..(2826): n is a, c, g, or t
  misc_feature (2828)..(2833): n is a, c, g, or t
  misc_feature (2835)..(2839): n is a, c, g, or t
  misc_feature (2845)..(2851): n is a, c, g, or t
  misc_feature (2853)..(2854): n is a, c, g, or t
  misc_feature (2857)..(2857): n is a, c, g, or t
  misc_feature (2871)..(2871): n is a, c, g, or t
  misc_feature (2873)..(2874): n is a, c, g, or t
  misc_feature (2876)..(2879): n is a, c, g, or t
  misc_feature (2881)..(2883): n is a, c, g, or t
  misc_feature (2886)..(2886): n is a, c, g, or t
  misc_feature (2888)..(2890): n is a, c, g, or t
  misc_feature (2892)..(2892): n is a, c, g, or t
  misc_feature (2894)..(2895): n is a, c, g, or t
  misc_feature (2897)..(2901): n is a, c, g, or t
  misc_feature (2903)..(2904): n is a, c, g, or t
  misc_feature (2906)..(2907): n is a, c, g, or t
  misc_feature (2909)..(2910): n is a, c, g, or t
  misc_feature (2912)..(2913): n is a, c, g, or t
  misc_feature (2915)..(2918): n is a, c, g, or t
  misc_feature (2920)..(2920): n is a, c, g, or t
  misc_feature (2922)..(2928): n is a, c, g, or t
  misc_feature (2930)..(2930): n is a, c, g, or t
  misc_feature (2932)..(2936): n is a, c, g, or t
  misc_feature (2939)..(2939): n is a, c, g, or t
  misc_feature (2941)..(2941): n is a, c, g, or t
  misc_feature (2943)..(2943): n is a, c, g, or t
  misc_feature (2945)..(2950): n is a, c, g, or t
  misc_feature (2952)..(2952): n is a, c, g, or t
  misc_feature (2954)..(2957): n is a, c, g, or t
  misc_feature (2960)..(2960): n is a, c, g, or t
  misc_feature (2965)..(2969): n is a, c, g, or t
  misc_feature (2971)..(2976): n is a, c, g, or t
  misc_feature (2979)..(2982): n is a, c, g, or t
  misc_feature (2984)..(2985): n is a, c, g, or t
  misc_feature (2990)..(2990): n is a, c, g, or t
  misc_feature (2992)..(2992): n is a, c, g, or t
  misc_feature (2994)..(2995): n is a, c, g, or t
  misc_feature (2997)..(2998): n is a, c, g, or t
  misc_feature (3000)..(3000): n is a, c, g, or t
  misc_feature (3002)..(3016): n is a, c, g, or t
  misc_feature (3019)..(3020): n is a, c, g, or t
  misc_feature (3023)..(3028): n is a, c, g, or t
  misc_feature (3030)..(3032): n is a, c, g, or t
  misc_feature (3034)..(3034): n is a, c, g, or t
  misc_feature (3038)..(3040): n is a, c, g, or t
  misc_feature (3042)..(3042): n is a, c, g, or t
  misc_feature (3044)..(3045): n is a, c, g, or t
  misc_feature (3048)..(3050): n is a, c, g, or t
  misc_feature (3052)..(3056): n is a, c, g, or t
  misc_feature (3058)..(3059): n is a, c, g, or t
  misc_feature (3061)..(3083): n is a, c, g, or t
  misc_feature (3085)..(3091): n is a, c, g, or t
  misc_feature (3094)..(3096): n is a, c, g, or t
  misc_feature (3099)..(3101): n is a, c, g, or t
  misc_feature (3103)..(3106): n is a, c, g, or t
  misc_feature (3108)..(3113): n is a, c, g, or t
  misc_feature (3116)..(3116): n is a, c, g, or t
  misc_feature (3118)..(3119): n is a, c, g, or t
  misc_feature (3121)..(3121): n is a, c, g, or t
  misc_feature (3123)..(3128): n is a, c, g, or t
  misc_feature (3130)..(3130): n is a, c, g, or t
  misc_feature (3132)..(3133): n is a, c, g, or t
  misc_feature (3135)..(3139): n is a, c, g, or t
  misc_feature (3141)..(3144): n is a, c, g, or t
  misc_feature (3147)..(3151): n is a, c, g, or t
  misc_feature (3153)..(3156): n is a, c, g, or t
  misc_feature (3158)..(3162): n is a, c, g, or t
  misc_feature (3165)..(3165): n is a, c, g, or t
  misc_feature (3167)..(3168): n is a, c, g, or t
  misc_feature (3170)..(3172): n is a, c, g, or t
  misc_feature (3174)..(3180): n is a, c, g, or t
  misc_feature (3183)..(3188): n is a, c, g, or t
  misc_feature (3190)..(3198): n is a, c, g, or t
  misc_feature (3200)..(3202): n is a, c, g, or t
  misc_feature (3204)..(3208): n is a, c, g, or t
  misc_feature (3210)..(3210): n is a, c, g, or t
  misc_feature (3216)..(3225): n is a, c, g, or t
  misc_feature (3227)..(3227): n is a, c, g, or t
  misc_feature (3230)..(3237): n is a, c, g, or t
  misc_feature (3239)..(3240): n is a, c, g, or t
  misc_feature (3242)..(3247): n is a, c, g, or t
  misc_feature (3251)..(3251): n is a, c, g, or t
  misc_feature (3253)..(3254): n is a, c, g, or t
  misc_feature (3256)..(3259): n is a, c, g, or t
  misc_feature (3261)..(3263): n is a, c, g, or t
  misc_feature (3266)..(3269): n is a, c, g, or t
  misc_feature (3271)..(3271): n is a, c, g, or t
  misc_feature (3273)..(3274): n is a, c, g, or t
  misc_feature (3278)..(3279): n is a, c, g, or t
  misc_feature (3281)..(3287): n is a, c, g, or t
  misc_feature (3289)..(3291): n is a, c, g, or t
  misc_feature (3293)..(3293): n is a, c, g, or t
  misc_feature (3295)..(3298): n is a, c, g, or t
  misc_feature (3300)..(3301): n is a, c, g, or t
  misc_feature (3303)..(3307): n is a, c, g, or t
  misc_feature (3309)..(3310): n is a, c, g, or t
  misc_feature (3312)..(3316): n is a, c, g, or t
  misc_feature (3318)..(3318): n is a, c, g, or t
  misc_feature (3320)..(3321): n is a, c, g, or t
  misc_feature (3323)..(3324): n is a, c, g, or t
  misc_feature (3326)..(3326): n is a, c, g, or t
  misc_feature (3328)..(3328): n is a, c, g, or t
  misc_feature (3330)..(3331): n is a, c, g, or t
  misc_feature (3334)..(3344): n is a, c, g, or t
  misc_feature (3346)..(3347): n is a, c, g, or t
  misc_feature (3349)..(3349): n is a, c, g, or t
  misc_feature (3351)..(3353): n is a, c, g, or t
  misc_feature (3355)..(3356): n is a, c, g, or t
  misc_feature (3358)..(3359): n is a, c, g, or t
  misc_feature (3361)..(3372): n is a, c, g, or t
  misc_feature (3374)..(3377): n is a, c, g, or t
  misc_feature (3379)..(3381): n is a, c, g, or t
  misc_feature (3383)..(3388): n is a, c, g, or t
  misc_feature (3390)..(3393): n is a, c, g, or t
  misc_feature (3396)..(3399): n is a, c, g, or t
  misc_feature (3401)..(3401): n is a, c, g, or t
  misc_feature (3404)..(3411): n is a, c, g, or t
  misc_feature (3413)..(3413): n is a, c, g, or t
  misc_feature (3415)..(3417): n is a, c, g, or t
  misc_feature (3419)..(3423): n is a, c, g, or t
  misc_feature (3425)..(3425): n is a, c, g, or t
  misc_feature (3427)..(3427): n is a, c, g, or t
  misc_feature (3430)..(3431): n is a, c, g, or t
  misc_feature (3433)..(3450): n is a, c, g, or t
  misc_feature (3452)..(3453): n is a, c, g, or t
  misc_feature (3455)..(3464): n is a, c, g, or t
  misc_feature (3466)..(3466): n is a, c, g, or t
  misc_feature (3468)..(3469): n is a, c, g, or t
  misc_feature (3471)..(3471): n is a, c, g, or t
  misc_feature (3473)..(3484): n is a, c, g, or t
  misc_feature (3486)..(3496): n is a, c, g, or t
  misc_feature (3498)..(3499): n is a, c, g, or t
  misc_feature (3503)..(3504): n is a, c, g, or t
  misc_feature (3506)..(3509): n is a, c, g, or t
  misc_feature (3512)..(3513): n is a, c, g, or t
  misc_feature (3515)..(3522): n is a, c, g, or t
  misc_feature (3524)..(3524): n is a, c, g, or t
  misc_feature (3526)..(3528): n is a, c, g, or t
  misc_feature (3530)..(3532): n is a, c, g, or t
  misc_feature (3534)..(3534): n is a, c, g, or t
  misc_feature (3536)..(3537): n is a, c, g, or t
  misc_feature (3539)..(3544): n is a, c, g, or t
  misc_feature (3546)..(3557): n is a, c, g, or t
  misc_feature (3560)..(3565): n is a, c, g, or t
  misc_feature (3567)..(3567): n is a, c, g, or t
  misc_feature (3570)..(3573): n is a, c, g, or t
  misc_feature (3575)..(3576): n is a, c, g, or t
  misc_feature (3578)..(3579): n is a, c, g, or t
  misc_feature (3582)..(3588): n is a, c, g, or t
  misc_feature (3591)..(3592): n is a, c, g, or t
  misc_feature (3594)..(3594): n is a, c, g, or t
  misc_feature (3596)..(3597): n is a, c, g, or t
  misc_feature (3600)..(3608): n is a, c, g, or t
  misc_feature (3611)..(3612): n is a, c, g, or t
  misc_feature (3614)..(3614): n is a, c, g, or t
  misc_feature (3616)..(3617): n is a, c, g, or t
  misc_feature (3620)..(3621): n is a, c, g, or t
  misc_feature (3624)..(3628): n is a, c, g, or t
  misc_feature (3630)..(3630): n is a, c, g, or t
  misc_feature (3632)..(3633): n is a, c, g, or t
  misc_feature (3635)..(3649): n is a, c, g, or t
  misc_feature (3652)..(3653): n is a, c, g, or t
  misc_feature (3655)..(3655): n is a, c, g, or t
  misc_feature (3657)..(3658): n is a, c, g, or t
  misc_feature (3660)..(3661): n is a, c, g, or t
  misc_feature (3663)..(3667): n is a, c, g, or t
  misc_feature (3669)..(3672): n is a, c, g, or t
  misc_feature (3674)..(3678): n is a, c, g, or t
  misc_feature (3680)..(3681): n is a, c, g, or t
  misc_feature (3683)..(3690): n is a, c, g, or t
  misc_feature (3692)..(3692): n is a, c, g, or t
  misc_feature (3694)..(3694): n is a, c, g, or t
  misc_feature (3696)..(3706): n is a, c, g, or t
  misc_feature (3708)..(3708): n is a, c, g, or t
  misc_feature (3710)..(3712): n is a, c, g, or t
  misc_feature (3714)..(3715): n is a, c, g, or t
  misc_feature (3717)..(3718): n is a, c, g, or t
  misc_feature (3720)..(3722): n is a, c, g, or t
  misc_feature (3724)..(3726): n is a, c, g, or t
  misc_feature (3729)..(3736): n is a, c, g, or t
  misc_feature (3739)..(3742): n is a, c, g, or t
  misc_feature (3744)..(3750): n is a, c, g, or t
  misc_feature (3754)..(3757): n is a, c, g, or t
  misc_feature (3759)..(3763): n is a, c, g, or t
  misc_feature (3765)..(3769): n is a, c, g, or t
  misc_feature (3772)..(3772): n is a, c, g, or t
  misc_feature (3774)..(3781): n is a, c, g, or t
  misc_feature (3783)..(3783): n is a, c, g, or t
  misc_feature (3786)..(3787): n is a, c, g, or t
  misc_feature (3789)..(3792): n is a, c, g, or t
  misc_feature (3794)..(3805): n is a, c, g, or t
  misc_feature (3807)..(3808): n is a, c, g, or t
  misc_feature (3810)..(3812): n is a, c, g, or t
  misc_feature (3814)..(3823): n is a, c, g, or t
  misc_feature (3825)..(3825): n is a, c, g, or t
  misc_feature (3827)..(3829): n is a, c, g, or t
  misc_feature (3831)..(3831): n is a, c, g, or t
  misc_feature (3834)..(3834): n is a, c, g, or t
  misc_feature (3836)..(3836): n is a, c, g, or t
  misc_feature (3839)..(3842): n is a, c, g, or t
  misc_feature (3844)..(3846): n is a, c, g, or t
  misc_feature (3849)..(3849): n is a, c, g, or t
  misc_feature (3851)..(3864): n is a, c, g, or t
  misc_feature (3866)..(3872): n is a, c, g, or t
  misc_feature (3874)..(3883): n is a, c, g, or t
  misc_feature (3885)..(3891): n is a, c, g, or t
  misc_feature (3893)..(3894): n is a, c, g, or t
  misc_feature (3896)..(3902): n is a, c, g, or t
  misc_feature (3904)..(3904): n is a, c, g, or t
  misc_feature (3906)..(3907): n is a, c, g, or t
  misc_feature (3910)..(3912): n is a, c, g, or t
  misc_feature (3914)..(3917): n is a, c, g, or t
  misc_feature (3920)..(3920): n is a, c, g, or t
  misc_feature (3922)..(3926): n is a, c, g, or t
  misc_feature (3932)..(3933): n is a, c, g, or t
  misc_feature (3938)..(3938): n is a, c, g, or t
  misc_feature (3940)..(3941): n is a, c, g, or t
  misc_feature (3943)..(3945): n is a, c, g, or t
  misc_feature (3947)..(3949): n is a, c, g, or t
  misc_feature (3951)..(3951): n is a, c, g, or t
  misc_feature (3956)..(3958): n is a, c, g, or t
  misc_feature (3960)..(3960): n is a, c, g, or t
  misc_feature (3962)..(3965): n is a, c, g, or t
  misc_feature (3972)..(3972): n is a, c, g, or t
  misc_feature (3974)..(3975): n is a, c, g, or t
  misc_feature (3977)..(3977): n is a, c, g, or t
  misc_feature (3980)..(3983): n is a, c, g, or t
  misc_feature (3985)..(3985): n is a, c, g, or t
  misc_feature (3988)..(3991): n is a, c, g, or t
  misc_feature (3993)..(3995): n is a, c, g, or t
  misc_feature (3997)..(3997): n is a, c, g, or t
  misc_feature (3999)..(4000): n is a, c, g, or t
cccggcggggtatccaggtgccgggcggttcatgtcggcggcggatcgttcaaagatgggactgctgcgaaccctgtgggccaagaccaagcccgagaactggatcaataagccctacacccgcggaaccacggcgtggaaggcgcagcaggccgtgaccaaggtcgcgcctgcgctcaagtgggtggggcatgcttctacggcgctcactgcgggtttggctggggctgagcagtatcagaaggactcggccaacccttcaatgggtgaggccgagaagatcacccgtgccagcacacaagctgtcacgcagggtggtggcggctggggcggtgcatggctaggtgctcaggcaggcatgacgataggtgctgtcggaggtccggtgggggtcgccgtaggaggcattgtcggcggagcgcttggaggactggcgggatctacagtcggcaaaatggcgggggacttgataaataagggagtaagtaagttgtttcactggtagtgtcggggtttgaccaggaggtgatttgctgttgtgggcgattgtgtacttcgtgttcgggtcggtcttgatgattcattggggcctggcgatgttcaccgatacggggccgggtgagttcgcgcgggagatcagcgcggagatgggggtcaagaataatctcgcccttacaatgccctcgggtgcattgatgttcctttttggtacggtatttggcttcggggatcccaactccgttttcgagatcgtctgcggctccatatcggcgtttttcttgctggtcatgctggtgagtttcctgccgatcagcctgccagcgtggatgtatccggagtggcacgtggagtggcggcgccggcgtcggcatgagcggctcgcgagggagagctcctggcgtgacatcacccggctaggccccgggggaactgctggtcctgccaccggccacgctgatactcttcccggttcggcactaacgaacttatcctcggactccccaggagaggtcatatgacttcgcgaccaagctcgaacctgcctcagaagttcgcgggtagcgccgccaaggtatgcgcaccagcaggctgggtccaggtggatcctgagaacatccctggtatacccgtaagtgctgccgaggggtatgtggacctggtctgtgctgagcagccggatgcgcctcgcttcgcggagaactgcgtcatcaccgtcgcggaactcgccggcgggtcctcggccgaggactggttccgggactcgaccacgcagctcatgagttccatacccggcttccagctgattgacatgaccgagtgggagccggcggggcacggcctgctgcgcgccggtgtctacatccaggacgccgtctcggtcaccgccctgcaatggacctgggtctccaagacctcgcggcgcgggttcaccgcgaccttctcctgccccacacgtagttgcgccgcggcagtggagcgattcctcgccatgatcacgaccctggaggagatctgatggcacggctcgacaccagcggatacacgccggttataatccttggtgatgctgagtggctgtctctgcgcgccgtggcgatgggcggacgcatcctgaaagaccgcgtcgccaggcggctgcgtcgcagcggagttctggacgatcagggtattacgccgtcggcggctcccgcactgcacggggtcgccggggccgtccggcacctcgacgtggcccgcttcgagccgacccgtcggggataccgtgccgaggcgtggataggtccgcagcgcgcgaccatcgtcaagcatgagccggacgggtaccacgtatacggccttgacgagtgcgaggtgccctcagccttcaccgagctgctcgacgtgcggccgcgccctaacattgacctggggccgcgcctcctcccgcaacaggtgtacagcatcatcgactctggggagccggacgcactcactgatgagttggccggacttgcccgccggcttgatcgcggcggcgagccgggacagctcggcgggcccacgcccctcaccgacggattcgccagcgggcagtgggtgctctcactgatctccacgagcgtcccgcgcgatggagactgggaggtcgtgggctcgatgacgaccctgtctgttcccgaatgcctgtacgagctaatccctaggtccgttgccgatgccctcgagtcaggcgtgcctgacgagttgatggcccagcgggcggcggcagacatgcccgaggagctggtactggagcacataacctcactggagctgtggacgcgggtaagcccctggttcttcaccgtctgatgcggccgaagattacacggcagcacgggtgttgcctgtccacggcgtcgttgcatcgtgctcctcaaccggcatgtgagtggttgagcggggtcctgctctgcgcgcgccggctccgttgcggcgacgactgacctcagaggcgctcctnccgactacctgcctcggtgcgggatgggccccgggaaagccggtcagcggctagccgatcatcgggctggcctcgggcatccgaataacgcggcgccgctcgcgcagggccagggcgctggccgccgtcatggtgcccacncggccgangaacatgagnnccangatgacgtacttggccccntccggcagggngggcgtgatnccngtggacagncccacngtngcgaaggcgctgntgncctcgaanaggatccggtccagggacaggttggtnanctgnagcagcaggagngnngnnnnnccnnnnnnnnnngnnncnnnnnangncnncnncnnnnnnnngnnnnnngnnnnngggggnnnnnnncnnccngaaggcctcgatgncnngnnnncnnnggncnnngncnngnnnnncnngnngnngnncnnnnangnnnnnnncntnnnnnccncngncnnnnnngncnnnnccnccccnnnnnannnnnnggnnnncnnggagnancnngnngncnnnnnnnnnnnnnnnggnnggnnnnnngnnnancccnnngnannggnnntnnnnncnntnnnnnnnnnnnnnnnnnnnnnnncnnnnnnnggnnnggnnncnnnngnnnnnnggntnntncnnnnnnangnngnnnnngnnnnggnnnnngnnnncnnnnnggncnnannngnnnnnnnggnnnnnntnnnnnnnnngnnncnnnnncnggggcnnnnnnnnnngnccnnnnnnnncnngnnnnnngggnanncnnnngnnnccnnnnangnncccnngnnnnnnngnnngncnnnncnncnnnnngnngnnnnngncnncnngncntnnggnnnnnnnnnnnanncngnnntnntnnannnnnnnnnnnncnnnnannncnnnnnncnnnnggnnnngnccnnnnnnnngncnnngnnnnngnanggnngnnnnnnnnnnnnnnnnnngnngnnnnnnnnnncngnngncnnnnnnnnnnnngnnnnnnnnnnncnncccnncnnnnccnngnnnnnnnngntnnncnnngncnncnnnnnncnnnnnnnnnnnnccnnnnnncnggnnnncnncnnggnnnnnnnggnngncnnggnnnnnnnnnccnngncnnccnncgnnnnngncnngnnnnnnnnnnnnnnnccnnangnngnncnnnnngnnnncnnnnncnncnnnnnnnngncngnnnnnnnnnnngncnnngnngnngnnnannnggnnnnnnnnaannnngnnnnnnncccnnnngnnnnngnnnnnggnannnnnnnnanggnngnnnncnnnnnnnnnnnngnngnnnannnnnnnnnngncnnncnggncnggnnnnannnggncnnnnnnnnnnnnnngnnnnnnngnnnnnnnnnncnnnnnnngnngnnnnnnncngnnggnnncnnnnccngnnnnngggggnnggggngnngnnncnnngnggggnnngntnnnnttgccgncnncnggnnnntnctnnnncnnntncnn

SEQ ID NO: 177 - DNA, 4000 bp, Escherichia coli
  misc_feature (418)..(418): n is a, c, g, or t
  misc_feature (421)..(421): n is a, c, g, or t
  misc_feature (433)..(433): n is a, c, g, or t
  misc_feature (436)..(436): n is a, c, g, or t
  misc_feature (449)..(449): n is a, c, g, or t
  misc_feature (472)..(472): n is a, c, g, or t
  misc_feature (475)..(475): n is a, c, g, or t
  misc_feature (1992)..(1992): n is a, c, g, or t
  misc_feature (2571)..(2571): n is a, c, g, or t
  misc_feature (3489)..(3489): n is a, c, g, or t
  misc_feature (3800)..(3800): n is a, c, g, or t
gcctgcagcattgttgatgtcttcgctgataccagtgatcaggttacgaatctggactgagctatcctgttccaggttgttactattaccattgccgttgccgttgttattgccgttaccgttgctggtttcatcgaccaacgtacagtttgcatcagcaatacactcttcaatggtcagatcaggattgctgggtacctggtttgtgctggtagttacattgttgccattattgccaccaccattgctgttgttattaccggaattgccattgccggtgttaccggtatcggtaccagctgtgtcagttccactgttgttaccgttgccgttgttgttgccggaattgccattgccggtgttgccagtatcggtacctgccgtgtcagtgccaccgttgttaccgttgccgttgttnttnccggaattaccnttnccggcagtgtcgntgccaccgctgttgccgttgttnttnccggaattaccgttaccggcagtgtcgttgccaccgctgttgccgttgttatttccggaattaccgttaccggcagtgtcgttgccaccgctgttgccgttgttgttcccggaattaccgttaccggcagtgtcgttgccaccgctattgccattgccgctgttatttccggaattgccgttgtcattgccaccggcattattattacccgccagcgcattcaggctgcgggcattattggccggattgatctggacctggacattggtgctggaattacctgcggttgcagaggtatcagttcctgcatcatcagaattggaagggttacctgtagtcgccgccagggcaactaccaggccaggcgcattatcggcattgccattactattggaacccagtgaagcgttattggcgatctcttcgctgatatcagccagagcctgggccacttcctcgtcgccttcgtcgtcaacaccggcaacatcaccgccatcattgtcatctccctgtgcgacctgggcgccatcttcttcaccttcttcttcattttcaaggttcgggttctgggcgattgcgatattgccgagctgggcgggtatctggttcaaaccctggggagcctggcccagttccgtgcggctgaaatcgaaattgccgccaacaccaaggttaatggcgccctggccgttggatactgttgtacccccgttggcgacacccgtgaacaaggcaccaagagcctggtcaatgacagcctcatgggttgtgccacggacaccaatggatgcgtactgggtatcaacacggtattcactgttctcatcatcgctgatgaaaccgtcgatggtacgaaaaccaccacgtaccagcgacataatggcacggtcactttcaccgccttcgccatcaaaggaatactcattgaactggaactctgtatcttccttgagtgcaataatcgcggagtcaacgagacgaatctgcgcaaaaccggcttcaccggtaacaatcgtctcgctggcaaaaacttctgaacgcctgcgaagcaagcgggtatcaccatccattgtaatcgcggcaacatcacccttagtcatcaggattgtgcctatggcctcttcatcctgggccagaactgatccactcaacaacacaaccagaaacagcattggctgaattagttttcttgtgatggcttcaattttcattttttgacctttttccctggagtgcgtacctggttccgtatttcgtcgtacgccctgacgggatttgattgtgattttttaatattagtatttcttcacttccggtgagcttcgggcttcgtatttatcaccgttgaatgcaatactaatacgactgaattcgcttatatcagctgcttgttcattaactgtgaactaaaacacagcaagttgtaattactgtgacaggtttcacttaatgcccgggcaatttgctttaatgactctatctttcacgctaaaaaatataaatccttattattcagntatttagcataattacttaaagtaatttatcgtagctagtttcgcttgtagaagccatattttgcgagatttacaataaaaagtgaaaaattatcgtacatactcctgtgaattcagtacacaaaaatgtgattaaaatcagtcgctcagcgagctaatttaacgtgagtttgaattctggaaattgcctggtcagcaaaatgtatatctcacactcatgataaccacagtatatcggggatcaccacacacttgttggctggatgaagccccctttaactggtgccagcggccctccggctggtcatttattatgcatatcctcaccagatccgaacaaaaacatggcctgagcctttctatcttgtatcaaaggctttgaaaatggcgctatggtaggggcaaaatctgcttgcgaatacctcctaatctgcgcaaagatcgggttcaggttgcagttttccaggcaaataccaccagcaaatgactatgcgagtgactatgcgagaaaccaacagacaccactcccctgcaatcacacctgctgacccgttgcctgcgtcgacgttgcagcgagtnttgctgcacttttgcccgtgtctggccctggcaattacactaggcacagttttcccggtacaagcacagatggagtcacagcgggtgctctttgaccccgtcccgattccggcaaacgagaatgatgtactgcccctggtgaccattgatgaagcggtctcggggattggaagtattaacaacggtgccatgacgttggcagaacgccgggcacttgagcagcaaataagctcttatgttgagtccatcggggaccaggagtccgaggaagggccctattccacgcagctggtccaggaccttttcagtgccggtaatctctcgcaacaactgggcgaccacgaacaggctatggatttcttccagcgggcccagtcggttatccgtatcaacgaagggctggaaaccttgagccagattccaatcatggaggccatggtggcgagcacttatgcccagggcaaactgcgtgaggcagatgacctccaggacgccctgttttcactcaagcagggcagttacggcgagcgcagcgtatccatggttcccaccatgatcaatttcggacagtggcatatggacgccttcctggaacgctccaatatcctgctcaacgtggatcgcatgaacgtggtcaggttcatgtctgatccaggtaactacatccatgaatacgatccccgcgatacccccctgatgaacctgtatacggcccaggaaacattgctcaatgccattgatatcctggtgagcaagcgtgaatactttcatcctcaaatgctggaagctgaaaggctcctgttgaagagctacctgctcagcatgcatcgggaaaacatcctgtatgaacctgatttctacctgacacgcaaaaaacgcaagacaggttcccggctcaataccaattccatggagctnaatgaatccagggagtacaagctgggacagtcctcgcacaatcgcactgttacctttattcgcaatgacccggatcttgatcccggggaactggcacgagccatgctggaagcagctgactggcacctgctttttgagcgcaaggtaaaggccgccgacgaataccaggcggtttatgactactttgcagacattccgcaactggcagcttccgtgcaggacatcctgtatccatcacggccggtggtgcttcccacttacctgccaccaccaaattccagggaaaaactggacatcggcccgaacgagcntgtggattacttcggttacttcgatgtctcttttcgagtcgacaagtttggaaaagccaaacgcatcaaaatcctggaccagggcggcgatatttccagtaacctggaaatccgcatgaagcaatacctgcgcaaggtcctgtttcgcccctttttcaaagacggtgagccggacacttctacacgtacttaccgctatt

SEQ ID NO: 178 - DNA, 4000 bp, Escherichia coli
  misc_feature (254)..(254): n is a, c, g, or t
  misc_feature (926)..(926): n is a, c, g, or t
  misc_feature (1925)..(1925): n is a, c, g, or t
  misc_feature (1928)..(1928): n is a, c, g, or t
  misc_feature (1933)..(1934): n is a, c, g, or t
  misc_feature (1940)..(1940): n is a, c, g, or t
  misc_feature (1943)..(1943): n is a, c, g, or t
  misc_feature (1951)..(1952): n is a, c, g, or t
  misc_feature (1955)..(1955): n is a, c, g, or t
  misc_feature (1957)..(1958): n is a, c, g, or t
  misc_feature (1963)..(1964): n is a, c, g, or t
  misc_feature (1978)..(1978): n is a, c, g, or t
  misc_feature (1983)..(1983): n is a, c, g, or t
  misc_feature (1987)..(1988): n is a, c, g, or t
  misc_feature (1991)..(1991): n is a, c, g, or t
  misc_feature (1994)..(1994): n is a, c, g, or t
cacttgctttgaaaggcgcgcggcgaccagacccccagcacagctttggccgacttcagggcgtggtcgatcacatcaggaaacgtgtcgccgccgtcgataccgtgaatgtcaaagaaagtcttgagccctaacgcctcgagccggtccttgatcggttcaaccttcgcccgttcgacgcgcggataggaaatgaaaacgtcaaccaagctgctgctccccgtccgtcaacgcataacaaggcgcttagacanagtcaccaaggcgtgcgcttcccgtctggccgcttcagccccagcacggcgttcctaagcttgcgggtctgggcgaaggcggcgtgggcttcccaggatcggatgcgctgcagtgctgcgcccgcatcgagcgtcccagcacgggcctgatccttcagcccacgcaagcggttgcggaagcgcgatacgtttgcttcgggcaggcgcctgagtccaccgggaatgagtacatgaccgagaaattcggcgggctgatctgtggcgattatctccgtctttccaggatgcagcttcaaacgccgaccttcaagaaagcgcgcgatacgaacgcgccatcgctccaactgcattggatcgtcggcaaacaacgcgaaatcatcgacgtaacgcacataaggcgcggccagcacttcggtgcagaaatggtcgagcgggtcgagatagagattggcgaagaactggctggtcaggttgccgatcggcagcccgcgtcgccgcgagaacggcgtgaacaaatcgtcacccgaaaaatgctggttcaccggctcctggtcgtttgagccgtcaatgatgtggtccagcaagttgagcgtgcgcgcgtctgcgatacggcggcgcacatcgcgctttagaatgtcatgatcgatcgccggaaaatagcggaacacgtcncagcgcagaacgtgcgtgctgcgatcgcggtagtgttcgtaggtctcgattgcgcggtgcgtacctttgccggtgcgattggcgaacgtgttgtcgatgaagcccgcttcaaacaacggcgcgatgatcgcacagagcgcatgatgcaccacacggtcgcgaaacggggccgccgagacgatgcgatgcttaggatcaaagacttcgatcttgacgtaggcgccgggcctgtagctgccgtcttgcagcgttcgctccaaacgcagcagctccttttcgagatcggtcatgaaggcggccgcacccggcttggcgcgcttgcccttggccgccttcagcgccgcgcggcgtaggctgcgaaaactggcgatgccatcgaacagcccgtcatgccgcttcggcatgggcgtcatgggtcttgcgcccatgcaacttcgaccacgcgccgatctggcggccgataccatccagttcgcgggcggcatattcgtaacggcgctcatcgaggtagcgaaggtcgaaggcgagacggatcaggtggcggagtttttcgacgccgagattggccgcgcgcaagctgcctgcgcggtcgcggtcatacgtggcttcaagcaaccgttcgagcacgtcgagcgcactggactgaatgcgatcacccaatagaaacttttgcgcgcgcggaaatttctcaaccgccgggatcagccatcgcaagaagccattggtggattctagtgcgggacctatcacgcgctgtggcgtctggcgcttttgattgtgtgtcatgcacacaaacgtttgcagagtcgcccgttgcgccaagcgtgcggtgcgaaaaaacaacgccgctcggcttcgccgagacacaacaacaagagcggcttcgccgcgcttcgcgcctcacggcgctgcgccgtaaaggggcaggattccaggacgcaggatggaaggtgctaaagcgaaacgattttaaacggtcctggcaacacggaaaccgangtngctgnnccggtnggngggattgnnccngnngcggnncgccgaacggaggnactgngggnngtnatnccaagagccgccgcgaagaacgcgggacgaacagccactcgtatcgtaagcagaaccgttcgctggggcgcttggatagggattagcgtaacaatcctgcacccattcccaaacattgccgtgaacatcgtgaagaccaaacgcattaggttcgaatgaacctacggcaatagtcgaattgctgttgaagcgtgcctgagcagcggtaatcgccccgcccgtagaatacgccgtcgtcgtcccggcccgcgccgcgtattcccattctgcttccgtcagcaattggtagccgtggcccgtctcgcgcgagagccacgcagcgtagtcacgcgcgtcctgccatctcacgcaggtcaccgggtgattgtcgtcctgcgcaaacccagggctacgccatgacccatcctgcccagttgttgtatagcaatcatttggcggcgcggcgcggttggtcgcgttcacaaacgctgtccattcaccgcgcgacacttcgtatttgccggcggcaaagcgctgaagaacaaccctgcgctgcgggccttcgtcggccgagcggttcgcttcgctttccgacgatcccatcgtgaatgagccagccggtatcaccaccatttcagggcaggagtcgcaatctcggaacatctggccgtcgcgcagcgtggctgtggagtcaacaatggccgctgtttcgccagtatcgggagtatccggcgcaggcgcgccgtcgttccagggcgaccagattagcacagcgatcaacgccaggagcccgccgccaagcgacagcgcaaaaggcgtgcgctgcccgcgtcgcgcagaggcgccggcgagttcagcttcccgttgttgcgctaggcgaagctcacgctcggcgcgctgacggcgctcttgatcttcatgtgcgaactgctcagcctcggcgcgcgcgcgtcgctcggcctcctcgcgtgttctgcgctcgcgcgcttctcgttcaaggcgtgttagttctgcttcctcgtcgtcacgaacgcgcagcaactcatccacggccatgaacaacggactcgcttcgtgttgcgtaagccacgacctcagggccgccgcgggcgcctgcacgtcgagcgcgccatagctttcaatgtcctcgcgtccacaaagtttaccgacgcgcctgagcacgctcttccagcccgcgtgcgtgtgcgagggcgcggcaagccatgcccgcatgtcttcagcatgagtggcgttgaaaggcgcgggcgggtcgaagccatccgggcctgccgcgtagcacgccgctagcttcttattggtgaagccaatcaacgcctcagccttcacccaatctgacgcacgcgcagctggcgaccaacacacaaggatcgctttcgccgcgcgggcctcccgatcgatctcgtctgaaaaggcttcgcccgcgttcaggctggcgtcgaaccacacatcgatgcctaacaggcgcagttcctgcgccaagcgctcaaccgcttggcgctcttcgcgcttgtagctgatgaatacgtccgccacccagcccccgtttggctcaccgtaagaggtgacgcggcgacccgatacggtgtcgggcgttcgggagctaccctagccgcgccaggaacaagcatagccagtcatgatgcacacacaagggctggacgaacaggaacggctcgaaccgggctctctcaagccgctcgcgcgatcaggccatcgggctggattgggccaataggactaacccgctcgcgcgggacgcagattctgcaagcacttgcgccagtgtcatcgccttctgtctcccgggctgcgcccggatgggccgggtcgagcccagacgggagacccagccatggccgacgcgcctcagattcatcccctgcgccagcgcatgatcgaagacatgacgctgcggggcatcaacagcgcctcgcagaagacctacctccgtgcggtccgcgcgtgctgcacccatctgcggcgcaaccccgctgagctgacagccg

SEQ ID NO: 179 - DNA, 4000 bp, Escherichia coli
  misc_feature (1940)..(1940): n is a, c, g, or t
  misc_feature (1969)..(1969): n is a, c, g, or t
  misc_feature (1988)..(1988): n is a, c, g, or t
  misc_feature (2299)..(2299): n is a, c, g, or t
  misc_feature (2608)..(2608): n is a, c, g, or t
  misc_feature (2612)..(2615): n is a, c, g, or t
  misc_feature (2618)..(2623): n is a, c, g, or t
  misc_feature (2625)..(2627): n is a, c, g, or t
  misc_feature (2630)..(2630): n is a, c, g, or t
  misc_feature (2632)..(2634): n is a, c, g, or t
  misc_feature (2636)..(2636): n is a, c, g, or t
  misc_feature (2639)..(2641): n is a, c, g, or t
  misc_feature (2643)..(2643): n is a, c, g, or t
  misc_feature (2645)..(2646): n is a, c, g, or t
  misc_feature (2649)..(2649): n is a, c, g, or t
  misc_feature (2652)..(2653): n is a, c, g, or t
  misc_feature (2655)..(2658): n is a, c, g, or t
  misc_feature (2660)..(2660): n is a, c, g, or t
  misc_feature (2662)..(2668): n is a, c, g, or t
  misc_feature (2670)..(2670): n is a, c, g, or t
  misc_feature (2674)..(2674): n is a, c, g, or t
  misc_feature (2676)..(2677): n is a, c, g, or t
  misc_feature (2679)..(2679): n is a, c, g, or t
  misc_feature (2682)..(2683): n is a, c, g, or t
  misc_feature (2687)..(2687): n is a, c, g, or t
  misc_feature (2689)..(2691): n is a, c, g, or t
  misc_feature (2693)..(2699): n is a, c, g, or t
  misc_feature (2703)..(2705): n is a, c, g, or t
  misc_feature (2709)..(2713): n is a, c, g, or t
  misc_feature (2715)..(2716): n is a, c, g, or t
  misc_feature (2718)..(2721): n is a, c, g, or t
  misc_feature (2723)..(2727): n is a, c, g, or t
  misc_feature (2729)..(2730): n is a, c, g, or t
  misc_feature (2732)..(2734): n is a, c, g, or t
  misc_feature (2737)..(2737): n is a, c, g, or t
  misc_feature (2740)..(2746): n is a, c, g, or t
  misc_feature (2748)..(2750): n is a, c, g, or t
  misc_feature (2753)..(2753): n is a, c, g, or t
  misc_feature (2756)..(2756): n is a, c, g, or t
  misc_feature (2759)..(2759): n is a, c, g, or t
  misc_feature (2764)..(2765): n is a, c, g, or t
  misc_feature (2769)..(2770): n is a, c, g, or t
  misc_feature (2772)..(2777): n is a, c, g, or t
  misc_feature (2780)..(2780): n is a, c, g, or t
  misc_feature (2782)..(2782): n is a, c, g, or t
  misc_feature (2785)..(2790): n is a, c, g, or t
  misc_feature (2792)..(2794): n is a, c, g, or t
  misc_feature (2797)..(2799): n is a, c, g, or t
  misc_feature (2802)..(2802): n is a, c, g, or t
  misc_feature (2804)..(2805): n is a, c, g, or t
  misc_feature (2809)..(2812): n is a, c, g, or t
  misc_feature (2814)..(2818): n is a, c, g, or t
  misc_feature (2820)..(2834): n is a, c, g, or t
  misc_feature (2836)..(2847): n is a, c, g, or t
  misc_feature (2851)..(2853): n is a, c, g, or t
  misc_feature (2855)..(2859): n is a, c, g, or t
  misc_feature (2861)..(2861): n is a, c, g, or t
  misc_feature (2863)..(2865): n is a, c, g, or t
  misc_feature (2867)..(2867): n is a, c, g, or t
  misc_feature (2870)..(2872): n is a, c, g, or t
  misc_feature (2874)..(2881): n is a, c, g, or t
  misc_feature (2883)..(2883): n is a, c, g, or t
  misc_feature (2885)..(2887): n is a, c, g, or t
  misc_feature (2889)..(2894): n is a, c, g, or t
  misc_feature (2898)..(2899): n is a, c, g, or t
  misc_feature (2901)..(2902): n is a, c, g, or t
  misc_feature (2904)..(2905): n is a, c, g, or t
  misc_feature (2908)..(2914): n is a, c, g, or t
  misc_feature (2916)..(2916): n is a, c, g, or t
  misc_feature (2919)..(2922): n is a, c, g, or t
  misc_feature (2924)..(2924): n is a, c, g, or t
  misc_feature (2926)..(2929): n is a, c, g, or t
  misc_feature (2931)..(2935): n is a, c, g, or t
  misc_feature (2937)..(2937): n is a, c, g, or t
  misc_feature (2940)..(2940): n is a, c, g, or t
  misc_feature (2942)..(2943): n is a, c, g, or t
  misc_feature (2946)..(2953): n is a, c, g, or t
  misc_feature (2955)..(2955): n is a, c, g, or t
  misc_feature (2957)..(2958): n is a, c, g, or t
  misc_feature (2960)..(2960): n is a, c, g, or t
  misc_feature (2962)..(2965): n is a, c, g, or t
  misc_feature (2968)..(2968): n is a, c, g, or t
  misc_feature (2970)..(2973): n is a, c, g, or t
  misc_feature (2976)..(2978): n is a, c, g, or t
  misc_feature (2980)..(2980): n is a, c, g, or t
  misc_feature (2982)..(2985): n is a, c, g, or t
  misc_feature (2987)..(2992): n is a, c, g, or t
  misc_feature (2994)..(2994): n is a, c, g, or t
  misc_feature (2997)..(2998): n is a, c, g, or t
  misc_feature (3000)..(3002): n is a, c, g, or t
  misc_feature (3004)..(3004): n is a, c, g, or t
  misc_feature (3006)..(3007): n is a, c, g, or t
  misc_feature (3009)..(3010): n is a, c, g, or t
  misc_feature (3012)..(3014): n is a, c, g, or t
  misc_feature (3016)..(3019): n is a, c, g, or t
  misc_feature (3024)..(3027): n is a, c, g, or t
  misc_feature (3029)..(3030): n is a, c, g, or t
  misc_feature (3032)..(3035): n is a, c, g, or t
  misc_feature (3040)..(3040): n is a, c, g, or t
  misc_feature (3045)..(3056): n is a, c, g, or t
  misc_feature (3058)..(3058): n is a, c, g, or t
  misc_feature (3060)..(3063): n is a, c, g, or t
  misc_feature (3065)..(3067): n is a, c, g, or t
  misc_feature (3069)..(3071): n is a, c, g, or t
  misc_feature (3076)..(3076): n is a, c, g, or t
  misc_feature (3078)..(3079): n is a, c, g, or t
  misc_feature (3082)..(3092): n is a, c, g, or t
  misc_feature (3094)..(3094): n is a, c, g, or t
  misc_feature (3096)..(3098): n is a, c, g, or t
  misc_feature (3102)..(3104): n is a, c, g, or t
  misc_feature (3108)..(3110): n is a, c, g, or t
  misc_feature (3113)..(3115): n is a, c, g, or t
  misc_feature (3118)..(3122): n is a, c, g, or t
  misc_feature (3124)..(3129): n is a, c, g, or t
  misc_feature (3132)..(3134): n is a, c, g, or t
  misc_feature (3136)..(3138): n is a, c, g, or t
  misc_feature (3140)..(3141): n is a, c, g, or t
  misc_feature (3143)..(3144): n is a, c, g, or t
  misc_feature (3148)..(3149): n is a, c, g, or t
  misc_feature (3151)..(3151): n is a, c, g, or t
  misc_feature (3153)..(3153): n is a, c, g, or t
  misc_feature (3155)..(3155): n is a, c, g, or t
  misc_feature (3157)..(3161): n is a, c, g, or t
  misc_feature (3163)..(3165): n is a, c, g, or t
  misc_feature (3167)..(3170): n is a, c, g, or t
  misc_feature (3172)..(3175): n is a, c, g, or t
  misc_feature (3177)..(3179): n is a, c, g, or t
  misc_feature (3181)..(3182): n is a, c, g, or t
  misc_feature (3184)..(3186): n is a, c, g, or t
  misc_feature (3188)..(3189): n is a, c, g, or t
  misc_feature (3191)..(3192): n is a, c, g, or t
  misc_feature (3194)..(3194): n is a, c, g, or t
  misc_feature (3197)..(3203): n is a, c, g, or t
  misc_feature (3207)..(3207): n is a, c, g, or t
  misc_feature (3209)..(3209): n is a, c, g, or t
  misc_feature (3212)..(3217): n is a, c, g, or t
  misc_feature (3219)..(3224): n is a, c, g, or t
  misc_feature (3229)..(3231): n is a, c, g, or t
  misc_feature (3233)..(3235): n is a, c, g, or t
  misc_feature (3237)..(3240): n is a, c, g, or t
  misc_feature (3242)..(3244): n is a, c, g, or t
  misc_feature (3246)..(3246): n is a, c, g, or t
  misc_feature (3248)..(3249): n is a, c, g, or t
  misc_feature (3251)..(3251): n is a, c, g, or t
  misc_feature (3256)..(3256): n is a, c, g, or t
  misc_feature (3258)..(3261): n is a, c, g, or t
  misc_feature (3263)..(3266): n is a, c, g, or t
  misc_feature (3268)..(3270): n is a, c, g, or t
  misc_feature (3273)..(3273): n is a, c, g, or t
  misc_feature (3275)..(3278): n is a, c, g, or t
  misc_feature (3281)..(3285): n is a, c, g, or t
  misc_feature (3287)..(3290): n is a, c, g, or t
  misc_feature (3292)..(3294): n is a, c, g, or t
  misc_feature (3296)..(3296): n is a, c, g, or t
  misc_feature (3298)..(3298): n is a, c, g, or t
  misc_feature (3300)..(3300): n is a, c, g, or t
  misc_feature (3303)..(3303): n is a, c, g, or t
  misc_feature (3305)..(3305): n is a, c, g, or t
  misc_feature (3307)..(3307): n is a, c, g, or t
  misc_feature (3309)..(3309): n is a, c, g, or t
  misc_feature (3311)..(3311): n is a, c, g, or t
  misc_feature (3313)..(3313): n is a, c, g, or t
  misc_feature (3315)..(3315): n is a, c, g, or t
  misc_feature (3317)..(3318): n is a, c, g, or t
  misc_feature (3320)..(3321): n is a, c, g, or t
  misc_feature (3323)..(3323): n is a, c, g, or t
  misc_feature (3325)..(3325): n is a, c, g, or t
  misc_feature (3327)..(3328): n is a, c, g, or t
  misc_feature (3330)..(3330): n is a, c, g, or t
  misc_feature (3332)..(3336): n is a, c, g, or t
  misc_feature (3340)..(3345): n is a, c, g, or t
  misc_feature (3347)..(3349): n is a, c, g, or t
  misc_feature (3352)..(3359): n is a, c, g, or t
  misc_feature (3361)..(3369): n is a, c, g, or t
  misc_feature (3372)..(3372): n is a, c, g, or t
  misc_feature (3374)..(3382): n is a, c, g, or t
  misc_feature (3385)..(3386): n is a, c, g, or t
  misc_feature (3388)..(3390): n is a, c, g, or t
  misc_feature (3392)..(3394): n is a, c, g, or t
  misc_feature (3400)..(3407): n is a, c, g, or t
  misc_feature (3409)..(3410): n is a, c, g, or t
  misc_feature (3412)..(3412): n is a, c, g, or t
  misc_feature (3415)..(3418): n is a, c, g, or t
  misc_feature (3424)..(3426): n is a, c, g, or t
  misc_feature (3429)..(3433): n is a, c, g, or t
  misc_feature (3436)..(3437): n is a, c, g, or t
  misc_feature (3439)..(3442): n is a, c, g, or t
  misc_feature (3445)..(3445): n is a, c, g, or t
  misc_feature (3450)..(3458): n is a, c, g, or t
  misc_feature (3460)..(3464): n is a, c, g, or t
  misc_feature (3473)..(3473): n is a, c, g, or t
  misc_feature (3476)..(3476): n is a, c, g, or t
  misc_feature (3478)..(3478): n is a, c, g, or t
  misc_feature (3480)..(3480): n is a, c, g, or t
  misc_feature (3482)..(3487): n is a, c, g, or t
  misc_feature (3489)..(3489): n is a, c, g, or t
  misc_feature (3492)..(3499): n is a, c, g, or t
  misc_feature (3501)..(3502): n is a, c, g, or t
  misc_feature (3504)..(3512): n is a, c, g, or t
  misc_feature (3514)..(3518): n is a, c, g, or t
  misc_feature (3520)..(3520): n is a, c, g, or t
  misc_feature (3522)..(3524): n is a, c, g, or t
  misc_feature (3526)..(3531): n is a, c, g, or t
  misc_feature (3535)..(3536): n is a, c, g, or t
  misc_feature (3538)..(3547): n is a, c, g, or t
  misc_feature (3549)..(3555): n is a, c, g, or t
  misc_feature (3557)..(3565): n is a, c, g, or t
  misc_feature (3567)..(3571): n is a, c, g, or t
  misc_feature (3573)..(3573): n is a, c, g, or t
  misc_feature (3575)..(3575): n is a, c, g, or t
  misc_feature (3577)..(3580): n is a, c, g, or t
  misc_feature (3582)..(3584): n is a, c, g, or t
  misc_feature (3586)..(3587): n is a, c, g, or t
  misc_feature (3589)..(3592): n is a, c, g, or t
  misc_feature (3596)..(3597): n is a, c, g, or t
  misc_feature (3599)..(3601): n is a, c, g, or t
  misc_feature (3603)..(3606): n is a, c, g, or t
  misc_feature (3608)..(3611): n is a, c, g, or t
  misc_feature (3613)..(3613): n is a, c, g, or t
  misc_feature (3615)..(3616): n is a, c, g, or t
  misc_feature (3618)..(3624): n is a, c, g, or t
  misc_feature (3627)..(3628): n is a, c, g, or t
  misc_feature (3631)..(3632): n is a, c, g, or t
  misc_feature (3634)..(3636): n is a, c, g, or t
  misc_feature (3638)..(3638): n is a, c, g, or t
  misc_feature (3641)..(3641): n is a, c, g, or t
  misc_feature (3643)..(3645): n is a, c, g, or t
  misc_feature (3648)..(3650): n is a, c, g, or t
  misc_feature (3652)..(3656): n is a, c, g, or t
  misc_feature (3658)..(3662): n is a, c, g, or t
  misc_feature (3665)..(3665): n is a, c, g, or t
  misc_feature (3667)..(3667): n is a, c, g, or t
  misc_feature (3670)..(3672): n is a, c, g, or t
  misc_feature (3674)..(3675): n is a, c, g, or t
  misc_feature (3677)..(3677): n is a, c, g, or t
  misc_feature (3679)..(3680): n is a, c, g, or t
  misc_feature (3682)..(3685): n is a, c, g, or t
  misc_feature (3688)..(3689): n is a, c, g, or t
  misc_feature (3692)..(3692): n is a, c, g, or t
  misc_feature (3694)..(3695): n is a, c, g, or t
  misc_feature (3697)..(3709): n is a, c, g, or t
  misc_feature (3712)..(3713): n is a, c, g, or t
  misc_feature (3718)..(3719): n is a, c, g, or t
  misc_feature (3721)..(3723): n is a, c, g, or t
  misc_feature (3728)..(3729): n is a, c, g, or t
  misc_feature (3732)..(3734): n is a, c, g, or t
  misc_feature (3736)..(3741): n is a, c, g, or t
  misc_feature (3744)..(3747): n is a, c, g, or t
  misc_feature (3749)..(3755): n is a, c, g, or t
  misc_feature (3757)..(3760): n is a, c, g, or t
  misc_feature (3763)..(3763): n is a, c, g, or t
  misc_feature (3765)..(3765): n is a, c, g, or t
  misc_feature (3767)..(3770): n is a, c, g, or t
  misc_feature (3776)..(3777): n is a, c, g, or t
  misc_feature (3779)..(3781): n is a, c, g, or t
  misc_feature (3783)..(3785): n is a, c, g, or t
  misc_feature (3788)..(3795): n is a, c, g, or t
  misc_feature (3800)..(3804): n is a, c, g, or t
  misc_feature (3807)..(3810): n is a, c, g, or t
  misc_feature (3812)..(3812): n is a, c, g, or t
  misc_feature (3817)..(3817): n is a, c, g, or t
  misc_feature (3820)..(3821): n is a, c, g, or t
  misc_feature (3823)..(3824): n is a, c, g, or t
  misc_feature (3826)..(3835): n is a, c, g, or t
  misc_feature (3837)..(3841): n is a, c, g, or t
  misc_feature (3843)..(3844): n is a, c, g, or t
  misc_feature (3846)..(3855): n is a, c, g, or t
  misc_feature (3857)..(3857): n is a, c, g, or t
  misc_feature (3860)..(3870): n is a, c, g, or t
  misc_feature (3872)..(3872): n is a, c, g, or t
  misc_feature (3874)..(3875): n is a, c, g, or t
  misc_feature (3877)..(3877): n is a, c, g, or t
  misc_feature (3879)..(3881): n is a, c, g, or t
  misc_feature (3883)..(3884): n is a, c, g, or t
  misc_feature (3886)..(3886): n is a, c, g, or t
  misc_feature (3889)..(3890): n is a, c, g, or t
  misc_feature (3892)..(3892): n is a, c, g, or t
  misc_feature (3895)..(3896): n is a, c, g, or t
  misc_feature (3898)..(3899): n is a, c, g, or t
  misc_feature (3901)..(3903): n is a, c, g, or t
  misc_feature (3905)..(3907): n is a, c, g, or t
  misc_feature (3909)..(3910): n is a, c, g, or t
  misc_feature (3913)..(3914): n is a, c, g, or t
  misc_feature (3916)..(3917): n is a, c, g, or t
  misc_feature (3919)..(3921): n is a, c, g, or t
  misc_feature (3923)..(3923): n is a, c, g, or t
  misc_feature (3925)..(3925): n is a, c, g, or t
  misc_feature (3927)..(3928): n is a, c, g, or t
  misc_feature (3930)..(3930): n is a, c, g, or t
  misc_feature (3932)..(3932): n is a, c, g, or t
  misc_feature (3935)..(3935): n is a, c, g, or t
  misc_feature (3937)..(3938): n is a, c, g, or t
  misc_feature (3940)..(3940): n is a, c, g, or t
  misc_feature (3942)..(3942): n is a, c, g, or t
  misc_feature (3944)..(3945): n is a, c, g, or t
  misc_feature (3947)..(3948): n is a, c, g, or t
  misc_feature (3951)..(3953): n is a, c, g, or t
  misc_feature (3957)..(3957): n is a, c, g, or t
  misc_feature (3959)..(3959): n is a, c, g, or t
  misc_feature (3962)..(3964): n is a, c, g, or t
  misc_feature (3966)..(3969): n is a, c, g, or t
  misc_feature (3974)..(3977): n is a, c, g, or t
  misc_feature (3980)..(3981): n is a, c, g, or t
  misc_feature (3983)..(3985): n is a, c, g, or t
  misc_feature (3989)..(3992): n is a, c, g, or t
  misc_feature (3995)..(3997): n is a, c, g, or t
  misc_feature (3999)..(4000): n is a, c, g, or t
tcgtcaaccgggctccataagattgctgcggacccagactttcaaaataaggcctgacccagtgcgaatgaagcgcctgctttcatccgagaagggggcaagagcgtagtcaccatgagccttccaaaaggcatgcctagagccgccaaatctgtcccaaacgcccatcctcgttaacaaatctagcggtgtccatacccacgataaaagtcattgacgcttgctactttgcgggtctaaactagatctcggtcttgaaactgaggtgatttgtgtctgattctaaagcctaccgagctccaacgaaattgattcacggtaagcactcaacggagaagtgggattacaactaccatgttgttcccccgaaaaccgcatcgaccacgtttagattggcatcggtgctcagaggtaaagaaggcttcattgacttcggcgccccttggggtcagggggccaccaaaccgacttacatctatgaccgcctgaccgagccctccacaggcatgttggaagaggtctatgtccaggctgaaggcggcgattttgcctgcgcctttacgtgtggtatggcggccatttcggcgtcattgatggcggtatccaaggctggtgacaatatagtcgcccacccaactatgtatggttgtacttacagccttttggttaaccagcttcctaggtttggcattacatcaaaactggtcaattgctcggacttggatgctgttggagccgctttggatgaaaacacgtcggctgtctaccttgagacacctgctaatccaacgttggaatgtattgatattgcagcagttcgcaaggtcatcgacgcgcacaatgccaaggtcgggcctgaacgcaaggtgcgcctgattgttgacaacacctttcatacgttttggggacagcgcccgttacagcttggtgcagacatagttgtatgcagtctgactaagggtgtgggtggctttggggtcgatatgggcgggatgattgttgggcccaaagatctggaccttaccgttcgcttgattcgcaaagactttggtggcgtgctgcctccttcaagtgcctggaacttccaagtttacggcatcccaacgatgccaatcaggctgactcagcaggctgcctcggccatgaagattgcccagtacctggaatccaaccccttggtgggcaaagtgaattatcccggccttgaatcatacccaggcaaagagattgctaaacgtcagatgaccacccctaatggtgattttttcccaggtagcatgatttatttcgagcttgctggggattatgaacaggctagcaagcgttgtcatcaactgataaatcacatagctgacaacgcctacagcattacgctggctgtcagcctagggatgaccaagaccctggttgaagctcctgggctgatgacccactcggctctggaccaatgcgcccaggaaaaggccggcattcacccaggcgccgtccgtctatccattggcctcgaagatgtatccgatctcctagcagacctcgaacgcgcctttagtacagtcgaataattccaggtccaaaacaacgaaccaattacgaatctgagatattagagacgggtttcttctgtttaaacaagtagatacgcaaagggcacccgaaggtgcccccgcgtttagtgaacgattctacgaattattcggtttcgttctcgaagaacatggcggaagcgccaacggaggagcactcaccgtattgggcattgggatcgccatacaggaagcgcttgaaggttgacatctcgccgtcgcagtcaaggtctgcgtgggcccatgctgttgcttgagcctcattcaagtccttaccgttgttctcgaaacgatagacgaaatagtgctcgtcagtcatctggaaggtcagagcagaccactgagcggtgttccatncttcggagtcggagtcgcagcggccgtcnctattgacgtccagcaacncatcgcagcagttgtcacctggggtcaagccctgactggctgggaactggcagtacagcttggagcccacactggtgacacgtggggcggtgtagtacgaagaagcacccttgacgattttgtcgagctcgtcgatagcctcagttgtcttggcacggcgcatgtacttgatgaacgcaggtactgcaatgacagccaagataccgaggatggcaacgacgaccatcaattcgaccagggtgaagcccttgaaaccaattttgcggaaacgagctagcatgtttgacctcctaaaagtgaccttttttccncctggccatccgaccaagtggatagcccataccgggcaggccactaggcgctgcccaacgggcgcttcttagaagcaatcatcgtgccaaagtgaaaatactgtgaataaagggtgttatgggttttgagcccacaatctagggcctgtttttacaaaaaacgcgatggtgagtgacaagaattgtcagtgggcaggaaaaaatgtgaaggaaggtgacagggacagggacagggacagggacggggacagggacggggacagggacagggacagggacagggacagggacagggacggggacagggangggnnnnggnnnnnngnnnggnannngnacnnngncnnggncgnngnnnngncnnnnnnngngtcncnngnggnntagncnnngnnnnnnntggnnntagnnnnntnncnnnncnnnnncnngnnnggngannnnnnntnnnagnttngtngaganngctnntnnnnnngcnantgnnnnnncnnntgnnnttncnngttnnnntnnnnntnnnnnnnnnnnnnnnannnnnnnnnnnnctgnnntnnnnngntnnncnagnnntnnnnnnnngncnnntnnnnnnactnngnntnntannnnnnntnttnnnntngnnnntnnnnngnctncnnttnnnnnnnngntnngntnnnnggntnnnnatnnnantnnnnannnnnntncgnntnnntngnngnntnnntnnnngggtnnnnannannnnttggngcttnnnnnnnnnnnngngnnnncnnnannnccttntnntannnnnnnnnnngngnnnacannnggcnnngcnnnttnnnnnannnnnnttnnngnnncnncnnccanngnancncnnnnngnnncnnnntnnnngnnngnnannntnntnncnacnnnnnnngtgncnccnnnnnnannnnnntctgnnngnnncnnnntnnngncnncnagttncnnnncnnnntnnnaangnnnntcnnnnngnnnntnnntntngnccncnantncntnancnntnncnananncnannnnntgtnnnnnncnnngtnnnnnnnnannnnnnnnnccntnnnnnnnnncannannntnnntgcaannnnnnnngnngnaannnnaggggnnnttnnnnntgnnannnnaanacatnnnnnnnnnannnnngcaatgatnggnantntnnnnnntnaannnnnnnnanntnnnnnnnnnannnnngntnnnannnnnnaaanncnnnnnnnnnngnnnnnnnannnnnnnnnannnnntngnannnncnnngnnannnnctgnngnnngnnnngnnnnantnncnnnnnnnatnncanngnnngngcnannngcnnnannnnnannnnngcnantgnnncnntnanngnnnnaannagngnncnnnnnnnnnnnnnaannccagnngnnnggacnntcnnnannnnnntgnnnngnnnnnnngnnnnggntncnnnnaaggcnngnnntnnngcnnnnnnnntgccnnnnnttnnnncnagggntgnnannannnnnnnnnncnnnnngnngnnnnnnnnnnanatnnnnnnnnnnngngnnancnnnanngncanngnaannanngnnncnnntnncannannannnanangnnanangcnanngncngnncnngannnagancnatnnncnnnnctatnnnnatnncnnnggcnnnngcnnngnn

SEQ ID NO: 180 - DNA, 4000 bp, Escherichia coli
  misc_feature (1981)..(1981): n is a, c, g, or t
atcgatcccgcgagcgccgtgtcggcggtccaggggttcgtgctcgacggctcgccgggtttgcgtgccgcggcgatggcgaataccgcggtgtttacgagcggcttcggcgtcttgcgactcgggttgacgctcgcgggtatcgcgcactcgtggtttctcggaacggtgcgtgaatcgccagaaacacgcgtggcgatgcgcatttagattttttgtcgcgagtgcgacgctcgaacgaccgtgggaggtgatgacagatgacagatacttccgagcgcgcgcaacgcggaccgacaatcgtcggtgcagcgacggccgctccgtgagcgagtatcaaaatattagttttcaatctgatcccggaggtttctgatagttctgagactcgttttttgtgcgttcgacagactgactcgcttttcccgcgcgcacgcaggtcgtcatggcggcgtttggtgtcggaggatacgctctcgtgtgcgcctacttcatcgtcggcagtgcggtgacaaagataaaattgaaggaaaagcaagccgaggggatagcggaggcgcggggagggcttcgtggccccggaagcgtgtgggggagcgggacggcggggattttgtgcgctattgcggcgctttcgggatggacacccgtgtcgttggaactctggcggatcggtttcgtggcgagcttttgcagcaaactcagcgacaccaccgcaagtgagatcggcaaggcgtacggcaagacgacctatatgagcacgccaccgttcaagttagttcccagaggtacggagggcgccgttagcgtcgaaggaaccgtggctggtatcgtcgtatcgggtctgttcgccgggcttgcgttcatcatcggtcaactggatgccgtcggcgtcggtgtatgcgtcctcgctgccttcatcgcgacgaccttcgagagcatgctcggggcggctgtgcagggtagaaaaggatttgattggatgtctaacgacgtggtgaacggaatacagatcacgctcgcggctggggtggccatcgcgttgagaacaatcgtctgagtcgactagattcgaatcatcgtcgcgacgacactcgtagtaaaatttacaaactagatagaatttaacagatggctagttcaggaccccttttctgtcatccggcacggataatgaaaaatctcgttcctcacgacccctccgacgtcgccgccctttgtttatcatcgcaccgcgtcacgaaatcatgaacctcgtcggcaaactttttcggttcttcgaggtacaaccaatgcccacagttttcgaaaatcttcaactccgaatcgggaatcatctcagccaccgctttgatgccatctatgggaaatattttggtttcacgtcccgccaggacgagcgccgggatggtcatgtgtcgacactcgcttcgccagtcttggtgcgtgtggtcgtacatcagctcgcacaacgcctcgggacagcactcgagcgtctcgctcttcaccatggcgagcacgtcgggatcaacgacactgagatcgtgaaagcaagcctcggcgttaccatccgcgaacgtagacatatctcttctcacagccgccgccaacgcctcgtaactcgccgcgtcgtaacaacccaaactccccagctcccaatccgggcgtctattctgcaacggggcctgatccacgagcaccgcgccgatgacgctcacctcggtcgcatcgctcccccctccgacgcgccatcgcgcgccgcacaactgtaagagcgaccaaacgaccgcgcatcccatcgacgcgccgacgagcacgaacccgctcggcgacagtctcgccgccgcctgctccaggacctcccgcaggtccatcgccagccgcgcgacggtgtgcccgcgtcccggacggtcgctcccgccgtgccctcgaagatcgaacgcgatcgtcgcgggaaagtcgtcgcgcgccgcgcgcatcnccggcgaaaaatacgccgccgtcccgctccaaccgtggacgaggacgacgacggggcgatcgcgcgcgggcgtagcgccgccgacgacggcgcggaggcgaacgcggccgccgtcgacggggtccaggtcgagcgcggtccacggcatcgcgcgtcgacgagtgtttgggagcgaggtcgattgcaaagggcggcgtcgctcggttctaaagacgagatttaattttggtgtccaacggaccctgagcgagggtgcgaccctgaatggcgcagttctctaagtaaggacacggttggtacagaccgccgtacttggtggaccaagcgcggagcttggcggcgatcacggcggggccgacggagtcgccccagtggacgacgccgcctcgaaaggcagggaagcccatgcctaagattgccgcggtgtcgatatcgccagccttgacgacgatgccttcggaaagaactctgcacgcttcgttgacgaccgggaaaaagatcatctcagcgatctcttgcggactcaagcccgccggaacgggcgaaccgtcgagcggaagtttggactgcgctcgggacgcggcgatgagcatctcgacaccctcgggatcaggcgtggcccggcgcttattgtcgtacttgtaaaatccagcaccggacttctcgcccaatcttttgttcgcgagcaacgatgggatgaggggcgagcggtagactcgatcggggaaatcgtcgatgaagttctgcccgacgtgaacgccgacatcgtgaccgaccaaatcacccaaacggaacggacccatgggcattccaaacatcattatcgcacgatcgatggcgtacggatcgcacccaatatccacgagcaccgtcgcgctcatggtgtacggaaagaagatacggttgacggcgaatccggtgcagtttcccacgacgacaggcgtcttcttaatttgtttactcaagcccaaggtgtccaccaaaatctgcgccggagtcgcgtcggtacgaataatttcgaacagctgcatgacatgagcaggtgaaaagaaatgagcacccacgatgcgctctgggttcttcattttggcggcgatttttgtaatgtcgatggtactcgtgttcgtgctcaagatgcaatcaggcttgcaaatcctctccaactcacagaagatcttttgcttgagaggtaagttttcaatgacagcctcgatgaccatatcacactgacggaaatcttgatctgtgagtgtaggcttgacgagcgacatcagctggcgcgccttgtcttcagtcatcctgcctttacgaaccatgctcgtcaagtttgattgaatgcgaccgacgcccgcgtccaaaaactcttgcttgatctctttcaacacgacttgaattccagcgagcaagcacgccgtggcgattccactccccatcaaaccgcctccgacgacgccgactgacttcatcggtcgaggcttaaggccgacgtccgtgattcccggaactacgttcgtcgcgcgctgagcgaagaagaagtgaaccaaacctttcgcggcaggcgatgatacagcctttttaaagttttctgcctcgcgcttcagtccctcttcagggccttgggcgagtccgaccgagatggcatcgacgcaaagcgccacgtgcggcatcactgactgcactcgcttggccttcttgctcgcctccttgagaatcatctccgtagacttgggatctggtagtttgtctttacgatacatcgaaagctcccgcttcacggagccactcgcgatcgccttcgccaacgccgacgcctcggcgacgattcttgacgggtccgcaattttgtcaaccaatccaagtttcagcgcctcctccgccttgatcgacttgctcttcagcatcatctccagggacttctccaagcccaccaaccgcggcaggcgttgagtgccaccaaacccaggaatcactcccaactgaagctcaggcaaccccaactgcgccctcggcgtcgccacg

SEQ ID NO: 181 - DNA, 4000 bp, Escherichia coli
  misc_feature (1544)..(1544): n is a, c, g, or t
  misc_feature (1987)..(1988): n is a, c, g, or t
  misc_feature (1997)..(1997): n is a, c, g, or t
  misc_feature (2004)..(2004): n is a, c, g, or t
  misc_feature (2149)..(2151): n is a, c, g, or t
  misc_feature (2203)..(2203): n is a, c, g, or t
  misc_feature (2243)..(2243): n is a, c, g, or t
  misc_feature (2257)..(2258): n is a, c, g, or t
  misc_feature (2261)..(2261): n is a, c, g, or t
  misc_feature (2268)..(2268): n is a, c, g, or t
  misc_feature (2272)..(2272): n is a, c, g, or t
  misc_feature (2274)..(2274): n is a, c, g, or t
  misc_feature (2278)..(2278): n is a, c, g, or t
  misc_feature (2280)..(2280): n is a, c, g, or t
  misc_feature (2287)..(2287): n is a, c, g, or t
  misc_feature (2292)..(2293): n is a, c, g, or t
  misc_feature (2298)..(2300): n is a, c, g, or t
  misc_feature (2306)..(2307): n is a, c, g, or t
  misc_feature (2309)..(2310): n is a, c, g, or t
  misc_feature (2317)..(2317): n is a, c, g, or t
  misc_feature (2319)..(2319): n is a, c, g, or t
  misc_feature (2327)..(2327): n is a, c, g, or t
  misc_feature (2330)..(2330): n is a, c, g, or t
  misc_feature (2336)..(2336): n is a, c, g, or t
  misc_feature (2341)..(2343): n is a, c, g, or t
  misc_feature (2345)..(2345): n is a, c, g, or t
  misc_feature (2348)..(2348): n is a, c, g, or t
  misc_feature (2350)..(2350): n is a, c, g, or t
  misc_feature (2359)..(2360): n is a, c, g, or t
  misc_feature (2365)..(2365): n is a, c, g, or t
  misc_feature (2369)..(2369): n is a, c, g, or t
  misc_feature (2372)..(2373): n is a, c, g, or t
  misc_feature (2375)..(2375): n is a, c, g, or t
  misc_feature (2377)..(2377): n is a, c, g, or t
  misc_feature (2380)..(2380): n is a, c, g, or t
  misc_feature (2384)..(2385): n is a, c, g, or t
  misc_feature (2388)..(2389): n is a, c, g, or t
  misc_feature (2392)..(2392): n is a, c, g, or t
  misc_feature (2399)..(2404): n is a, c, g, or t
  misc_feature (2407)..(2409): n is a, c, g, or t
  misc_feature (2414)..(2415): n is a, c, g, or t
  misc_feature (2422)..(2422): n is a, c, g, or t
  misc_feature (2424)..(2424): n is a, c, g, or t
  misc_feature (2429)..(2432): n is a, c, g, or t
  misc_feature (2435)..(2437): n is a, c, g, or t
  misc_feature (2442)..(2444): n is a, c, g, or t
  misc_feature (2448)..(2448): n is a, c, g, or t
  misc_feature (2452)..(2452): n is a, c, g, or t
  misc_feature (2455)..(2455): n is a, c, g, or t
  misc_feature (2457)..(2457): n is a, c, g, or t
  misc_feature (2460)..(2460): n is a, c, g, or t
  misc_feature (2462)..(2462): n is a, c, g, or t
  misc_feature (2465)..(2466): n is a, c, g, or t
  misc_feature (2471)..(2471): n is a, c, g, or t
  misc_feature (2476)..(2476): n is a, c, g, or t
  misc_feature (2478)..(2478): n is a, c, g, or t
  misc_feature (2483)..(2483): n is a, c, g, or t
  misc_feature (2490)..(2490): n is a, c, g, or t
  misc_feature (2493)..(2496): n is a, c, g, or t
  misc_feature (2498)..(2498): n is a, c, g, or t
  misc_feature (2505)..(2507): n is a, c, g, or t
  misc_feature (2512)..(2512): n is a, c, g, or t
  misc_feature (2515)..(2516): n is a, c, g, or t
  misc_feature (2518)..(2518): n is a, c, g, or t
  misc_feature (2522)..(2522): n is a, c, g, or t
  misc_feature (2531)..(2531): n is a, c, g, or t
  misc_feature (2536)..(2536): n is a, c, g, or t
  misc_feature (2539)..(2539): n is a, c, g, or t
  misc_feature (2541)..(2541): n is a, c, g, or t
  misc_feature (2544)..(2544): n is a, c, g, or t
  misc_feature (2548)..(2549): n is a, c, g, or t
  misc_feature (2554)..(2555): n is a, c, g, or t
  misc_feature (2558)..(2559): n is a, c, g, or t
  misc_feature (2561)..(2561): n is a, c, g, or t
  misc_feature (2563)..(2566): n is a, c, g, or t
  misc_feature (2568)..(2568): n is a, c, g, or t
  misc_feature (2571)..(2572): n is a, c, g, or t
  misc_feature (2575)..(2575): n is a, c, g, or t
  misc_feature (2579)..(2580): n is a, c, g, or t
  misc_feature (2582)..(2583): n is a, c, g, or t
  misc_feature (2587)..(2590): n is a, c, g, or t
  misc_feature (2592)..(2594): n is a, c, g, or t
  misc_feature (2598)..(2598): n is a, c, g, or t
  misc_feature (2606)..(2607): n is a, c, g, or t
  misc_feature (2609)..(2609): n is a, c, g, or t
  misc_feature (2616)..(2617): n is a, c, g, or t
  misc_feature (2619)..(2620): n is a, c, g, or t
  misc_feature (2629)..(2630): n is a, c, g, or t
  misc_feature (2632)..(2633): n is a, c, g, or t
  misc_feature (2635)..(2635): n is a, c, g, or t
  misc_feature (2637)..(2637): n is a, c, g, or t
  misc_feature (2641)..(2641): n is a, c, g, or t
  misc_feature (2646)..(2647): n is a, c, g, or t
  misc_feature (2649)..(2650): n is a, c, g, or t
  misc_feature (2653)..(2653): n is a, c, g, or t
  misc_feature (2657)..(2657): n is a, c, g, or t
  misc_feature (2659)..(2661): n is a, c, g, or t
  misc_feature (2663)..(2664): n is a, c, g, or t
  misc_feature (2672)..(2672): n is a, c, g, or t
  misc_feature (2674)..(2676): n is a, c, g, or t
  misc_feature (2678)..(2678): n is a, c, g, or t
  misc_feature (2685)..(2687): n is a, c, g, or t
  misc_feature (2692)..(2694): n is a, c, g, or t
  misc_feature (2698)..(2701): n is a, c, g, or t
  misc_feature (2704)..(2704): n is a, c, g, or t
  misc_feature (2706)..(2707): n is a, c, g, or t
  misc_feature (2710)..(2711): n is a, c, g, or t
  misc_feature (2713)..(2714): n is a, c, g, or t
  misc_feature (2721)..(2722): n is a, c, g, or t
  misc_feature (2724)..(2724): n is a, c, g, or t
  misc_feature (2726)..(2727): n is a, c, g, or t
  misc_feature (2729)..(2731): n is a, c, g, or t
  misc_feature (2734)..(2738): n is a, c, g, or t
  misc_feature (2745)..(2747): n is a, c, g, or t
  misc_feature (2751)..(2756): n is a, c, g, or t
  misc_feature (2763)..(2763): n is a, c, g, or t
  misc_feature (2765)..(2766): n is a, c, g, or t
  misc_feature (2771)..(2773): n is a, c, g, or t
  misc_feature (2777)..(2778): n is a, c, g, or t
  misc_feature (2780)..(2780): n is a, c, g, or t
  misc_feature (2782)..(2785): n is a, c, g, or t
  misc_feature (2787)..(2787): n is a, c, g, or t
  misc_feature (2789)..(2789): n is a, c, g, or t
  misc_feature (2791)..(2796): n is a, c, g, or t
  misc_feature (2798)..(2798): n is a, c, g, or t
  misc_feature (2800)..(2800): n is a, c, g, or t
  misc_feature (2802)..(2802): n is a, c, g, or t
  misc_feature (2808)..(2808): n is a, c, g, or t
  misc_feature (2813)..(2813): n is a, c, g, or t
  misc_feature (2815)..(2815): n is a, c, g, or t
  misc_feature (2817)..(2821): n is a, c, g, or t
  misc_feature (2825)..(2828): n is a, c, g, or t
  misc_feature (2830)..(2830): n is a, c, g, or t
  misc_feature (2832)..(2833): n is a, c, g, or t
  misc_feature (2835)..(2843): n is a, c, g, or t
  misc_feature (2845)..(2845): n is a, c, g, or t
  misc_feature (2847)..(2850): n is a, c, g, or t
  misc_feature (2852)..(2852): n is a, c, g, or t
  misc_feature (2854)..(2854): n is a, c, g, or t
  misc_feature (2856)..(2857): n is a, c, g, or t
  misc_feature (2859)..(2862): n is a, c, g, or t
  misc_feature (2866)..(2866): n is a, c, g, or t
  misc_feature (2868)..(2870): n is a, c, g, or t
  misc_feature (2872)..(2875): n is a, c, g, or t
  misc_feature (2877)..(2879): n is a, c, g, or t
  misc_feature (2883)..(2883): n is a, c, g, or t
  misc_feature (2885)..(2885): n is a, c, g, or t
  misc_feature (2888)..(2892): n is a, c, g, or t
  misc_feature (2894)..(2896): n is a, c, g, or t
  misc_feature (2899)..(2901): n is a, c, g, or t
  misc_feature (2903)..(2903): n is a, c, g, or t
  misc_feature (2905)..(2908): n is a, c, g, or t
  misc_feature (2910)..(2914): n is a, c, g, or t
  misc_feature (2916)..(2918): n is a, c, g, or t
  misc_feature (2920)..(2931): n is a, c, g, or t
  misc_feature (2933)..(2933): n is a, c, g, or t
  misc_feature (2935)..(2937): n is a, c, g, or t
  misc_feature (2939)..(2939): n is a, c, g, or t
  misc_feature (2941)..(2946): n is a, c, g, or t
  misc_feature (2948)..(2952): n is a, c, g, or t
  misc_feature (2954)..(2957): n is a, c, g, or t
  misc_feature (2961)..(2963): n is a, c, g, or t
  misc_feature (2965)..(2966): n is a, c, g, or t
  misc_feature (2968)..(2978): n is a, c, g, or t
  misc_feature (2980)..(2980): n is a, c, g, or t
  misc_feature (2982)..(2982): n is a, c, g, or t
  misc_feature (2984)..(2990): n is a, c, g, or t
  misc_feature (2994)..(3001): n is a, c, g, or t
  misc_feature (3003)..(3005): n is a, c, g, or t
  misc_feature (3007)..(3011): n is a, c, g, or t
  misc_feature (3013)..(3018): n is a, c, g, or t
  misc_feature (3021)..(3022): n is a, c, g, or t
  misc_feature (3026)..(3031): n is a, c, g, or t
  misc_feature (3034)..(3034): n is a, c, g, or t
  misc_feature (3039)..(3040): n is a, c, g, or t
  misc_feature (3042)..(3043): n is a, c, g, or t
  misc_feature (3045)..(3046): n is a, c, g, or t
  misc_feature (3048)..(3050): n is a, c, g, or t
  misc_feature (3052)..(3057): n is a, c, g, or t
  misc_feature (3060)..(3060): n is a, c, g, or t
  misc_feature (3062)..(3067): n is a, c, g, or t
  misc_feature (3069)..(3069): n is a, c, g, or t
  misc_feature (3071)..(3071): n is a, c, g, or t
  misc_feature (3073)..(3074): n is a, c, g, or t
  misc_feature (3077)..(3077): n is a, c, g, or t
  misc_feature (3079)..(3081): n is a, c, g, or t
  misc_feature (3083)..(3083): n is a, c, g, or t
  misc_feature (3085)..(3087): n is a, c, g, or t
  misc_feature (3089)..(3090): n is a, c, g, or t
  misc_feature (3092)..(3092): n is a, c, g, or t
  misc_feature (3094)..(3094): n is a, c, g, or t
  misc_feature (3097)..(3102): n is a, c, g, or t
  misc_feature (3104)..(3104): n is a, c, g, or t
  misc_feature (3106)..(3110): n is a, c, g, or t
  misc_feature (3112)..(3113): n is a, c, g, or t
  misc_feature (3116)..(3118): n is a, c, g, or t
  misc_feature (3121)..(3135): n is a, c, g, or t
  misc_feature (3137)..(3137): n is a, c, g, or t
  misc_feature (3141)..(3142): n is a, c, g, or t
  misc_feature (3144)..(3145): n is a, c, g, or t
  misc_feature (3147)..(3149): n is a, c, g, or t
  misc_feature (3151)..(3151): n is a, c, g, or t
  misc_feature (3153)..(3154): n is a, c, g, or t
  misc_feature (3159)..(3159): n is a, c, g, or t
  misc_feature (3161)..(3161): n is a, c, g, or t
  misc_feature (3163)..(3163): n is a, c, g, or t
  misc_feature (3165)..(3165): n is a, c, g, or t
  misc_feature (3171)..(3172): n is a, c, g, or t
  misc_feature (3174)..(3175): n is a, c, g, or t
  misc_feature (3177)..(3177): n is a, c, g, or t
  misc_feature (3183)..(3183): n is a, c, g, or t
  misc_feature (3188)..(3188): n is a, c, g, or t
  misc_feature (3190)..(3190): n is a, c, g, or t
  misc_feature (3192)..(3194): n is a, c, g, or t
  misc_feature (3199)..(3200): n is a, c, g, or t
  misc_feature (3203)..(3204): n is a, c, g, or t
  misc_feature (3206)..(3208): n is a, c, g, or t
  misc_feature (3210)..(3211): n is a, c, g, or t
  misc_feature (3213)..(3213): n is a, c, g, or t
  misc_feature (3222)..(3222): n is a, c, g, or t
  misc_feature (3227)..(3227): n is a, c, g, or t
  misc_feature (3230)..(3230): n is a, c, g, or t
  misc_feature (3235)..(3236): n is a, c, g, or t
  misc_feature (3239)..(3240): n is a, c, g, or t
  misc_feature (3245)..(3245): n is a, c, g, or t
  misc_feature (3247)..(3247): n is a, c, g, or t
  misc_feature (3250)..(3251): n is a, c, g, or t
  misc_feature (3256)..(3256): n is a, c, g, or t
  misc_feature (3260)..(3260): n is a, c, g, or t
  misc_feature (3262)..(3262): n is a, c, g, or t
  misc_feature (3265)..(3266): n is a, c, g, or t
  misc_feature (3271)..(3271): n is a, c, g, or t
  misc_feature (3273)..(3273): n is a, c, g, or t
  misc_feature (3275)..(3276): n is a, c, g, or t
  misc_feature (3278)..(3280): n is a, c, g, or t
  misc_feature (3282)..(3284): n is a, c, g, or t
  misc_feature (3293)..(3293): n is a, c, g, or t
  misc_feature (3298)..(3298): n is a, c, g, or t
  misc_feature (3300)..(3300): n is a, c, g, or t
  misc_feature (3302)..(3302): n is a, c, g, or t
  misc_feature (3306)..(3306): n is a, c, g, or t
  misc_feature (3315)..(3318): n is a, c, g, or t
  misc_feature (3320)..(3320): n is a, c, g, or t
  misc_feature (3325)..(3325): n is a, c, g, or t
  misc_feature (3327)..(3327): n is a, c, g, or t
  misc_feature (3329)..(3329): n is a, c, g, or t
  misc_feature (3334)..(3335): n is a, c, g, or t
  misc_feature (3337)..(3337): n is a, c, g, or t
  misc_feature (3339)..(3340): n is a, c, g, or t
  misc_feature (3342)..(3343): n is a, c, g, or t
  misc_feature (3345)..(3348): n is a, c, g, or t
  misc_feature (3351)..(3351): n is a, c, g, or t
  misc_feature (3353)..(3354): n is a, c, g, or t
  misc_feature (3356)..(3357): n is a, c, g, or t
  misc_feature (3360)..(3362): n is a, c, g, or t
  misc_feature (3364)..(3368): n is a, c, g, or t
  misc_feature (3370)..(3371): n is a, c, g, or t
  misc_feature (3373)..(3376): n is a, c, g, or t
  misc_feature (3378)..(3378): n is a, c, g, or t
  misc_feature (3380)..(3380): n is a, c, g, or t
  misc_feature (3385)..(3387): n is a, c, g, or t
  misc_feature (3394)..(3394): n is a, c, g, or t
  misc_feature (3396)..(3396): n is a, c, g, or t
  misc_feature (3398)..(3398): n is a, c, g, or t
  misc_feature (3400)..(3402): n is a, c, g, or t
  misc_feature (3404)..(3406): n is a, c, g, or t
  misc_feature (3408)..(3409): n is a, c, g, or t
  misc_feature (3411)..(3411): n is a, c, g, or t
  misc_feature (3413)..(3415): n is a, c, g, or t
  misc_feature (3417)..(3420): n is a, c, g, or t
  misc_feature (3423)..(3423): n is a, c, g, or t
  misc_feature (3427)..(3427): n is a, c, g, or t
  misc_feature (3431)..(3431): n is a, c, g, or t
  misc_feature (3433)..(3439): n is a, c, g, or t
  misc_feature (3441)..(3441): n is a, c, g, or t
  misc_feature (3445)..(3446): n is a, c, g, or t
  misc_feature (3448)..(3449): n is a, c, g, or t
  misc_feature (3458)..(3459): n is a, c, g, or t
  misc_feature (3461)..(3463): n is a, c, g, or t
  misc_feature (3465)..(3467): n is a, c, g, or t
  misc_feature (3469)..(3471): n is a, c, g, or t
  misc_feature (3474)..(3474): n is a, c, g, or t
  misc_feature (3476)..(3478): n is a, c, g, or t
  misc_feature (3480)..(3481): n is a, c, g, or t
  misc_feature (3483)..(3483): n is a, c, g, or t
  misc_feature (3486)..(3486): n is a, c, g, or t
  misc_feature (3488)..(3490): n is a, c, g, or t
  misc_feature (3492)..(3494): n is a, c, g, or t
  misc_feature (3500)..(3500): n is a, c, g, or t
  misc_feature (3503)..(3504): n is a, c, g, or t
  misc_feature (3510)..(3511): n is a, c, g, or t
  misc_feature (3513)..(3513): n is a, c, g, or t
  misc_feature (3515)..(3515): n is a, c, g, or t
  misc_feature (3519)..(3519): n is a, c, g, or t
  misc_feature (3522)..(3528): n is a, c, g, or t
  misc_feature (3537)..(3537): n is a, c, g, or t
  misc_feature (3540)..(3542): n is a, c, g, or t
  misc_feature (3544)..(3544): n is a, c, g, or t
  misc_feature (3549)..(3549): n is a, c, g, or t
  misc_feature (3562)..(3562): n is a, c, g, or t
  misc_feature (3564)..(3565): n is a, c, g, or t
  misc_feature (3567)..(3568): n is a, c, g, or t
  misc_feature (3570)..(3572): n is a, c, g, or t
  misc_feature (3574)..(3576): n is a, c, g, or t
  misc_feature (3580)..(3580): n is a, c, g, or t
  misc_feature (3582)..(3585): n is a, c, g, or t
  misc_feature (3587)..(3590): n is a, c, g, or t
  misc_feature (3592)..(3592): n is a, c, g, or t
  misc_feature (3594)..(3595): n is a, c, g, or t
  misc_feature (3597)..(3597): n is a, c, g, or t
  misc_feature (3605)..(3605): n is a, c, g, or t
  misc_feature (3608)..(3610): n is a, c, g, or t
  misc_feature (3614)..(3617): n is a, c, g, or t
  misc_feature (3625)..(3626): n is a, c, g, or t
  misc_feature (3629)..(3631): n is a, c, g, or t
  misc_feature (3635)..(3637): n is a, c, g, or t
  misc_feature (3646)..(3647): n is a, c, g, or t
  misc_feature (3652)..(3654): n is a, c, g, or t
  misc_feature (3658)..(3659): n is a, c, g, or t
  misc_feature (3661)..(3662): n is a, c, g, or t
  misc_feature (3664)..(3666): n is a, c, g, or t
  misc_feature (3671)..(3671): n is a, c, g, or t
  misc_feature (3674)..(3674): n is a, c, g, or t
  misc_feature (3678)..(3682): n is a, c, g, or t
  misc_feature (3684)..(3686): n is a, c, g, or t
  misc_feature (3690)..(3691): n is a, c, g, or t
  misc_feature (3693)..(3696): n is a, c, g, or t
  misc_feature (3698)..(3700): n is a, c, g, or t
  misc_feature (3703)..(3704): n is a, c, g, or t
  misc_feature (3706)..(3706): n is a, c, g, or t
  misc_feature (3708)..(3708): n is a, c, g, or t
  misc_feature (3710)..(3711): n is a, c, g, or t
  misc_feature (3713)..(3713): n is a, c, g, or t
  misc_feature (3715)..(3715): n is a, c, g, or t
  misc_feature (3717)..(3718): n is a, c, g, or t
  misc_feature (3723)..(3723): n is a, c, g, or t
  misc_feature (3725)..(3726): n is a, c, g, or t
  misc_feature (3728)..(3728): n is a, c, g, or t
  misc_feature (3732)..(3736): n is a, c, g, or t
  misc_feature (3740)..(3741): n is a, c, g, or t
  misc_feature (3743)..(3743): n is a, c, g, or t
  misc_feature (3746)..(3746): n is a, c, g, or t
  misc_feature (3749)..(3755): n is a, c, g, or t
  misc_feature (3760)..(3761): n is a, c, g, or t
  misc_feature (3763)..(3764): n is a, c, g, or t
  misc_feature (3768)..(3769): n is a, c, g, or t
  misc_feature (3773)..(3773): n is a, c, g, or t
  misc_feature (3775)..(3776): n is a, c, g, or t
  misc_feature (3781)..(3781): n is a, c, g, or t
  misc_feature (3787)..(3788): n is a, c, g, or t
  misc_feature (3790)..(3795): n is a, c, g, or t
  misc_feature (3797)..(3797): n is a, c, g, or t
  misc_feature (3799)..(3800): n is a, c, g, or t
  misc_feature (3802)..(3805): n is a, c, g, or t
  misc_feature (3807)..(3807): n is a, c, g, or t
  misc_feature (3809)..(3809): n is a, c, g, or t
  misc_feature (3817)..(3818): n is a, c, g, or t
  misc_feature (3827)..(3827): n is a, c, g, or t
  misc_feature (3837)..(3837): n is a, c, g, or t
  misc_feature (3839)..(3840): n is a, c, g, or t
  misc_feature (3844)..(3844): n is a, c, g, or t
  misc_feature (3846)..(3847): n is a, c, g, or t
  misc_feature (3851)..(3851): n is a, c, g, or t
  misc_feature (3854)..(3854): n is a, c, g, or t
  misc_feature (3860)..(3860): n is a, c, g, or t
  misc_feature (3862)..(3863): n is a, c, g, or t
  misc_feature (3865)..(3868): n is a, c, g, or t
  misc_feature (3870)..(3871): n is a, c, g, or t
  misc_feature (3873)..(3873): n is a, c, g, or t
  misc_feature (3875)..(3875): n is a, c, g, or t
  misc_feature (3882)..(3883): n is a, c, g, or t
  misc_feature (3885)..(3889): n is a, c, g, or t
  misc_feature (3891)..(3891): n is a, c, g, or t
  misc_feature (3896)..(3898): n is a, c, g, or t
  misc_feature (3900)..(3900): n is a, c, g, or t
  misc_feature (3902)..(3902): n is a, c, g, or t
  misc_feature (3904)..(3904): n is a, c, g, or t
  misc_feature (3906)..(3907): n is a, c, g, or t
  misc_feature (3909)..(3909): n is a, c, g, or t
  misc_feature (3914)..(3915): n is a, c, g, or t
  misc_feature (3918)..(3919): n is a, c, g, or t
  misc_feature (3921)..(3921): n is a, c, g, or t
  misc_feature (3923)..(3924): n is a, c, g, or t
  misc_feature (3926)..(3927): n is a, c, g, or t
  misc_feature (3932)..(3932): n is a, c, g, or t
  misc_feature (3934)..(3937): n is a, c, g, or t
  misc_feature (3940)..(3944): n is a, c, g, or t
  misc_feature (3946)..(3946): n is a, c, g, or t
  misc_feature (3948)..(3948): n is a, c, g, or t
  misc_feature (3950)..(3951): n is a, c, g, or t
  misc_feature (3955)..(3955): n is a, c, g, or t
  misc_feature (3962)..(3964): n is a, c, g, or t
  misc_feature (3966)..(3968): n is a, c, g, or t
  misc_feature (3976)..(3976): n is a, c, g, or t
  misc_feature (3978)..(3978): n is a, c, g, or t
  misc_feature (3980)..(3981): n is a, c, g, or t
  misc_feature (3983)..(3984): n is a, c, g, or t
  misc_feature (3991)..(3993): n is a, c, g, or t
agaatttttaaaatttgattttttcaattgctttttaatttgttcgagatcttctttttttgaattataatcaattataactatatcaaattctattttaggaaaagttattttagcttgatttaaagatgcaattatggaatttaaagatctaaaagtatattcagatttattttgatcaaataatctttttttattttgagtcaacatattaatatttgtacaagatctaaaaattattgttaaagcgttaactttacgtgaaatttttatttcacctaatggcagagtaattgatttttttcctggaatattaagattttcactaagattcttttcttgagtagggacgtaaaaattactttggtctattatttcgtagccaaaaattctgcaaatttttataaatattttcttaaaaaaacttgtttttacttgggttttttgttctttcataggttcttattcaagtgatttaatcatgaagacttattctttttgcataaaagactcttattatccagtacagaacaaagcctaatggtcctgtaaaatataccaagattagcggagcgaatattagactacgcctcatattgtatttaattccatctctagatatccacgatcctaaaaaaagatttaaagctacaaaatgtaaccaaaaaataagtaaaaaactttcagtggcaaataccgcatataggctatctaagcctaaatataatctaaaaacatcaaatattggttcgtccaacaaaatagtttgataaattacgtaaacataggctgtagacaaaataagaggcaagattattgaattgacaaaaaattgagtaactttagaatttggaataataatcaacataatccaaaatggtaaaataccaaagcttgtccacacatatatattttcaaatgttaaatacgcttgaaattggattagcatataatttttaataagcaatatagtatataaaaaacatgaatcctataaaaaataagaaagatctggaaacaacaattgatgatataagaaattttgcctatttgtatttagaaaaatacagttcatcaaaacaacaattaaggacatatttattcaaaaaacttattaaaaaaaaacaaaaaatatctagcaaaaaggaaattttcaatttaatagatactgtaattttctcactagtcgatcaaaaatttttaagtgatgagtattattcagatgcgaaatccaaagcattcttgagaagaggttattcgttaaataaaattagatataatttaattaaaaggggaattgatgaaaagtatattaaggctagcatttctaagattaaagaaaatgagtcggatcctgattttttttctgcaataaaaatatgtaaaagaaggagaataggaccctgtagagaagaaagtaatagaccattattttataaaaaagatatttcaattctggcaagatctggttttagctacgaaatatcgaaaaaagttttagaaatacccataaaagaatttaaaaaattctgtacgatgctctnaattgtaactattttttattatttttagataaataataatctaatcttttttttagtgatttttttacatagaggaaaaataatacaccaaatatagtaaccaatatcactatggtaagtgttgtttttaacattcttaatatgaaatagtctaactcttatgttatgaactgcctagtagacttttattctggttaatatattggaaccattcttttcggctcatccttttgcaataatagtcacgcttcttgcaacctgtattgatttttattttgggtaacaatgattttgcaagagcaggattatcattgagctttcttttgcaataaaaatcatactttctacatctttcactaagtttatttttaggctcgtaagtttgttccaatattttgccaggttcatttttgggcgcataagattgttttatgatgtctccnntaagcgatnctattgngtgttctgctattgtttttccagtactttttttcaccacgtaattagctccagtagtaacacctgtctgtattaatgacgctgtactgaaacctgatgatataggtcctattaaggctaggggtgccataaaacacccagagacnnncacaccaagcactgctattacaaacaatcttttaatcatcgactcccttttntttataagcttatagtttttataaataaaaaaaaagatgnaaattaactaattnntanacaactnaaantngtantnatttttntaaanncaaannncttttnncnnttattgntngatttttntanttttcntttcnnnanagnanttttttttnntcatntgtngtnntntntcntccnncannttntaaaatnnnnnntcnnncagcnntatcccntncccannnnctnnnttttnnngcanaaanatngnctncnccnnctgcnaaaananaaaantttaaanagnnnnanattttannnatttntgnnantttntattttttntaaanatntntantttnntttgnngtnntncnnnngngtnntancccnntnntttnnnngnnntttntttttttnnantttaaanntnntttttttcnntnntnantttnaaaannannacntttncnnnannaaaaaaanannntnttttttnnnggggnnnaaannnnacnannagnngnntttaaannantnntnnnagnnnnntttaaannntatnnnnnncttttcntnntatannntctnntncnnnntntngnnnnnntnancnaaaaanttttntntnnnnntttnnnntntnnannnnnnnnntntnnnnananannannnntatntnnngnnnnannntttntnttnnnnntnnnaannntntnnnnannnnnannncnnnnnnnnnnnngngnnntntnnnnnntnnnnntnnnntttnnncnncnnnnnnnnnnntntntnnnnnnntttnnnnnnnntnnnannnnntnnnnnnganntttnnnnnnatnttttnnanntnnannntnnnnnnttntnnnnnntntntnnaanannntntnnncnntntntannnnnntntnnnnnannttnnnaannnnnnnnnnnnnnntntttnntnncnnntngnntttgncngntnccccanntnntntttttngggtnantnnnaaaanntcnngnnncnnantttaaaaanatttntgnaaaannatnnttttntntannaaaanaaananatnnttttntnannannntnnnaaaaaaaanaaatncntngggntttttaaannnncnaaaanananaaaanngntnntnncnnnntcngnngnngtnnntnnnnntnnannnncngntttannnaaaaaanangntnnnannntnntngnnntnnnnctnaaantttntnnnnnnncnaaanntnnaaaaaaaannannnannntnnngcngnnnannanatntnnnannnaaaaanagnntcccgnnantnaaanatnnnnnnnaaaattttntannntnaaaanagatttaaaaaananntnntnnntnnntttntnnnnannnncntnntnggggaaanacnnntacnnnntgtgaaanntannnaaannntaaaatttnnagacnnntatnntnntnnncgggngtnaaannnnnannntttnntnnnngnnnatnntntnannanantnnaaaananngnaaannnnnaganntntanagnnnnnnntttannannagannaaantnnttttntttttnnannnnnncngnngnnnntnanttttttannatttccctngggggttttnannaaanannaaanacncaaaananntnnnnanntnantttaaanntnnnnnanaaacnnnanancnannanatatnnttnntncnnanngggantnnnnctnnnnnantnannaaanataaacnnnannnttttaaanangnngnnattttgnnnacaaaag

SEQ ID NO: 182 - DNA, 4000 bp, Escherichia coli
  misc_feature (3986)..(3986): n is a, c, g, or t
cggccagtgaggttacccgggtcatgcaaatctgtaacgcctgtcgttattgcgaggggttttgtgccgtgtttccggcgatgacccgtcgtcgttcatttgacgagggtgatgtcggctatcttgccaatctttgccataattgtggcgcctgttatcatgcgtgccaatatgcaccgccgcatgaatttggcgtgaatgtgccgcaggcgctggcggcggcgcggaacgacagctatgccgcctatgcttggcccgcgccaatggccggattgttcaggcgtaacgggctgtttgttacatcggtaatttcgcttggtttggcaatcaccgttggggtgatgctggcgatgattgcgccgcagctattttggggtgtgcatgtcggtgagggcgcattttacaagatcatgccgcatacagtcatggcaggtattccgctggcgatttcagcttttgtgctgatgtcgtttattatgggctggcggcgttactggcgccatacaggcgcgaaatggggcggctttgtcgatctgtttgacgccatcaaggctgcggcgagtttgcgccatcttggcggcgactcgtccagcggcgtgttatcggggccgggctgcccgaccggtgatgaccggtcaagcaatgcgcggcgcatctatcatcaattgacgatgtacggttttttgctgtgttttgccgcaacctcggttggcacaatctatcattacgtgcttggccgtgaggccccctacggctatctggaattgccggtggtacttggcacagttggcggcattatcttgtgtatcggaacggctggcctttttgtcgaaaagcggcgaatgcatccttcggttcgccatgatgaagggcttggcatggattacgcttttatcgtgtcgctgtttttcgtcagctttaccggattgctgctgcttgcagtccgcgagaccagctatatgggcgtgactttggcggtgcatctaggcgttgtttacgggtttttcctgatcctgccattttcaaaatttgtgcatgggctgtatcggtttgcggcgctgatcgccagtgcaggtgaggcgcgtcgcggttaggccaattgcattgccacgaatatcgcgatcgcaaatgccgaattgaccttggggttaatagccaaatgtctgcgagatgattttggccgactcggccagcaaaccgcgccgtgccatcgcttcgtcaaaatcaaagcgctgttttggcccatgaatcgcaagcgcagcgacataacgccggcgcgagtccagcactggcacggcaatcgcaaccatgccatcatggaattcctccaaatcaagcgcaaagccatctttgctgatccgttgcagctcgtcctccagcgtttcggtgctggtatgggtgtgttctgtataggcgcgcaggtccaagctatctagcaaaacgcgccgtttttttggcggcagactggcaagataggttttaccgcttgctgtgcagtgaaacggcacatgcgttccaactggcagcagaacccgaaaaggccaattcgtctcgacgcgatcagcatagatcatccccttgatttctggcctgacgaaattcaccgtttcaccagcctcgcgcgcaatattctgcaaaatctggtggcgcgtggtctgaccggtggcgtgctgggccaaccccgcagcaagagacaaaaggcgtttggtcgggtgaaggcggcgcgcctgtttgaccagatacccttcggcaatcaaggtctggcaaagtcggtgtagactttgtttgggccagtcgagctgttcattgatctcgctcggtgtcagagggcgtccggcatctgcaatcacttcaaatatcttcaaaatccgcaaatttggtggagttgagtcggtcattatggtgccttttttcacgcgcaattcccgcacgaaacaaaaagtgacggcaaaaattccttgaacaagccgtggattcgtgcatgactttattcttaattcaataatagagactaaaagtctcaaaaagtaaataattttttgggggaatggttggagtttgattacgtcatcattggggccgggtcggctggttgtgtgattgccaaccgtctgtccgctgatccgtctgtttccgtggcgcttgtcgaggcgggcggcaaggatagctatccgtggattcacattccggttggttacttcaaaaccatgggtaatccaaaaactgactggtgctatcgtacccagcctgaccccgggttgaacgggcgggcgatcaattggccgcgcggcaaggtgcttggcggtagcagctcgatcaacggacttttatatgttcgtgggcaaccgcaggattatgatcattggcgccagcttggcaatgcgggttggagttggaatgatgtgctgccgttgttccggcgagccgaaaattgggaaggcacgccgtcgcctgaacgcggtgttgatggcccgttaaatgtatctgaaaataaggtcgatcgggacattatcgacgcgtgggttgaggcggcggcaaatgccggttaccggcgcacggacgactataaccgtgaagatcaagagggcgttggcttttttcagatgacgatgaaaaatggtcagcgttgcagtacggccgcggcctatctgaagccggttctagcgcgcaagaatttgcatatcttcacccatacgcatactgaccggatcgagtttgaggacaagcgcgccaaggcggcgttggttcggatcaaaggaaagagccagcggatcagcgcgcgccgtgagatcattttgtcggcaggtgcgatcggatcgccgcaaattctgatgctgtccggcattggcgatcagcatgatcttggcaagcatggtatcgccgcaacgcatcatttaccgggggttgggcgtaatctgcaagaccatctgcaagcccgcccagtttttaaatgcaacgccagcacgatcaatacggaaaccaaaaacccgttacagcttataaaaattgcacttgaatatgcggtgaaccgatctggcccaatggcaatggcggccagccttggcacagcgtttttaaaaacccatccggcgttagaaacccctgatatccagtttcacctacagccgttcagcgccgataatatcgccgatggcagccataatttttcggcctttaccgcctcggttttgcaattgcggccagaaagcacagggcacatcgaactcatgtcatcaaagcccgaggattatccggcgatccatccgaattatctggcaaccaaaaccgattgcgacacgattgttgccggcatcaagattgcccgcgcggtttgccgcaccgatccggccaaatcgctgatcaccgaagaatatgcgccggggccagcggtcgcagataacgatgatgcggcgatccttgaatgggcgcgcaacacgtcgacaacgatctatcatccaactggaacctgtaaaatgggccaggataaaatggcggttgttgatgaaaagctgcgggtttatggcgttcgcggattgcgcgttgcagatgcgtcgatcatgccaaccatcacctcgggtaatacaaatgcgccgaccattatgattggtgaaaaactctcagatttgatcttggagggggcgagatgaatatcagcgggcttgattttacccaatatggtatcgccgaagtaaccgatattgcgcagatcattttcgccgacatcatcttgtcgggcgataatgcgctggtgatcggtatggcggcggcggggttggccgccggacaacgcaaacgtgcgattgcgattggcatggcagtggcggcgatattgcgcattgtgtttgctgttgttgccgcacaattgctggcaatcaagggcattctcttgatcggtggcgggttgcttgcgtgggtctgttaccggttttatcacgacttgaaagaattcaacagcaccgccgcaaacggggcggacggggccgcgncgggggaggctgga

SEQ ID NO: 183 - DNA, 4000 bp, Escherichia coli
  misc_feature (490)..(490): n is a, c, g, or t
  misc_feature (514)..(514): n is a, c, g, or t
  misc_feature (613)..(613): n is a, c, g, or t
  misc_feature (907)..(907): n is a, c, g, or t
  misc_feature (1137)..(1137): n is a, c, g, or t
  misc_feature (1204)..(1204): n is a, c, g, or t
  misc_feature (1336)..(1336): n is a, c, g, or t
  misc_feature (1975)..(1975): n is a, c, g, or t
  misc_feature (1985)..(1986): n is a, c, g, or t
  misc_feature (1991)..(1992): n is a, c, g, or t
  misc_feature (1994)..(1994): n is a, c, g, or t
  misc_feature (2001)..(2001): n is a, c, g, or t
  misc_feature (2003)..(2004): n is a, c, g, or t
  misc_feature (2006)..(2007): n is a, c, g, or t
  misc_feature (2009)..(2010): n is a, c, g, or t
  misc_feature (2030)..(2031): n is a, c, g, or t
  misc_feature (2036)..(2037): n is a, c, g, or t
  misc_feature (2045)..(2046): n is a, c, g, or t
  misc_feature (2048)..(2049): n is a, c, g, or t
  misc_feature (2057)..(2058): n is a, c, g, or t
  misc_feature (2149)..(2149): n is a, c, g, or t
  misc_feature (2238)..(2238): n is a, c, g, or t
  misc_feature (2242)..(2242): n is a, c, g, or t
  misc_feature (2260)..(2260): n is a, c, g, or t
  misc_feature (2269)..(2269): n is a, c, g, or t
  misc_feature (2291)..(2291): n is a, c, g, or t
  misc_feature (2329)..(2329): n is a, c, g, or t
  misc_feature (2365)..(2365): n is a, c, g, or t
  misc_feature (2371)..(2371): n is a, c, g, or t
  misc_feature (2389)..(2389): n is a, c, g, or t
  misc_feature (2395)..(2395): n is a, c, g, or t
  misc_feature (2422)..(2422): n is a, c, g, or t
  misc_feature (2498)..(2498): n is a, c, g, or t
  misc_feature (2594)..(2594): n is a, c, g, or t
  misc_feature (3775)..(3775): n is a, c, g, or t
  misc_feature (3922)..(3922): n is a, c, g, or t
ttgtactgtgttttttatttttacaacttgaaattttccttgaatatagcaagccttccaaaaataatgtagttctgaaaatgctttgcgcctgattccgtatgactgataatgaattaagaaacctaaataagagtttatagacctcacattggcatatatagcttccttgtcacagtttttacatgcttcttctaaataacttacagcattaataaagtttccaacagttcgattcgataagtaagctctacccggcttaattactcctcctaccatttttattccttttttaacttcttgaatatagattttattagggtgcatttgaatatttaaaatatatcgtagttgattcctagaagctcttttgaaataaattgcatcttccttagttttgcacacaaagctaaaatcatctacaaaacgtacatatttggctcctctttcttctgctgctttaatagcccattcatcaaaaaatgacatntaaaaattggcaaataattgactngttaggtttcctattggttcgcctttcatccattcattgtaaaacaggcttttgtttttaggcagtattctccataattttaaatttccttgacgtatncaatcatcttgtggtcgatgtcgtacaattatttctgtaagccatagcactaaatctaaatcttgttcatatatggtccctttccaataattccatttttctttgataaatggtaataagtgttctaataatcgttcgcaatcaattgacataaaaaatcctttaatatcaaattgagcataccaagcctcgtgcgaataattatcagagacttcaattgtattttttgtcaactgatcaatacatgcaaatgttccaaaaccctttcgacagttaaatgatacatttccgtgntcaacaaaacgtgcctcaaacagtggctctaagcgtaggcacaaccaatgttgtacaatacggtcacggaaatttgcagcaaacacttcccgtaatttaggacgggtaactataaaacaagtacttgttgttggtctatatgttcgttcataaacttctctcgctaaatctaatagatcttcatgccaaataagtctatacataacacattgtgaacttgtctttttttnggcacagcaatcatctaacgcatcaaaccatccctcaacatatttatcgttaagtgctgcaaccgcnctcaccatgttactgttgtacttgttgttgttgttgaagttgccattactaaagttcacgttccagctgttgttctgactgttctcactgctactccagtaccggcttgcggttattgcgtgtactatcttnttcttaactaggtctttaacgcttggtaaaggcccagtgacacgcccatttttcaataaagatgtccctgttatcatagtcgtaaccgttcaacaggtctgctgctccaacactttgcttctccagcttttaatatgctttgaaatttcctttaaagattcagcaaaatgtggcatttgcttgttgctaattatgcgtgtatgaggactccgatttgaccactcttttaaggtgtcaatgcaagttttcactgtacgcatttgcaaataaaatgaattaataagttcaagtttggaatcaggatcttcttcatttaaagccaatcctatcactgttaatccatcaagcagagtgtctatgagacgtttgcttaattgacgaattcctacactattaggggttcgttctaccatttctatacagagtaacattaaattttctgtttctctgtaaataggtgcacttcctgcattacgaattgttcttgccataattaaaagattttattcacaatgtgtcttattacatatagtttatttacgaatactttattttttctgtagaggtttacaattatggcatatttatttttgtggagcgtcaaaagacgctccactatactaaaatgctgcaaccgcnctcaccatgnnactgnngnacttgcngnngnngnngaagttgccattactaaagnncacgnnccagctgnngnnctgactgnnctcactgctactccagtaccaagaattagaaaaatcgttcaaaataccggcatctattgctttttgaaaaattgcacctattttatcatcntcataattcactccttgcctagcgtgccaatacatacgcataagttcaccaacagatggtaggtaccaattatgatatttaaatttatntgcnaattcttcgcctgctttnactgtaggntgataagcatagcatttgctgncagcaggataataaaattgttgatatttactaagattntcattgttagcaattatgttatttatatactgggtnaacatngcttgttcagtatataantcagtngcttcaggtatcggcaaattaactccngaatcttctaagattttatttctatgttgaataatttttaaagtttttgctaaaccgacaggaacttcgtcacctnttttataggcacctgataaaatagctaaatccgcagccaattcctcttttcctgtattaattgtacctggagcagcgataccatctccaacagcanctgttttaacatctgaatttacaaatccgtcaattgtattttcatctacataattatcataccttatgtagttaggagaggtattaccttggtcgtcatattctgtaggttgtaagccagtctgtgtaatgttagcaattgaacctatatcatatacactataattaacatcatcttgtaattcaataggataaattgcatattgttcattccactcttccgtttgtcctgtattttgaggataaagcccccatactatacctgaattttcaagatttgataatgctaccatacgtctatcattggcatctgctggatttatgtaaaaacaaattccaactacggtttttccagcagttgtaggaccataagttccatcataaaatacataatctccgagatgagcacgtctggggtataaaccaatatcccatgatgcttcaagcacttcaccatttgtttttgttagataacatcttaaagttgtatgtggagccaatgtatcttcatctcctaattgagatacattgataacgcaataatcttttgacgtattgactatttttgcatacaaattggtatccaatgaccaacgaatgctaaccacatcattcccattagcggtattcggcttacagtaaaaagtgtgttcacctgtagaataaatgtattggcttcctttgatttctatagctgcaataggagttgagtagtaagtaatatgaagattgttgttctcatcatctacatttccccaatgatacaaccaatcaattttattgttaaaattaggtcggttggtagtattgtttattactgctatttttccagatacactactgtctgtaatagaagccaaatagttaatcatataaagagaaacctcggtccagtttatacttgctaactttaaataattcagcggtgcattgcctgtaaagcataaattaaatatggtacgcgaatctgcaatccctgcgccaattgataaactttgcattcggtcagctccttccaatgtgatggttttcaaattaggctgttgatctaaagacaaagatgttaaagtcccaggaagatgaacctcttctaaatattcggtagctggaagaacaacagaagacaacattgttcctactaaattcaacattctaagtttaagcaaaatagataaatctaanccacctactaaactagcgacacgttttaatactagttcttgcaacaaaggggcagtaatagtcataccggtaggacggaattcaacaacatcttttccatccacatgaaaggctgttaggcgagcaccgcttaaattaaatgtttcncctaaacttttgtctgtaaagtcaccaatggaacgcatataatcaataccatttaagaaaatattagtattgccatct

SEQ ID NO: 184 - DNA, 4000 bp, Escherichia coli
  misc_feature (37)..(37): n is a, c, g, or t
  misc_feature (522)..(522): n is a, c, g, or t
  misc_feature (528)..(528): n is a, c, g, or t
  misc_feature (791)..(791): n is a, c, g, or t
  misc_feature (1987)..(1987): n is a, c, g, or t
  misc_feature (1998)..(1998): n is a, c, g, or t
agggcttttaattttaacgcctctgtggattatgcanatttgcatcagatgaatttggtcaaggattctatagctctttttaaaggggatctggacattgacttgaaagggacggatatagacaatgtattgggtgtattggcctttaaaaatacccaatacaaaaatgctaaaaacacttatttttttgaagattttaatgttgctgcagacagcctagtagacggattcaggaccatttctatcaattcaaaagacattatatctggagctattcgtgggcgttataagttgctggaatttggaaagctcctccaaaatgccatgggaagtatttacaccaattacaaaccatttgaggtaaccaagggccaagaaatgacctttgaatttgatatttataatacactagtggagattttcctacccgaggtgcagtttggacccaatacttttattcgtggggcccttcaggccgatgccggtgtttttaaacttgattttaaatcccctcaattctcnttgtanaacaaccttttggatagtgtagttttaaaagtagacactaagaaccctttatttaatacctttttggcccttaaaagtgccaagaccccctattacgacattgaagaccttagactcattaacaacaccctacaagacaccctgtttttcagagcagaattcaagggagggaaggaccgttcagatctttttgggttaaacttttaccacacctttaacgacggtaagcaatctgtaataggattgaaaaagtctaccttggncttcaaaggcgctgattggtttattaatgaggcaggcaacaaggacaataaagtaatctttaataaaaatttagatagtgtttttgtctcttccttggtcatgagttctcctgagcgtgaaaatgttgttttaaatggtcaattggcagacagcacctataaggacataaggttgtctttctctaaagtagcccttagaaaaatttttccaagggtagacagccttgatttggatggaaaggtaaatggagaactcaacatactccaaaaagacaatgtatattttcctaattctaatttagatatagcagactttgaaattaataaaacggtcctaggtaatttagatcttgacttattgggcaatggggatctttcagattttattatcaatgctaaattattaagggataaagaagaaaaattacgcctgttggggaatattttcaaatcagatagcagtgattatcaaattaaattattagccagttttaacgcttttcctttagagccttttagtcccttggggaaaggtgttataggtaatataaggggagggctctggggaaatgcagaaattacaggacctatagttaatcctgattttacaggaacactcaccttgaaccaagccggaataagcgttccttatcttggtgttaattataatttttctcccaatgctaaaataggtctctataatcaagtatttgattttaaagatattacgctaattgatgatacgcataacacccaggctaaattatcaggcaccatagaccaccgatcttttgacgattggaaattagacctcactatagacgcctcttctgaacgcttcttaattttgaatacaccttacgacccagaagccctgtattatggcagtgggtttctaaatggcaatggacgcatttatggccccactaaagcattgaatattgatgtttctggcgctacagcactaggaacatcacttaagatacccttacaagatattgtgaatgttggggactatacttttatagattttgtagaaaagaggacattagatactgaagttactgtaaaagaactaacagactacaggggtttagagcttaattttgatttggcagtaaccccagaagcagaggtagagatagtggtggatcaaaaatctggatcttccttaaaagggaccggtggaggtatcntactcatgganattaacaccaatggaaagtttaaaatgtttggagattttgtagtagctacagggtcttataattataaatttgggggttttatagacaaaacatttaaagtaaatccgggagggagtattatttgggacggagacccaatgggggcccagctcaatatggaagcttcttatggtttgtttgccaatccagcaccacttttagagagtagtggctataccaatagaattccaacagaggtattggtccgtttaaatggtgccttagaaaaccctaatatagattttgacattgctttcccaggaaccaattcagtagtaaaatcagaattacaatacgccctgcaagatcccaccgttcaggatagaaacgcttttttccttctcgctcaaggaacttttgtcaacgacgccacaggaattaaccaacaggcagttactggcaacctgctgcagtctgcctcaggattgttgagtagtatattagaaggaagcaatgacaaactcaactttggattgtcttatgagcaaggaatgctggacagggtctcaaatttgcagacggattcaagaataggggtgagtgtgagtacccagattagtgatcgggtattatttaatggaagattgggcgtgcctgtgggtggtgttacagaaaatgtagtggctggagacgcagaaatacaaatcatcctaaacgatcaagggagcttatctgctaaaattttcaatagagagaatgaaattcagcaatttttagctgacaggcaggggtatacccagggcgtaggactctcttatcaggtagattttaattcttttcaagagttgttgagaaagattttgaataaaaaagaaggggaataaagtaggtatatcacaatattctaagctttttattaacgaaaacgtttgaattttcagttcaaattaaatattctctaaaatagccgtttacatccgtttaagtttgttaattttacgcttttaagagattatgagtacagaaattaaaaaaattggggtatttacatccggtggagattcaccaggaatgaatgctgctattcgttctgtagtgagaacttgtgcctacatgaagattgaatgtatagggatttacaggggttacgaagggatgatagagggtgattttaaacccatggacgctagaagtgtcaataatataatcaataaaggaggtactattttaaagtctgcgaggtctttggagtttagaacccctgagggaagggctaaagcctatgcaaatcttaaaaaagaaggtatagatgcttttgtggttattggaggagacggaagttttaccggagccatgatctttaaccaagaatacaattttccagtcattgggattcctgggactatagacaatgatatttacggcacaacttatacggtaggttttgacactgctttaaatacagttgtagaggtcatagataagataagggacaccgccagttctcataacagacttttctttgtagaagttatgggaagagatgtgggacatatagccttaaacgcaggcgtaggtgcaggagcagaagaaatcttaatccctgaagagaaccttggattagatcgtttgttagagtctttaaaaagatccaaacagtctggaaaatcatccagtattgttgtagttgctgagggtgataaaaccggtaaaaatgtttttgaactcaaagaatacgtagaggagcacattcctatttacgacgtacgtgtttcagtattgggccacatgcagcgtggtggttcgccttcttgctttgatcgtgtacttgccagtagaatgggcgttaaagctgtggaagccctactagaaggcaagagcagtctaatggtgggaatccaagacaataaattaacattaactcctttaattaaagcgattaaagggcacacaaaaatagataaggaactcattagagtgtccgatatcatgtcaacataattattaaaaagaagaaaaatg

SEQ ID NO: 185 - DNA, 4000 bp, Escherichia coli
  misc_feature (1023)..(1023): n is a, c, g, or t
  misc_feature (1485)..(1485): n is a, c, g, or t
  misc_feature (1988)..(1988): n is a, c, g, or t
  misc_feature (1991)..(1991): n is a, c, g, or t
  misc_feature (2224)..(2224): n is a, c, g, or t
  misc_feature (2280)..(2280): n is a, c, g, or t
  misc_feature (2330)..(2330): n is a, c, g, or t
  misc_feature (2592)..(2592): n is a, c, g, or t
  misc_feature (3231)..(3231): n is a, c, g, or t
agccgtgggatcgagagttgggggtttacgagaaagcgggagggtctttagaaaagttgggggagagaattaaagagcttgggttgtttgtgccgagtgtgatcgggctctggggagtgttagcgaacagtgaggaggattttgaaaagaggattggtgagcatcgtaatcggttgcgaatggtgaaggcgatcggggcggcgcatgtccagtgtatcccggactttaagtataaggatgacttcaacctggagtcaggagcggcttgctacgcaaggattagcgaaatcgcacagaaggactatggattgaagaccgggattatctttctcaatgcggtaggtaatctgaaaacggtggcagatgcagtgaagttgggcatgaagtcgggttggaaggatgtgaaaatcatcccggatagctatcataactatcatggtgggactccattaaattcactgcgtatgttgcgtgggagtgcgatcgcaatttatcagttttcggatgcgccaaagggccagaaaaaaaaggattcgtggtgcgacggggagcgagttctaccgggagatgggcagttaccgttggtagaggaactgcaaatcttattagagattgggtatgaggggtgtgtgtcgttggaattgtataatgaggagtatcgaaaaagagagccgaaggagtttctgaaggaggcgcatgcgaagactttaaaggtgatcaaggaagcagtgggctaggcgaaatcgctattaccgtaatcacgaaagttggatgagatgtgcagcccgaaaactgatcttaccggacgggttagaattactagcaattggggactggtctgacgcaacctcctcaacgagagctggtggttcccggtaatggtcgtgggatgaatcaggataaggggtgttttgcattcgaaccccattcgctccgacaagaccatttagcttcaatgagccaagcgataactcgcatcgtactcagtaagttggaatgggagcattcactgaaaaaacactngtacaagcgccgcagtgcatctgctaatttaggtcacagctgaccgtctttggtcagctgtgacctaaatcctgattcgccctctgatttagaaaagagtcagcgaatcagcgattcgtaagtttgattctagtcgtgcttcacgactatacggattcgaccttctctgcgcatgggcctttttggccctggccgatttcaaatttcaccttctgaccttcatcaaggtttgcatatccagaactctcgattgcggagtgatgaacgaaaagatctgccccgccatcgtctggtgtgatgaagccgaaacctttttctggattgaaccatttaactgtacctgtactcatttttgtatttggtttatcggagtgattgctaatctccatgagaagatgctcctgctccggatggacaattcttggagttttgcctgaaagagtcaatggatatcacaaaacngctaggaatttgcttttggcggaagggccttgaagccgcctttgggtctgagcggaggggagaatgttctgaaatcctttgatttctcccatagtaccgtctaatccaatcttttctcaaaccggcatctggcggtgcattgcttcacttagcctggcatctggatgattgtccatggaagcccaaggctcaaggtatgctcggagggagaggcatcttgaagtcgaaaaggtggctcgggataaaggcagaaccgagctctgattcacaatccatgaagtttaaaaaaagaaaggctgaacctcttatcgaccaatcgtgatttcctctgaaaaagattattgaattcggaaaggaaagcactgaatcgggatgaggaattcagaggagggtagacttgaatagctattattacgaaacttgcatgatcgcctagacatcagttggaatcaaaagtaatcggtaaattaatttgaaaaatcaataacctataataatgattnaangtgattattgcatcttggatttgttttgttttgagcctcctctccataattggttcagttgcgatttggaacattaagaagggcgagggctcagaacagagggcccatgccgagaggtttggtattttcgtaggtttatgggcgcctacttttttgggcatcgcaatcttcctcattttgctctctcaaagcagctgagttgtccgatgtttttttcaaaatgcagggtgtcnaagaagccctaaattttaggggagattattgggttcgttcatgatttgagtgtttncactctcaaggagaggactgtgcgactcaactagatcagctttatttggngcggttacgagtagctcgtgtgctctgtttaaatctttccccccgaaagagtctcgagactctcacggcgggtaatgcatcggcatttcatcgtcagggtcaacaggatattaacaccaaagagtaagactctatcggggtgatgtttcagatttcatgttaaaaactatagctgaggccaagtgaccacagagggcctacggcaagggcagtttcattaacacgtcgatacgcgggggttaagattgaagcggaggccctnaaattatcattgatagtgtagatgagtgagggtgtgagacttaggacagtggaacctgtgtagccaatctcatttccttggaacttatctttttcaccgtgggaaagatctaaagaaagcctcaagttgaggttttcagtaattgatcggcttatccctacacggaatgcgtaggcctcagcagggtgaaaacctttggagctttcatagaggggaaaagtgatattagctccagaaaagaaagaccaatcgtcattgagagtagcaaaataaattgcacctaaggcaagttgggttgtgcctgtgccgagttgaaatacagtcggcgctacttctcctagagcggggttatcccgtggtttcccggtcggtaaggtgaatccagcgcttaaccttagccggctccaaatcgaattttcaacagccctcggtaaataggttgcggacatcgtgatgtcccccaggccattcatgttaatatcgggcttatctcgctcacgacgagtggcatccgtgaaagggatctgagtagaaaagagccaagttgaactcatacgataggaagcagtgagtaaaaattgattgaactccgtggaggcgtgagtcgggttttcaacgtgagagtatcggttgaaaagntcatcgttcttccgataacgataatcgaaggcgaagctaaaggcagagccatcggcaactgattcaccgccaactggcggcgcggtaagttttcatccgtctcatccgaaagcagagagagggagaagtaaaaagagagagatttttttaaggattttcatttaaagtctttgatttatatttttttgaaggaaaggcacagctcatggctagagctgagaaacgtcatcaggaatgacggtgaggcctcgatgggaaatctgaggcgtcagagagtccggcgaggcgcagaaggctggtctcaagccgaatgaatcaaagaagatagcagcattggagggcaattcgcctccttaatgaaggtgtcggcaatgagccgggaggccacttgctgaggtcactaacaaccggtgaaagatgtgggagagtgaagtgacagctggtttgtagaagcacttttcccatctcatcgtcaccagtaaatttgagaaataatgtctgggtgagagttagagattttgccttctttaaaaagcaggggcaggagtcaggttcgtcaggtttttcttcctgatcgctttgctcagccaattggcaacaacacgattgatcctgtagtgctaattctttgtcgtgatcagcgtcaaaaaaagtggctgttacacaacagcacatcggatttccgatgagtaatgccatgaaaagagctgtgactttaccaaccattagacactttcagttacctgaaatattctcaagtaacaagatg

SEQ ID NO: 186 - DNA, 4000 bp, Escherichia coli
  misc_feature (1)..(5): n is a, c, g, or t
  misc_feature (7)..(7): n is a, c, g, or t
  misc_feature (10)..(32): n is a, c, g, or t
  misc_feature (35)..(35): n is a, c, g, or t
  misc_feature (38)..(42): n is a, c, g, or t
  misc_feature (44)..(44): n is a, c, g, or t
  misc_feature (46)..(46): n is a, c, g, or t
  misc_feature (48)..(48): n is a, c, g, or t
  misc_feature (50)..(54): n is a, c, g, or t
  misc_feature (56)..(60): n is a, c, g, or t
  misc_feature (62)..(66): n is a, c, g, or t
  misc_feature (68)..(72): n is a, c, g, or t
  misc_feature (75)..(75): n is a, c, g, or t
  misc_feature (77)..(81): n is a, c, g, or t
  misc_feature (83)..(83): n is a, c, g, or t
  misc_feature (85)..(85): n is a, c, g, or t
  misc_feature (87)..(87): n is a, c, g, or t
  misc_feature (89)..(102): n is a, c, g, or t
  misc_feature (104)..(105): n is a, c, g, or t
  misc_feature (107)..(109): n is a, c, g, or t
  misc_feature (111)..(112): n is a, c, g, or t
  misc_feature (114)..(117): n is a, c, g, or t
  misc_feature (120)..(120): n is a, c, g, or t
  misc_feature (122)..(123): n is a, c, g, or t
  misc_feature (125)..(125): n is a, c, g, or t
  misc_feature (128)..(128): n is a, c, g, or t
  misc_feature (132)..(132): n is a, c, g, or t
  misc_feature (134)..(134): n is a, c, g, or t
  misc_feature (137)..(138): n is a, c, g, or t
  misc_feature (140)..(145): n is a, c, g, or t
  misc_feature (147)..(147): n is a, c, g, or t
  misc_feature (149)..(156): n is a, c, g, or t
  misc_feature (158)..(159): n is a, c, g, or t
  misc_feature (165)..(166): n is a, c, g, or t
  misc_feature (168)..(168): n is a, c, g, or t
  misc_feature (170)..(172): n is a, c, g, or t
  misc_feature (174)..(179): n is a, c, g, or t
  misc_feature (181)..(182): n is a, c, g, or t
  misc_feature (184)..(185): n is a, c, g, or t
  misc_feature (187)..(187): n is a, c, g, or t
  misc_feature (190)..(190): n is a, c, g, or t
  misc_feature (192)..(192): n is a, c, g, or t
  misc_feature (195)..(195): n is a, c, g, or t
  misc_feature (197)..(199): n is a, c, g, or t
  misc_feature (202)..(206): n is a, c, g, or t
  misc_feature (208)..(209): n is a, c, g, or t
  misc_feature (212)..(217): n is a, c, g, or t
  misc_feature (219)..(219): n is a, c, g, or t
  misc_feature (223)..(223): n is a, c, g, or t
  misc_feature (225)..(230): n is a, c, g, or t
  misc_feature (232)..(232): n is a, c, g, or t
  misc_feature (236)..(236): n is a, c, g, or t
  misc_feature (238)..(241): n is a, c, g, or t
  misc_feature (243)..(243): n is a, c, g, or t
  misc_feature (245)..(245): n is a, c, g, or t
  misc_feature (248)..(252): n is a, c, g, or t
  misc_feature (254)..(255): n is a, c, g, or t
  misc_feature (258)..(267): n is a, c, g, or t
  misc_feature (269)..(269): n is a, c, g, or t
  misc_feature (271)..(274): n is a, c, g, or t
  misc_feature (276)..(280): n is a, c, g, or t
  misc_feature (282)..(282): n is a, c, g, or t
  misc_feature (285)..(289): n is a, c, g, or t
  misc_feature (291)..(292): n is a, c, g, or t
  misc_feature (294)..(295): n is a, c, g, or t
  misc_feature (297)..(297): n is a, c, g, or t
  misc_feature (301)..(301): n is a, c, g, or t
  misc_feature (304)..(304): n is a, c, g, or t
  misc_feature (307)..(307): n is a, c, g, or t
  misc_feature (309)..(309): n is a, c, g, or t
  misc_feature (312)..(314): n is a, c, g, or t
  misc_feature (316)..(317): n is a, c, g, or t
  misc_feature (319)..(323): n is a, c, g, or t
  misc_feature (325)..(325): n is a, c, g, or t
  misc_feature (327)..(328): n is a, c, g, or t
  misc_feature (330)..(330): n is a, c, g, or t
  misc_feature (332)..(333): n is a, c, g, or t
  misc_feature (335)..(338): n is a, c, g, or t
  misc_feature (340)..(341): n is a, c, g, or t
  misc_feature (343)..(343): n is a, c, g, or t
  misc_feature (345)..(347): n is a, c, g, or t
  misc_feature (349)..(350): n is a, c, g, or t
  misc_feature (352)..(358): n is a, c, g, or t
  misc_feature (360)..(360): n is a, c, g, or t
  misc_feature (362)..(363): n is a, c, g, or t
  misc_feature (366)..(373): n is a, c, g, or t
  misc_feature (375)..(376): n is a, c, g, or t
  misc_feature (380)..(380): n is a, c, g, or t
  misc_feature (382)..(383): n is a, c, g, or t
  misc_feature (385)..(388): n is a, c, g, or t
  misc_feature (392)..(397): n is a, c, g, or t
  misc_feature (399)..(404): n is a, c, g, or t
  misc_feature (406)..(407): n is a, c, g, or t
  misc_feature (409)..(415): n is a, c, g, or t
  misc_feature (417)..(417): n is a, c, g, or t
  misc_feature (419)..(421): n is a, c, g, or t
  misc_feature (423)..(426): n is a, c, g, or t
  misc_feature (428)..(430): n is a, c, g, or t
  misc_feature (432)..(432): n is a, c, g, or t
  misc_feature (434)..(438): n is a, c, g, or t
  misc_feature (442)..(449): n is a, c, g, or t
  misc_feature (451)..(452): n is a, c, g, or t
  misc_feature (455)..(460): n is a, c, g, or t
  misc_feature (462)..(462): n is a, c, g, or t
  misc_feature (464)..(465): n is a, c, g, or t
  misc_feature (468)..(469): n is a, c, g, or t
  misc_feature (472)..(472): n is a, c, g, or t
  misc_feature (475)..(488): n is a, c, g, or t
  misc_feature (490)..(490): n is a, c, g, or t
  misc_feature (492)..(495): n is a, c, g, or t
  misc_feature (497)..(497): n is a, c, g, or t
  misc_feature (499)..(503): n is a, c, g, or t
  misc_feature (505)..(508): n is a, c, g, or t
  misc_feature (510)..(516): n is a, c, g, or t
  misc_feature (518)..(525): n is a, c, g, or t
  misc_feature (527)..(534): n is a, c, g, or t
  misc_feature (537)..(538): n is a, c, g, or t
  misc_feature (540)..(545): n is a, c, g, or t
  misc_feature (547)..(552): n is a, c, g, or t
  misc_feature (554)..(555): n is a, c, g, or t
  misc_feature (558)..(559): n is a, c, g, or t
  misc_feature (561)..(562): n is a, c, g, or t
  misc_feature (564)..(566): n is a, c, g, or t
  misc_feature (568)..(572): n is a, c, g, or t
  misc_feature (574)..(584): n is a, c, g, or t
  misc_feature (587)..(594): n is a, c, g, or t
  misc_feature (597)..(599): n is a, c, g, or t
  misc_feature (601)..(601): n is a, c, g, or t
  misc_feature (603)..(606): n is a, c, g, or t
  misc_feature (608)..(619): n is a, c, g, or t
  misc_feature (621)..(623): n is a, c, g, or t
  misc_feature (625)..(632): n is a, c, g, or t
  misc_feature (634)..(634): n is a, c, g, or t
  misc_feature (637)..(638): n is a, c, g, or t
  misc_feature (640)..(641): n is a, c, g, or t
  misc_feature (643)..(647): n is a, c, g, or t
  misc_feature (649)..(654): n is a, c, g, or t
  misc_feature (656)..(658): n is a, c, g, or t
  misc_feature (660)..(662): n is a, c, g, or t
  misc_feature (665)..(665): n is a, c, g, or t
  misc_feature (667)..(668): n is a, c, g, or t
  misc_feature (670)..(671): n is a, c, g, or t
  misc_feature (673)..(680): n is a, c, g, or t
  misc_feature (682)..(696): n is a, c, g, or t
  misc_feature (698)..(704): n is a, c, g, or t
  misc_feature (707)..(716): n is a, c, g, or t
  misc_feature (718)..(718): n is a, c, g, or t
  misc_feature (720)..(720): n is a, c, g, or t
  misc_feature (722)..(722): n is a, c, g, or t
  misc_feature (726)..(733): n is a, c, g, or t
  misc_feature (735)..(737): n is a, c, g, or t
  misc_feature (739)..(744): n is a, c, g, or t
  misc_feature (746)..(746): n is a, c, g, or t
  misc_feature (748)..(749): n is a, c, g, or t
  misc_feature (751)..(753): n is a, c, g, or t
  misc_feature (756)..(757): n is a, c, g, or t
  misc_feature (759)..(761): n is a, c, g, or t
  misc_feature (763)..(779): n is a, c, g, or t
  misc_feature (781)..(784): n is a, c, g, or t
  misc_feature (786)..(786): n is a, c, g, or t
  misc_feature (793)..(795): n is a, c, g, or t
  misc_feature (797)..(800): n is a, c, g, or t
  misc_feature (802)..(803): n is a, c, g, or t
  misc_feature (805)..(806): n is a, c, g, or t
  misc_feature (810)..(814): n is a, c, g, or t
  misc_feature (816)..(823): n is a, c, g, or t
  misc_feature (825)..(827): n is a, c, g, or t
  misc_feature (829)..(829): n is a, c, g, or t
  misc_feature (831)..(841): n is a, c, g, or t
  misc_feature (843)..(845): n is a, c, g, or t
  misc_feature (847)..(853): n is a, c, g, or t
  misc_feature (855)..(862): n is a, c, g, or t
  misc_feature (864)..(870): n is a, c, g, or t
  misc_feature (873)..(873): n is a, c, g, or t
  misc_feature (876)..(877): n is a, c, g, or t
  misc_feature (879)..(882): n is a, c, g, or t
  misc_feature (884)..(887): n is a, c, g, or t
  misc_feature (889)..(890): n is a, c, g, or t
  misc_feature (892)..(895): n is a, c, g, or t
  misc_feature (897)..(900): n is a, c, g, or t
  misc_feature (902)..(904): n is a, c, g, or t
  misc_feature (906)..(914): n is a, c, g, or t
  misc_feature (916)..(919): n is a, c, g, or t
  misc_feature (921)..(924): n is a, c, g, or t
  misc_feature (926)..(929): n is a, c, g, or t
  misc_feature (932)..(932): n is a, c, g, or t
  misc_feature (934)..(936): n is a, c, g, or t
  misc_feature (938)..(940): n is a, c, g, or t
  misc_feature (944)..(944): n is a, c, g, or t
  misc_feature (946)..(946): n is a, c, g, or t
  misc_feature (948)..(948): n is a, c, g, or t
  misc_feature (950)..(955): n is a, c, g, or t
  misc_feature (958)..(958): n is a, c, g, or t
  misc_feature (960)..(968): n is a, c, g, or t
  misc_feature (970)..(978): n is a, c, g, or t
  misc_feature (980)..(988): n is a, c, g, or t
  misc_feature (990)..(992): n is a, c, g, or t
  misc_feature (994)..(994): n is a, c, g, or t
  misc_feature (996)..(997): n is a, c, g, or t
  misc_feature (999)..(1007): n is a, c, g, or t
  misc_feature (1009)..(1011): n is a, c, g, or t
  misc_feature (1013)..(1017): n is a, c, g, or t
  misc_feature (1019)..(1020): n is a, c, g, or t
  misc_feature (1024)..(1024): n is a, c, g, or t
  misc_feature (1026)..(1026): n is a, c, g, or t
  misc_feature (1029)..(1030): n is a, c, g, or t
  misc_feature (1032)..(1034): n is a, c, g, or t
  misc_feature (1036)..(1042): n is a, c, g, or t
  misc_feature (1044)..(1047): n is a, c, g, or t
  misc_feature (1049)..(1051): n is a, c, g, or t
  misc_feature (1054)..(1054): n is a, c, g, or t
  misc_feature (1056)..(1065): n is a, c, g, or t
  misc_feature (1067)..(1068): n is a, c, g, or t
  misc_feature (1070)..(1071): n is a, c, g, or t
  misc_feature (1073)..(1076): n is a, c, g, or t
  misc_feature (1078)..(1081): n is a, c, g, or t
  misc_feature (1083)..(1089): n is a, c, g, or t
  misc_feature (1091)..(1093): n is a, c, g, or t
  misc_feature (1096)..(1097): n is a, c, g, or t
  misc_feature (1099)..(1105): n is a, c, g, or t
  misc_feature (1107)..(1116): n is a, c, g, or t
  misc_feature (1119)..(1121): n is a, c, g, or t
  misc_feature (1123)..(1124): n is a, c, g, or t
  misc_feature (1127)..(1128): n is a, c, g, or t
  misc_feature (1130)..(1130): n is a, c, g, or t
  misc_feature (1133)..(1135): n is a, c, g, or t
  misc_feature (1137)..(1138): n is a, c, g, or t
  misc_feature (1140)..(1153): n is a, c, g, or t
  misc_feature (1155)..(1160): n is a, c, g, or t
  misc_feature (1162)..(1162): n is a, c, g, or t
  misc_feature (1164)..(1164): n is a, c, g, or t
  misc_feature (1167)..(1168): n is a, c, g, or t
  misc_feature (1170)..(1178): n is a, c, g, or t
  misc_feature (1180)..(1181): n is a, c, g, or t
  misc_feature (1184)..(1186): n is a, c, g, or t
  misc_feature (1188)..(1189): n is a, c, g, or t
  misc_feature (1191)..(1197): n is a, c, g, or t
  misc_feature (1199)..(1199): n is a, c, g, or t
  misc_feature (1201)..(1205): n is a, c, g, or t
  misc_feature (1207)..(1209): n is a, c, g, or t
  misc_feature (1211)..(1215): n is a, c, g, or t
  misc_feature (1219)..(1221): n is a, c, g, or t
  misc_feature (1223)..(1227): n is a, c, g, or t
  misc_feature (1230)..(1230): n is a, c, g, or t
  misc_feature (1232)..(1232): n is a, c, g, or t
  misc_feature (1234)..(1239): n is a, c, g, or t
  misc_feature (1241)..(1243): n is a, c, g, or t
  misc_feature (1246)..(1247): n is a, c, g, or t
  misc_feature (1250)..(1251): n is a, c, g, or t
  misc_feature (1253)..(1257): n is a, c, g, or t
  misc_feature (1259)..(1261): n is a, c, g, or t
  misc_feature (1264)..(1265): n is a, c, g, or t
  misc_feature (1267)..(1268): n is a, c, g, or t
  misc_feature (1270)..(1271): n is a, c, g, or t
  misc_feature (1273)..(1273): n is a, c, g, or t
  misc_feature (1275)..(1276): n is a, c, g, or t
  misc_feature (1278)..(1278): n is a, c, g, or t
  misc_feature (1281)..(1282): n is a, c, g, or t
  misc_feature (1284)..(1286): n is a, c, g, or t
  misc_feature (1288)..(1288): n is a, c, g, or t
  misc_feature (1291)..(1291): n is a, c, g, or t
  misc_feature (1293)..(1294): n is a, c, g, or t
  misc_feature (1297)..(1297): n is a, c, g, or t
  misc_feature (1405)..(1405): n is a, c, g, or t
  misc_feature (1933)..(1933): n is a, c, g, or t
  misc_feature (1936)..(1937): n is a, c, g, or t
  misc_feature (1945)..(1945): n is a, c, g, or t
  misc_feature (1952)..(1952): n is a, c, g, or t
  misc_feature (1957)..(1958): n is a, c, g, or t
  misc_feature (1966)..(1967): n is a, c, g, or t
  misc_feature (1972)..(1973): n is a, c, g, or t
  misc_feature (1976)..(1976): n is a, c, g, or t
  misc_feature (1981)..(1981): n is a, c, g, or t
  misc_feature (1988)..(1988): n is a, c, g, or t
  misc_feature (1990)..(1990): n is a, c, g, or t
  misc_feature (1996)..(1997): n is a, c, g, or t
  misc_feature (2392)..(2392): n is a, c, g, or t
  misc_feature (2395)..(2395): n is a, c, g, or t
  misc_feature (2472)..(2472): n is a, c, g, or t
  misc_feature (2551)..(2551): n is a, c, g, or t
  misc_feature (2566)..(2567): n is a, c, g, or t
  misc_feature (2585)..(2585): n is a, c, g, or t
  misc_feature (2587)..(2587): n is a, c, g, or t
  misc_feature (2590)..(2590): n is a, c, g, or t
  misc_feature (2602)..(2602): n is a, c, g, or t
  misc_feature (2605)..(2605): n is a, c, g, or t
  misc_feature (2612)..(2612): n is a, c, g, or t
  misc_feature (2623)..(2623): n is a, c, g, or t
  misc_feature (2628)..(2628): n is a, c, g, or t
  misc_feature (2641)..(2643): n is a, c, g, or t
  misc_feature (2646)..(2648): n is a, c, g, or t
  misc_feature (2652)..(2652): n is a, c, g, or t
  misc_feature (2657)..(2657): n is a, c, g, or t
  misc_feature (2663)..(2663): n is a, c, g, or t
  misc_feature (2665)..(2665): n is a, c, g, or t
  misc_feature (2671)..(2671): n is a, c, g, or t
  misc_feature (2682)..(2682): n is a, c, g, or t
  misc_feature (2690)..(2690): n is a, c, g, or t
  misc_feature (2777)..(2777): n is a, c, g, or t
  misc_feature (2783)..(2783): n is a, c, g, or t
  misc_feature (2798)..(2798): n is a, c, g, or t
  misc_feature (2801)..(2801): n is a, c, g, or t
  misc_feature (2804)..(2804): n is a, c, g, or t
  misc_feature (2813)..(2813): n is a, c, g, or t
  misc_feature (2825)..(2825): n is a, c, g, or t
  misc_feature (2852)..(2852): n is a, c, g, or t
  misc_feature (2858)..(2858): n is a, c, g, or t
  misc_feature (2866)..(2866): n is a, c, g, or t
  misc_feature (2873)..(2873): n is a, c, g, or t
  misc_feature (2876)..(2876): n is a, c, g, or t
  misc_feature (2894)..(2894): n is a, c, g, or t
  misc_feature (2969)..(2969): n is a, c, g, or t
  misc_feature (2989)..(2989): n is a, c, g, or t
  misc_feature (3022)..(3022): n is a, c, g, or t
  misc_feature (3253)..(3253): n is a, c, g, or t
  misc_feature (3258)..(3258): n is a, c, g, or t
  misc_feature (3265)..(3265): n is a, c, g, or t
  misc_feature (3291)..(3291): n is a, c, g, or t
  misc_feature (3333)..(3333): n is a, c, g, or t
  misc_feature (3385)..(3385): n is a, c, g, or t
  misc_feature (3396)..(3396): n is a, c, g, or t
  misc_feature (3399)..(3399): n is a, c, g, or t
  misc_feature (3405)..(3405): n is a, c, g, or t
  misc_feature (3408)..(3408): n is a, c, g, or t
  misc_feature (3417)..(3417): n is a, c, g, or t
  misc_feature (3426)..(3426): n is a, c, g, or t
  misc_feature (3435)..(3435): n is a, c, g, or t
  misc_feature (3537)..(3537): n is a, c, g, or t
  misc_feature (3544)..(3544): n is a, c, g, or t
  misc_feature (3546)..(3546): n is a, c, g, or t
  misc_feature (3555)..(3555): n is a, c, g, or t
  misc_feature (3653)..(3654): n is a, c, g, or t
  misc_feature (3663)..(3663): n is a, c, g, or t
  misc_feature (3665)..(3666): n is a, c, g, or t
  misc_feature (3684)..(3684): n is a, c, g, or t
  misc_feature (3696)..(3696): n is a, c, g, or t
  misc_feature (3708)..(3708): n is a, c, g, or t
  misc_feature (3720)..(3720): n is a, c, g, or t
  misc_feature (3726)..(3726): n is a, c, g, or t
  misc_feature (3730)..(3730): n is a, c, g, or t
  misc_feature (3735)..(3735): n is a, c, g, or t
  misc_feature (3762)..(3762): n is a, c, g, or t
  misc_feature (3765)..(3765): n is a, c, g, or t
  misc_feature (3770)..(3770): n is a, c, g, or t
  misc_feature (3774)..(3774): n is a, c, g, or t
  misc_feature (3804)..(3804): n is a, c, g, or t
  misc_feature (3808)..(3808): n is a, c, g, or t
  misc_feature (3820)..(3820): n is a, c, g, or t
  misc_feature (3822)..(3822): n is a, c, g, or t
  misc_feature (3837)..(3837): n is a, c, g, or t
  misc_feature (3841)..(3842): n is a, c, g, or t
  misc_feature (3846)..(3846): n is a, c, g, or t
  misc_feature (3855)..(3855): n is a, c, g, or t
  misc_feature (3876)..(3876): n is a, c, g, or t
  misc_feature (3879)..(3879): n is a, c, g, or t
  misc_feature (3885)..(3885): n is a, c, g, or t
nnnnntnccnnnnnnnnnnnnnnnnnnnnnnnccnttnnnnncntngngnnnnngnnnnntnnnnnannnnntangnnnnntnanangnnnnnnnnnnnnnngnngnnncnngnnnnaantnntntcntaantncanngnnnnnngngnnnnnnnnanntatttnnangnnntnnnnnncnntnngngananatncnnnaannnnngnngannnnnncngcanannnnnnanattncnnnncngnatnnnnngnntannnnnnnnnngnannnncnnnnncnccnnnnngnncnncntttntancantnccnnnannannnnngngnncntnnannnncnncnannngnngnnnnnnntntnntcnnnnnnnntnntaananncnnnncccnnnnnngnnnnnncnngnnnnnnntntnnncnnnnannntnannnnnaaannnnnnnnannaannnnnntnannacnngcncannnnnnnnnnnnnnantnnnnanannnnngnnnntnnnnnnncnnnnnnnngnnnnnnnnggnngnnnnnnannnnnnannacnntnngnnntnnnnntnnnnnnnnnnncgnnnnnnnnttnnnanannnncnnnnnnnnnnnngnnnannnnnnnncntcnncnntnnnnnannnnnntnnngnnnacntnntnnannnnnnnntnnnnnnnnnnnnnnnannnnnnngcnnnnnnnnnncncntnaccnnnnnnnngnnntnnnnnncncnnannngcnngnnnannnnnnnnnnnnnnnnnannnnanttgacannncnnnntnntnnagtnnnnnannnnnnnntnnnanannnnnnnnnnnannngnnnnnnnannnnnnnntnnnnnnntgnttnncnnnntnnnngnntnnnnannnncnnngnnnnnnnnngnnnnannnncnnnnatnannnannntgtntnangnnnnnnatnannnnnnnnnannnnnnnnngnnnnnnnnncnnnananntnnnnnnnnngnnntnnnnnanncaancntcnncnnngnnnnnnncnnnnannnacncnnnnnnnnnncnntnnannnngnnnncnnnnnnngnnnttnntnnnnnnncnnnnnnnnnnaannntnncannanttnnncnnannnnnnnnnnnnnntnnnnnnananganncnnnnnnnnntnnttnnntnntnnnnnnnangnnnnncnnntnnnnnacgnnnannnnnaananannnnnntnnntgnnatnnannnnnannncannanncnnancnnangannannncnacnannctnaacagcgcgacgggcagcgtgctcggacttgccgaacttatcggaataagccacggtaaaatgcgcactcttatcggccacctatgcgccgcaggactgataacgagngaatcatcgaacaaaggaacggcatttcgacttactgaccgcggcgaacaggtattgaatttcacatcggcagacgtcgacgatttttcgaccattctgtcggttatccaacggcctttcggcatagctattttacatattattaaacaactaacgcacaacgcactatgaaaaacaacatcgaaaatgggatttacatccccgaggaacagcgcaaccttatccccgtcgacgaatgggtgaagcgcgaagatccgaccacagcgcagaccgttgtacttgtaaccgatttcggaatgctcgaaatcgccaaagaagacctaccgggcggattcaatttcgagggcgcacagaaagctgccgccgaataccgcaagggcttccgctgcccgacccggcatgaagcaattgaaatgtacgacgcccggttccgtggcctcgacgaagcgttcaagaagatcggcggcgaacccgcaacgactatcggctggacgagcgaagccgaccccgacccggagtacaattccnacnncgcgttcntctacancggcnncacgggcnncgtgnncancaacngcaagtntnacacgnncgccgtgcgtccggtttccgctttcaagaaatagtttcacagttcaatcattcccgcgccctttacggggcgcggggttaaccccaaagaccaaacagaaatgaaaaaaggcacgatcatcaaacgcaccgactacgtggcgacgatgctcgctattcccgtcggagaagaacacgaattcacgctgacggggcgcgactacgcatcgtatatgaacgccgtcagccgtttcaacaagaacggcaaggcgaaattcgaagcccgcaccgcttccgcatccaccatcgtaattaaacgcctttcgtaatatgtcgctccccgaattatacgaattacagcattgcctcgtccacgtcgccgatgtcgttgcttgcgcaatcatcaagcgccagcanccngccgccgacctcgtaacgaaacgcgcgctgtatcgggaattcggtcggggctgggtcgataagcatatcgccccgcntgggaagatcgagggcaagcgattcggaacggccccgaattcaccgatcaaatacagccgcacggaattcgtcgccctnctcgaagccgaacgnntgcaacgcgcagaaatcntnggnaaatacggacancangagcagncaaaataagcngtttngcagcctttaccnnnccnnncgancgaanacacgncnacagcncgaaagtcganaaaacagnaaattcgataaaaataacatgcaagcactcaaatacacatcaagggaggtaaaccggaatttccgcatcaaggtttcgggcctcggnatccangaactcaaaggcttnacnggnttcgtcggnttggtggggagngaactcgcaaacaacctgcttgaccgngcattncgaagcanggcgganaangtagaatgcaaactgcgncgcggcttgaaaataaccttttactacaagtagacatgaaaaccaaaattttagctatcccgtggtggctgtcgntggtcgcgctcggcggagcnatggatgcagacccgatttcatgggtcgccgtngccgtaacattcgccgcgttcgtaacactttccgcagccataatcagagaacaaaggaaaaccgcataataaccaatcatcacaaaacgcacgatgctatgaacatcaagatcaaatcaattaccctgcgcaatttcaaaggactgcgcgacgtatcgttcgatttcgacggccgtaacgccacgatcataggcgacaacggtacgggaaagacaaccattttcgacgccntgacntgggtantgttcggcaaggattcgcacaacagnaccgacatcgacatcaagacaatagacgccacgggcgaaccnatgcaccgcgccgagcatttcgtcgaggtggcattggacgtggacggctccncacagacgctncgncgcacntancgcgagatntggagcaanccgcgcggntcgtccgacctgcgattcgtcggacacgaaagtgcgtttgccgtcaatggcgtggaggtcggaaccaaggcggcatacgacaaaatcatttcggaatggatnaacgacnangtattccgnatgctgaccgacccgatgtatttcaatactcgcgtcgattggaaaggccgtcgcgctgcccttttagccctcgtcggggataacatcgaccgcacggnnatacaggcncnntttgccgacctgctcgcngaaatgaacggngaacccctcgcngatttcaaagcncggctngcgnccganaagcgcaagaacaaaaaggaactcganacnttcgncccnaagatcgaagcatatcaaaacacgatgccnccgncggaagactacncngcgctggaacagganatcnngcancgcgaatcngtggccgcaaacgagatcgcngcntaccancggcaaatcgacgcactcgacacgcagatcgccgacgcatcgaaaatagacgaggaaacgcaggccgcccacgaccgaagactgaaaaaggtgctcgacatcaaaaagtcgttgt

SEQ ID NO: 187 - DNA, 4000 bp, Escherichia coli
aggcctgccgctagcgttcatcctgagccaggatcaaactctccattgtataaaatgttttgttttaaatctttagctctaatctcaaaggtattgtttgaaattcactctctcgcgagagtggaaaacttttagctgctcaaatacttcaaagaacgctgttcaaatatattgctataaagaacaatttctttctttttgccgggtctgtccttgcggcttttcccgttgttccgaccgctgatttttcagcggaaagtggtgcaaagataagtcatctttttgaaaccaccaaatcttttcgaaagattttttcagaaattttcagaaccttttttcttatcgtttcgaaccgtatttcttattcgaagcgggtgcaaaggtaagtcatttttccgaatctccaaaagattttggaacttttttcaaaatttttcagaacctgttttttccgccccggagcagtatttctctctcgaagcggatgcaaagataagggcattccggagttatttccaaataattccgggactttttttcgacaatttcaccaccttttttacacacggctatcggtcagcgagttagttgtgaaaaatttttaatatatttgcaaaaacgaacagcggagactatgaaacaggctttaatatatataggtatgcttctgctggccatttcctgcggccaaaaccgcgatcgcctgcacacgggcgacctgctcttccaggccggaaaaaacacggagatgaccggggcgatcacggcggcgacgggcgaagaagggccgctgaatttctcccacgtggggatcgccgtcacaggcaacggggcggattcggtgctcgaagccacgaccgacggcggcgtccggctcacgctattggaggaatttctcggacgctccgcaaaaatcggcggccggccggcagtagttgccatgcggttgaaggacacggccggcatcgcggctgccgtccgccgtgcgcgcagcttcctcggagtcccctacgattattcgttccggcccggaagggagaaactctattgcagcgaactggtgtgggaaagctaccgcgccgaaaacggcaccccgcttttcacggcgcggccgatgaacttccgcgccgcggacggaaccctgccgcaattctgggccgacctgttcgaccaactgggcgagcaggttcccgaagggctgcccggcacgaaccccaacgacatggcacgcgaggagctcctcgaagaagtgcaccgttatttctgaccgatgggcaccggcacacaccaccatgacacggcgttctcgatcgtcaaggccctcggcatcgtagcggtggtgatttcacacgccgcgatcctgacaccgctggaaaccttcacctactatttcaacacggccgtcttctttttcgtcgcgggctatttcttcgacgacggacagaccgccgccccggggcgtttcataggccgcaagctccgacgcctctacctgccctacgtcgtcctgggcacgctcttcgtgctgctgcacaaccgatttctcgagtggcacctgatcgcctatgacttctccgcccgggaggccatcctgccctacgacaccccggagctgctccggacgctgggccgggtattcctgttcctgcaccacgagcagatgcaggcgcccttctggtttctgcaagggctgttcctcgggctgatgctctttttctgcatcacgctggcaacccgcaaactcgccccgacgccgaccgtggcggaacggctgcgcgggggctccatcctgttcctgtttacggtcgccatgctgctcgcccgccatccgtcgggcattccgggcgagtggatcgccgtccggacattcgccatcacggggataatctacctcggaaaactcttccgcatcttccgcgcgcggctcccgctggacgggcgcatcgcaacgctctgcctggtcatcctgctcgcggcggcagccgcaggctgccgcatcaaccttggcgggagacttttcggcaacccggtgctcttcgtcgtgctggtgtgcacaggatgctacatgctcgtcaccgccgcaagccgcctcgcggcaaccggcaacaggctgacacggatgctggactatacgggacggcacaccatggcgatcatgctgtggcacatccccgcattcaaactggtgatactctttcaaatgtgggtttgcgactacccgccccgctacctggcctgccacccggtcatccccacagggtcgccctggtggtggataccctacaccgtggtcggaatcaccctgccgctgggcttctgcctgctgtacgaccggctcatacgatccgttcgatggtaatgtcgggattctcacgcagcaggtcgacatagcggtcttcatccgtattccccttggcacggatgaccagggtggcccggtagacgatgccgtcggcgctgcgctgtgcctcgacctcataggagatcacggcatattcgcggctctgcaactcgttgaacatctcgtcgaccgcagcacgcttcgtagccgaaaagaccaccatcgtcctgcggcgccccaacccgccaaagaccagcgtaagcacttcgagcgcgaagagcgtcagcaccgtagccgctgcagccacgacatacatatgcgccccggccgcaaggccgatgccggccgtcgcccagaggcttgccgccgtcgtaagcccgcgcaccaactggcggtggatgatgatcgtaccggcgccgatgaagccgatgccgctcaccacctgtgcagcgatacggctggggtcgagccccacgcctgtatgcatcaggatatcggcgaagccgtactgcgacacgatcattatcagcgcactgcccagcgcaaccaggaaatgggtgcggaaacccgcatccttgacccggtattcgcggtcgaggccgatcaccgtgccgcaaaggcctgccacgcacaagcgtatgataaaatcccactccatctccatcgtcctgcggtttttgatttacctattcaaatatacggaaaattatcgggatcagcaaaccgacctggggcacaggcggcggacagcccccggcgtttccctgcaataattgcgcaacgggaataaaaagagggagatttttcagccccgcgattgcggtatgccgaatttttgttatctttgcaggctaagtttaactaattaactatttacgacaatgccgaaaatgaaaaccaatgccgctgcgaagaagcgttttaccttcaccggcacaggaaagatcaagcgcaaacacgcttatcacagtcacatcctgaccaaaaagacgactaaacagaaacgtaacctctgctactcgggtacggtttctgcggtcgacgaggccaaaatcaagaacctgctggtcaagtaatcgacctgcggaagttattaaccggagcgaatcagccccaaagaacgcgggagaaccgcgtcgctgacagctcttcaaaaactttacaagtatgccacgttcagtcaacgccgttgcatcacgcgcacgtagaaaaaaagttttgaaacttgccaaaggtaactttggttcaaggggaaatgtttggaccgttgcgaaaaacacggtcgaaaagggtttgcagtatgcatatgcacaccgccagctcaaaaagcggacattccgctcgctgtggatcatgcgtatcaacgcagcagtccgcgcacagggaatgacctattcacaatttatcggcaaactcaacgccaagggcatcgcactgaaccgcaaggttttggccgacctggcgatgaacgagccaaaagcattcgaggcaatagttaaagcagttaaataaaccctttcacggaagggtttgcagcggcggacacctcggtgtccgccttttttggcatcaccgcgaaacaagcatggaaaactggaaaaagacattcgggatcatctggagcgggcagctcgcctcgatcctcagcagctcggtcgt

SEQ ID NO: 188 - DNA, 4000 bp, Escherichia coli
  misc_feature (164)..(164): n is a, c, g, or t
  misc_feature (197)..(197): n is a, c, g, or t
  misc_feature (361)..(361): n is a, c, g, or t
  misc_feature (725)..(725): n is a, c, g, or t
  misc_feature (880)..(880): n is a, c, g, or t
  misc_feature (920)..(920): n is a, c, g, or t
  misc_feature (932)..(932): n is a, c, g, or t
  misc_feature (992)..(992): n is a, c, g, or t
  misc_feature (1255)..(1255): n is a, c, g, or t
  misc_feature (3159)..(3159): n is a, c, g, or t
  misc_feature (3305)..(3305): n is a, c, g, or t
  misc_feature (3471)..(3471): n is a, c, g, or t
  misc_feature (3519)..(3519): n is a, c, g, or t
atacgcatgaaggacggagcctcggtcagcatttcccgccaacggcgaaactatgtgatggaagtattaaaacaattataaaccaagccatctaaataactgctcattccttatatttcaaatcgaaacggccttccgtaatgcgtcctccctcgaaagtgccnctgaacacgccgtccgacatacgggagatgtanaccttgccatcttccatattttgattttcaaaagagagattcacataaggaagcgtttctccctccttggggtcggcaatcgtaaaacggatatacgaaccgagaccgacctgcgccgaaaccgtcacgctggaaccctcttcccgctccaaatattccgcagnaggcatcccccaccggccgcttgtatacacccagccgtcaaccaagcaaccaaatgtattcgccccggtcgtagtagcttcgggcatgatcgtcggatcgaccgattcgttctcttcacaggccacacaaaacagcaacaaacagataaataacagatgtctcataaccgtatctgattaaaagtgtaaattcataccgaacaataaggataattgggagaaacatcctccgccaccactcaattcaggagattcgacctgccatttctgaccgtgatacctgaccgaatagctctcagaggaggtaacgatccaattcaattttgcagaaatccccaccagcggagaaagacgatactcgccncccgccgacagattataggccagtttattcattgacacatcccgcggcttgccgtacacaaaacttttatctttataatgctgatatcccaccccagtcgataaagacagattgtatttctgcttcaccataaacaaggcaagctgaggcgcganataatgcatcaggatcttgtcggaactttcgtcatgagtntttttataacgnccaccctgatagataagtccgggagcgagtttaaacgaaccgaagatatatttgtctccnaagaaataataattggcatcccaggcgatcccattccgcaaatcattccgataagcatcggagttgttcgtgatcccgatcattttccccaaataccaggaaggccctgcatgaacggagaatatcgacttcccgacagacgtctcctgggccaaaaccgacacagcttgtatcaacagccctaacaaaagtacatactttttcatatcatttcttttagacttataatcataaatataagatgctcaaaaccagtcaaacgntgcacaggctgttacgacaagatcgtattgtttctcctatcctatcttcaaagcatcgcatggttcagataatggataaattcaggatcatcgggtgcaatgataaagttaccacggcgggaagtcgtaatcagaatacggttatcagaacgccgggcaaaaacttttacacgtccgatagcagtagaagaaaaatatccgagatcaccaaacaaccaaccgacaccaaatgaacggatcattattcctaaatccagccggtcgacctcgcgaaccgaaaggatttcctctatgtttatatacgtcttccgaaaatacgcatctatcaccagtttttctccatccacaataaaacggtttggcataaatcctcgagtaagcatacaaaggatcgaactgacggcaaacaaacctaacaaaacagacagattgccatcccaagccggaaatatacagataccatataaaagcagaagcatgacagacgtttttattttattggcattgtccatcgaagaagaagatatccgggtttccatactcttattcctttagtattacttagatattccaagactcacaaatataacaaaaatcccgtacaaactattatctttgcaaaagaaacaaagacaattaggacaatgactttcaattacgatgtgatcgtggtaggtgccggccatgcaggctgtgaagccgcagcggcggccgccaatatgggttcgaagacgcttctcattacaatggacatgaacaagattgcgcagatgagttgcaatccggctgtcggaggcatagccaaaggacagattgtccgcgaaatcgacgctttaggcggatatatgggaatcgtgacggaccggacagccatccagttccgtatgctgaaccaaagcaagggaccggcgatgtggagcccgcgctcccagagcgaccgcgcccgtttcatcgaatgctggcggggaatactggaaaacctgccgaacctgtatatctggcaggataccgtacgcgaactgttgctcgacgggaataccgtatgcggcgtaaaaacggatatgggagtcgagttccatgcgaaaagcgtggttctgacaaacgggactttcctgaacgggcttatgcatatcggacggacacagatcagaggcggtcgtatagccgagccggctgcaaccggactgaccgaacaactggtctcattaggcatcaaatccgaacggatgaagaccggaacgcctgtgcgtatcgatgcacggagcgtacacttcgatgaaatggcggaacagcccggagaaaacgacttccataagttttcttatatggacacctcgcaccgcgttctgaaacagctaagctgttggacaacgttcaccaacgaagcctgccatgcagtcctgcgcgaaggcctccccgactccccgttgtataacggacagatccagagcatcggcccgcgctactgtccgagcatcgagacgaaaatcgtgacgtttgcggacaagccacaacaccaactcttcctggaaccggaaggtgaaacgacacaggaatactacctgaacggcttctcctcctcccttccgttggatatccagctacgtgccttgcaacagataccggcattccgggacatacagatctatcgtccgggatatgctattgaatatgatttcttcgatccgacgcagctccaccataatttggaaacaaaacaaatccgcaacctcttctttgccggacagatcaacgggacgaccggatatgaggaagccggcggacaaggattggtagccggcataaacgcacatatcaattgccacggcggagatccgttcgttttaggacgcgacgaagcctatatcggcgtactgatcgacgatcttgtcacaaaaggcgtngacgagccttaccgtatgtttacctcacgtgcagaatatcgcattctgctccgccaggatgatgcggacatgcgtttgacggaaaagtcgtatcatctcggtttggcaaagcaggaccgctacgatttgttgaaagagaaaaaggnaagccgggatgcgattatttctttcgcagaaaactactccatcaaaccgcaatatataaacagtggcctggaggcgttgggcactaccccgctcgcacacggatgcaagttgatcgaactgattccacgtcctcagatcaccttggagaatatcgcggaactggtnccggcattccggacagagctggacaaggtccctgtttcacgaaaagangagatcatcgaagcggcagaaatattaatcaagtatagcggctacatccgccgcgagcagatcatcgccgacaagataaaccgcctggaaaatatccatatcaaaggcaagtttgactacaatgcgatccagtctttgtctacggaagcccgccagaaactgacacggatagacccagacacgatagcccaggcaagccgtattccgggtatctccccaagcgacatcaatatcctcctggtgatgctgggacgctaaacgtggaatgttccacgtgaaacatttactttaacaacaatagcgtaaaagactgaaaataggatagaaacagatgcaaaagaaatgagcacaaccgaggaacatataaaaaacatcctttccgtcataccggaatcgccaggctgctaccaatactttgacgagaagggaacgatcatctatgtaggcaaagcaaagaacctgaagcgtcgcgtttcctcct

SEQ ID NO: 189 - DNA, 4000 bp, Escherichia coli
  misc_feature (1155)..(1155): n is a, c, g, or t
  misc_feature (1244)..(1244): n is a, c, g, or t
  misc_feature (1253)..(1253): n is a, c, g, or t
  misc_feature (1265)..(1265): n is a, c, g, or t
  misc_feature (1271)..(1271): n is a, c, g, or t
  misc_feature (1296)..(1296): n is a, c, g, or t
  misc_feature (2887)..(2888): n is a, c, g, or t
  misc_feature (2991)..(2991): n is a, c, g, or t
  misc_feature (3059)..(3059): n is a, c, g, or t
  misc_feature (3081)..(3082): n is a, c, g, or t
  misc_feature (3163)..(3163): n is a, c, g, or t
  misc_feature (3184)..(3184): n is a, c, g, or t
  misc_feature (3207)..(3207): n is a, c, g, or t
  misc_feature (3220)..(3221): n is a, c, g, or t
  misc_feature (3224)..(3224): n is a, c, g, or t
  misc_feature (3226)..(3226): n is a, c, g, or t
  misc_feature (3228)..(3242): n is a, c, g, or t
  misc_feature (3244)..(3245): n is a, c, g, or t
  misc_feature (3247)..(3247): n is a, c, g, or t
  misc_feature (3249)..(3251): n is a, c, g, or t
  misc_feature (3255)..(3257): n is a, c, g, or t
  misc_feature (3259)..(3260): n is a, c, g, or t
  misc_feature (3264)..(3264): n is a, c, g, or t
  misc_feature (3266)..(3272): n is a, c, g, or t
  misc_feature (3275)..(3277): n is a, c, g, or t
  misc_feature (3279)..(3280): n is a, c, g, or t
  misc_feature (3282)..(3283): n is a, c, g, or t
  misc_feature (3285)..(3288): n is a, c, g, or t
  misc_feature (3291)..(3299): n is a, c, g, or t
  misc_feature (3301)..(3306): n is a, c, g, or t
  misc_feature (3308)..(3308): n is a, c, g, or t
  misc_feature (3310)..(3310): n is a, c, g, or t
  misc_feature (3314)..(3316): n is a, c, g, or t
  misc_feature (3318)..(3322): n is a, c, g, or t
  misc_feature (3324)..(3325): n is a, c, g, or t
  misc_feature (3328)..(3330): n is a, c, g, or t
  misc_feature (3332)..(3334): n is a, c, g, or t
  misc_feature (3336)..(3338): n is a, c, g, or t
  misc_feature (3342)..(3344): n is a, c, g, or t
  misc_feature (3346)..(3348): n is a, c, g, or t
  misc_feature (3350)..(3357): n is a, c, g, or t
  misc_feature (3359)..(3360): n is a, c, g, or t
  misc_feature (3363)..(3367): n is a, c, g, or t
  misc_feature (3370)..(3373): n is a, c, g, or t
  misc_feature (3376)..(3380): n is a, c, g, or t
  misc_feature (3382)..(3383): n is a, c, g, or t
  misc_feature (3385)..(3385): n is a, c, g, or t
  misc_feature (3387)..(3390): n is a, c, g, or t
  misc_feature (3393)..(3393): n is a, c, g, or t
  misc_feature (3397)..(3397): n is a, c, g, or t
  misc_feature (3400)..(3400): n is a, c, g, or t
  misc_feature (3402)..(3405): n is a, c, g, or t
  misc_feature (3411)..(3411): n is a, c, g, or t
  misc_feature (3413)..(3413): n is a, c, g, or t
  misc_feature (3416)..(3417): n is a, c, g, or t
  misc_feature (3419)..(3419): n is a, c, g, or t
  misc_feature (3421)..(3428): n is a, c, g, or t
  misc_feature (3430)..(3432): n is a, c, g, or t
  misc_feature (3434)..(3434): n is a, c, g, or t
  misc_feature (3437)..(3437): n is a, c, g, or t
  misc_feature (3439)..(3442): n is a, c, g, or t
  misc_feature (3444)..(3446): n is a, c, g, or t
  misc_feature (3449)..(3449): n is a, c, g, or t
  misc_feature (3452)..(3456): n is a, c, g, or t
  misc_feature (3459)..(3461): n is a, c, g, or t
  misc_feature (3463)..(3464): n is a, c, g, or t
  misc_feature (3466)..(3473): n is a, c, g, or t
  misc_feature (3475)..(3478): n is a, c, g, or t
  misc_feature (3483)..(3485): n is a, c, g, or t
  misc_feature (3487)..(3487): n is a, c, g, or t
  misc_feature (3489)..(3490): n is a, c, g, or t
  misc_feature (3492)..(3492): n is a, c, g, or t
  misc_feature (3494)..(3496): n is a, c, g, or t
  misc_feature (3498)..(3510): n is a, c, g, or t
  misc_feature (3512)..(3517): n is a, c, g, or t
  misc_feature (3519)..(3522): n is a, c, g, or t
  misc_feature (3525)..(3538): n is a, c, g, or t
  misc_feature (3540)..(3541): n is a, c, g, or t
  misc_feature (3543)..(3546): n is a, c, g, or t
  misc_feature (3548)..(3549): n is a, c, g, or t
  misc_feature (3551)..(3562): n is a, c, g, or t
  misc_feature (3564)..(3565): n is a, c, g, or t
  misc_feature (3570)..(3570): n is a, c, g, or t
  misc_feature (3572)..(3572): n is a, c, g, or t
  misc_feature (3574)..(3575): n is a, c, g, or t
  misc_feature (3577)..(3578): n is a, c, g, or t
  misc_feature (3580)..(3581): n is a, c, g, or t
  misc_feature (3583)..(3585): n is a, c, g, or t
  misc_feature (3587)..(3587): n is a, c, g, or t
  misc_feature (3589)..(3589): n is a, c, g, or t
  misc_feature (3592)..(3592): n is a, c, g, or t
  misc_feature (3594)..(3596): n is a, c, g, or t
  misc_feature (3600)..(3601): n is a, c, g, or t
  misc_feature (3603)..(3603): n is a, c, g, or t
  misc_feature (3605)..(3605): n is a, c, g, or t
  misc_feature (3607)..(3607): n is a, c, g, or t
  misc_feature (3609)..(3612): n is a, c, g, or t
  misc_feature (3616)..(3616): n is a, c, g, or t
  misc_feature (3621)..(3622): n is a, c, g, or t
  misc_feature (3625)..(3626): n is a, c, g, or t
  misc_feature (3628)..(3630): n is a, c, g, or t
  misc_feature (3634)..(3636): n is a, c, g, or t
  misc_feature (3638)..(3639): n is a, c, g, or t
  misc_feature (3641)..(3647): n is a, c, g, or t
  misc_feature (3649)..(3651): n is a, c, g, or t
  misc_feature (3653)..(3653): n is a, c, g, or t
  misc_feature (3655)..(3656): n is a, c, g, or t
  misc_feature (3658)..(3659): n is a, c, g, or t
  misc_feature (3667)..(3668): n is a, c, g, or t
  misc_feature (3670)..(3670): n is a, c, g, or t
  misc_feature (3675)..(3676): n is a, c, g, or t
  misc_feature (3678)..(3678): n is a, c, g, or t
  misc_feature (3681)..(3682): n is a, c, g, or t
  misc_feature (3684)..(3684): n is a, c, g, or t
  misc_feature (3686)..(3687): n is a, c, g, or t
  misc_feature (3689)..(3693): n is a, c, g, or t
  misc_feature (3696)..(3698): n is a, c, g, or t
  misc_feature (3700)..(3700): n is a, c, g, or t
  misc_feature (3702)..(3702): n is a, c, g, or t
  misc_feature (3704)..(3707): n is a, c, g, or t
  misc_feature (3712)..(3712): n is a, c, g, or t
  misc_feature (3714)..(3715): n is a, c, g, or t
  misc_feature (3719)..(3721): n is a, c, g, or t
  misc_feature (3725)..(3726): n is a, c, g, or t
  misc_feature (3731)..(3737): n is a, c, g, or t
  misc_feature (3739)..(3740): n is a, c, g, or t
  misc_feature (3746)..(3754): n is a, c, g, or t
  misc_feature (3756)..(3757): n is a, c, g, or t
  misc_feature (3760)..(3760): n is a, c, g, or t
  misc_feature (3767)..(3769): n is a, c, g, or t
  misc_feature (3771)..(3771): n is a, c, g, or t
  misc_feature (3774)..(3776): n is a, c, g, or t
  misc_feature (3785)..(3785): n is a, c, g, or t
  misc_feature (3787)..(3788): n is a, c, g, or t
  misc_feature (3791)..(3794): n is a, c, g, or t
  misc_feature (3797)..(3797): n is a, c, g, or t
  misc_feature (3800)..(3800): n is a, c, g, or t
  misc_feature (3802)..(3802): n is a, c, g, or t
  misc_feature (3807)..(3808): n is a, c, g, or t
  misc_feature (3810)..(3812): n is a, c, g, or t
  misc_feature (3814)..(3815): n is a, c, g, or t
  misc_feature (3818)..(3821): n is a, c, g, or t
  misc_feature (3823)..(3824): n is a, c, g, or t
  misc_feature (3826)..(3831): n is a, c, g, or t
  misc_feature (3834)..(3835): n is a, c, g, or t
  misc_feature (3840)..(3840): n is a, c, g, or t
  misc_feature (3844)..(3844): n is a, c, g, or t
  misc_feature (3846)..(3849): n is a, c, g, or t
  misc_feature (3851)..(3851): n is a, c, g, or t
  misc_feature (3854)..(3856): n is a, c, g, or t
  misc_feature (3858)..(3858): n is a, c, g, or t
  misc_feature (3860)..(3860): n is a, c, g, or t
  misc_feature (3862)..(3862): n is a, c, g, or t
  misc_feature (3865)..(3865): n is a, c, g, or t
  misc_feature (3867)..(3868): n is a, c, g, or t
  misc_feature (3870)..(3872): n is a, c, g, or t
  misc_feature (3875)..(3876): n is a, c, g, or t
  misc_feature (3878)..(3878): n is a, c, g, or t
  misc_feature (3882)..(3885): n is a, c, g, or t
  misc_feature (3887)..(3888): n is a, c, g, or t
  misc_feature (3892)..(3892): n is a, c, g, or t
  misc_feature (3894)..(3894): n is a, c, g, or t
  misc_feature (3898)..(3899): n is a, c, g, or t
  misc_feature (3901)..(3901): n is a, c, g, or t
  misc_feature (3903)..(3903): n is a, c, g, or t
  misc_feature (3905)..(3907): n is a, c, g, or t
  misc_feature (3910)..(3910): n is a, c, g, or t
  misc_feature (3912)..(3913): n is a, c, g, or t
  misc_feature (3915)..(3915): n is a, c, g, or t
  misc_feature (3920)..(3923): n is a, c, g, or t
  misc_feature (3927)..(3927): n is a, c, g, or t
  misc_feature (3931)..(3931): n is a, c, g, or t
  misc_feature (3933)..(3933): n is a, c, g, or t
  misc_feature (3935)..(3936): n is a, c, g, or t
  misc_feature (3938)..(3938): n is a, c, g, or t
  misc_feature (3941)..(3943): n is a, c, g, or t
  misc_feature (3945)..(3945): n is a, c, g, or t
  misc_feature (3949)..(3952): n is a, c, g, or t
  misc_feature (3954)..(3954): n is a, c, g, or t
  misc_feature (3956)..(3958): n is a, c, g, or t
  misc_feature (3962)..(3968): n is a, c, g, or t
  misc_feature (3970)..(3970): n is a, c, g, or t
  misc_feature (3972)..(3972): n is a, c, g, or t
  misc_feature (3977)..(3977): n is a, c, g, or t
  misc_feature (3984)..(3985): n is a, c, g, or t
  misc_feature (3988)..(3989): n is a, c, g, or t
  misc_feature (3993)..(3994): n is a, c, g, or t
  misc_feature (3997)..(3998): n is a, c, g, or t
  misc_feature (4000)..(4000): n is a, c, g, or t
ccaatgggagcgtgatacgaaggtcatgatcgtcgatcttcctgccatattggcagcggagatgacggcgattccgttcgattccgttcattgggcgacggtttctgaacgtctctgtctggcccatagcacggtccatcttctctcttccggactgcgtgctcctcccgttttcgtgtaacgacgcatgaaaaagtgcagtgcctgcgtgtactgtgtttttcctgcaacaggccggttgcccgatttgcaaccggattgcaagaatggaatattatttttgcatcatgtttacacaatcaacggaaaatcaaatgaaattcaagtatttagcagtattagtcttttttgttgcatcggcattcggcgcggctcgggctcagaatgtcaaaggtgtcgtatatggagccgacacggacgagccgctgatcggtgcatcggtgtactgggccggaacgacggtgggaaccggtgccgatgccgaaggaaattataccatacaccgggttaagggatacgatatgctggtcgccggcttcgtcggatataccagcgatacgattcgcgtcgagagcggcgtggagcgggtcgattttcgtctgtcgaacgacggggtggaactcgaggaggtcgtggtgaacagtacgctgggcggtaactacgtgaagcgggacggcattctcaaaggggagatgatctccttcgcgggcctctgcaagatggcttgttgcaacctggccgagagtttcgagaactccgcttcggtgacagtcggttacagcgacgccatttcgggtgcgcgtcagatcaagatgctcggtttggccggcacttacacgcaaatattggacgaaaaccgtccgatcatgcgcggtttgagtgctccctacggcctgagctatacgccgggcatgtggctcaattcgatccaggtgtcgaagggtatttcgtccgtgactgccggacatgaggccatcaccggacagatcaacctcgagcaccgcaaaccgaccgacgacgagcggctgttcatcaacttctaccttgacgacgaactgcgtcccgagctgaacctttcgacggcgcttcctgtaaccaaggataagaaattatcgacgatcctcctgttgcacggatcgttggatactcatttgntgggcgacatggacgacaacggcgacggatttatggatctgccgaaaacccgcctgggagcggttgcaaaccgctggctttatacggcngacaacggngcgcaggtgcgntggggnttcaagtatctggcggaaaatcgcntgagcggtcagaagcactacaaggcttcgatgcgtgaagagatggataccgactgggacaagggggccatgtacggctcgcagatcaagaaccgcgagctgaacgcctacttcaaattcggtatgccggtcggtcccggtgtctatgacgaggaccagcaggacgagcttcgttcgaacatcgctttcgtggccgattacgaccgcttccgcgaacgggcctacttcgggctcaacgattacgacggtacggacaacatggtttcgctgaacatgatgtacaaccactatttctccttccgtcattcgctgatcgtcggcgtgcagtcgcatctgcaattccttgacgagtcgctgctcaacccgacgccgtggctggatgccgccggagcctggaatctcgaccgtcaggagaacgaggtaggcgcctatgccgaatatacctacacgatcaaggacaagctctccgtagttgcgggcatacgcggggactacaacggttattacgataagttctacgttactccgcgcggtcatatcaagtggaacatcaccccgacgacgatcctgcgcggttcggccgggctgggttatcgttcgaccaacgtcatcaccgataatatcggcgttttggctacgggacggcatattacgttcgaaagaccgacggctctttcggcgggagccgccgctgtgcgcggacctctcaatcccggctctgcttacgggggatatacgacctggatggtcgcagacggcggtgcgggcaatttcaaagcgctcaaccggatggagaaagccctcaccgcaggcggtagcctgacgcagattttcacgctcgtgaaagaggaggacgcgacgttgagtttcgactacttccgcacgcaattttataattcggtgattgccgatcaggagtattcgccgaacgacatttatatttacagctcggacaaacgctcctttaccgatacttatcaggtcgatttttcgtggactccggtggagcggttcgatattttcgctacgtaccgctatacgaacagccgtatgacgatcgatcgtccggacggcagtacggcgctcgtggagcgtccgctggtaagccgttacaaggcgctgctcaacttgcagtattcgacccgctacaaccgctgggtgttcgatgtgacggctcagctcaacggtccttcgcgcctgccgacccagacgggcgacctggccgattccgagatgtcgccgacgtatccgatgttcttcgcgcaggtgacccgcaaagtcggcaagttcgatatttacgtgggctgcgagaacattctcgattataagcagaagcacccgattctgaatgcggacgatcctttctcggcgggtttcaactcgtcggtgatctggggacctctgatggggcgcaagttttatgcgggattgcgtatcaatttttattgattgaaagaacgaattaaattagttatacgacgatgaaaaaaatgattttgtgctgcctcgtggcagtattgggatgcggggtgttcgccgtggaagcgaagacgccgcagaagaagggcgagatcgttactacggtgttcacnntcgatatcgattgcgaaagctgtgcggcccgcattatgaacaacgtgccggtaatcggcaaggggatcaaggatattcaggtcgatgttccctcgaaagaggngaccgtgacctatgacagtgccaagacctcgcccgaggagctgatcaaaggattcggaaagatccggntcaaggcggaagaaaaacctgnnaaatagttatatatgggttagttaatttggatggagagccggggttccgaaaggaatcccggcttttttcgatcggcgaangtcccctcagggaagaggtanccgatcggagcaaaacggacggnatgcatccgtaannaangnannnnnnnnnnnnnnncnntngnnntttnnnanntttncnnnnnnnttnnngnngnnannnnccnnnnnnnnntnnnnnntngnaaannntnnnnnannttnnngnnncnnncccnnngnnngnnnnnnnntnnttnnnnnaannnnttnnnnnanncntnnnnagnaaanttngnnnnttttangnaannangnnnnnnnnannnanacncnnnncnnngtntannnnnatnnntnntnnnnnnnntnnnntattnnntntnngntnnngnnnnnnnnnnnnngnnnnnngnnnnatnnnnnnnnnnnnnnanncnnnngnntnnnnnnnnnnnntnnaatcngnanntnncnntnnnanantcnannntatnntntnanannnnagcnaatgnnaanncnnnctannntnngnnnnnnnannntncnntnnctatcatnncntgggnntnttnntntnngnnnnntannngntncnnnnacctnannccannnatcnnataannnnnnngnntcttcnnnnnnnnngnntanaatttcnnngngtnnnagggctgantnnagnnnnttnttntnatttnntnnnannagnnnngnnannnnnncannaaatntaantnnnncnacnnnangnantgngnntnnnttnntntttnnnntnnatgntnttgnntntntnnntangnntnggttnnnngatngtancnannanttnnnanatannnntngnnntatnnnnnnnancntgaantccaaanngtnncatnngtnncn

SEQ ID NO: 190 - DNA, 4000 bp, Escherichia coli
  misc_feature (2434)..(2434): n is a, c, g, or t
cggtatataaaggatctgaagccttctaatctaatggatatatcggccatgatcgccctgtaccggccgggccctatggagaacatagacgacttcatcgacgcgaaattcgggcgtaaagccgtcacctatccagaccccagcatgaaagaattgctggatgagacctacggcatcatcgtctatcaagatcaagttctgttgattttgcagcaattcgctggatacacgctgggcgaagccgatatcgtccgcaaagccatgggaaagaagattgcttcgttgatggctgaggaaagggaaaagtttgtggctggggctgcggcaaaagggtttgaagaaagcctggcaaccagtgtattcgacctgatagagcctttcgccggctatgcattcaacaaggcccacagcgttagctacgccctgatttcctattggacgggttatttcaaaacccactatcccttggagtatatggcggcggtgctgaattcccggctggaccatcccgaaaaaatcgtaagctcgatcaacgagtgtttccggttgggactacccgtgctgttgccggatatcaaccagtccgaggagttctttaccattgaccaggatagcggaccaacagccggcatccgtgttggtttggccgccgttaaaaccgtgggagaagctgccgtgcgtcccttggtggaagaacgtgaggccaacggcccctatgagtccatcgacgatttctgtcaccgggccggttccagggggctcaataggcgcaccttggagagtctaaccaaggcgggggctttcgacagtttggctacccgcggggccatgctggactccctagaccaaattgtcgcctttgcccaactggaggccaaaagccgaagttccggccaatctagccttttcgacggatcttccaacgatgatggagccggccttctgccaggcatcgaactgggagattccgacgttccccctgaggaaaaagccacttgggaaagggagttgttgggggtttccttgtcctacaatccgatgtggcaactggctggcctgaatgccggagacgcttttaactccttcgaccaacttgacgacgacatgcagggacaatctgtgtctttgctgggccatatctcagccgtcaacgaacggttcaccaaagaacagaaaagattcgtcgtggtaaccctggacctcctgggcggcgccgtggaagtagtggtctggccgaacgtattggagcgtacccaacaggtatggaccgagggtaagatattaagagtcacagggaaattgcggctccgcggggaccaactttccctggcctgtgatcaggctcaggagcacatgtctaatcaggcgccatcgaccggcggtaacggaaacggtattatcaatgggaatggaaccggcaacgggaaacacagcggaaatggaaactctaacgggtcgtctaatggacaccctcaaaccgcgcctgccagccgcccaaatccggagctcgccgccgcgaacgggggttcctatcggactttgtctctggccgtgacagaatcggacaacgccgttaacgacgcccacatgctacgggaagtcattggagttttgctggagtattccggccaagaccgggttaatctggacattcatacgctcaccgggcgagttatcatggacctgacgccggtcaacaccggttattgcgatgagctgagtgagcggctatcaagtttgcttggcgccggttcagtccgaatcaacggctcccaggatacggagtccgaatagacgcaaagttgtctccattggatctccttcctttccatttgcatcagatggcctgttcccctatttagcagacacctctcccatcggcacctcggatagccaactacctgccaacgcgcgcccggcttagtgagccgtggctattgcgcaaatgctgcctaggtgattccccacgcaacttacatcgtaatttttttaggcgatgttctacgatttactctgccatagccatacttttgcagatttaatccggatttcacaactggctgtgtgatttgactcaaagaccacgtagaaatgtatgaagaacgccaaaagttgaatttgacgggtaccggacgtgctgctaaactcgcccgagttaacgccaggttttacgccggtatagccaaccggcgggccactttcaattaaaaggtcttccccgaatctgacgttgacgttatcgttatgagagtatcttgtgtagagacgaagccagctttatccatgaaaacggtcttaactgaccggggactcccgtgctgcccgtctcttgaaaacaagtccggccgtctactcagatgttccctcccccgcgagccctagttacttcccttccgggtccgtcacgtaatcctgggcgcaattctgtgagctncctatccctttattccgcacggcagtttccatggattctttttatggcatccaaatcgggactacctgagacctcggcgctcacaactaagaaaacattggtgaaataacaaacatgaaggaccaatccagttcattggtggacctagacgcggagttcgtcaatgagttagctcggaatttttggtactcggcaatcttgcgagccgccataaaactcgacgtcttttccctgctggaaggggtcagtttgacttcccaggaggtggcttcgggcatcgatgcgtcgcccaggtacacccagtcattcctggattgttgcgtggtcttggaattgttggatagcgatgacgctaagtacaccaactcatccctcacctctaggttcctggtaaaaaataaacctgcatacgtgggggaccacgcccttcaccataccaatacttgggcctcgtggggcaggcttgacgagatagttcgggagggcaagacccttctgccttatgagactgggttcgttgacgcagacacctactggtccgactacatgattggccagcacaatcgggcgacttcgggtcaggcgcattatctggtggagagcctcgaccttagagataagcgtaagctccttgacctggggggtggagctgccagctacagcatagccctctgtgcgggcaatccccagttgaaggcagtggtggctgaccaaaaagagccccttgccattgccaaacccctggtcaaggaaagcaacctggaagaccgtatcaccctgctggaaggagattttttccagaccgatcttggtagcggttacgatgtcgtcctcatatctggggtcgtcctgataaagccggaagaagattctcgccaactgatcaagttggcatacgatctgatggaaccgggaggtctgatcgttatccaagactacatgaggatagatcacgactcacagcggaatcgtttggataccctggaagacctatacgttcttgtagctttcgatccaggcgccggcgaccgtgaaggggaagaagtagcggattggcttcaaaaggagggattccaaaatactgaattgattggattacccacccaactgggcgtggtcaccggggaaaaacccgcgtaggatcgtttcgatagattgtcaccggtacaagcttattaagattaacttgactgatttgggagattaatctcagacaggaagaggtggtataccatgattttggacaacaaactttcgcccttcgaacggctcaagtcgctacgggagtgcatcgaccgcaagggtttcgcccgcattatggaagctcacagcggcctgagcggcatcattgcggaaaatgtccgggtcgagaagaacggtcaagttttggaattcgacggtctttgggagagtagcctgacggactcagcctccaagggcctgcccgacgcgtctatcgtcggcaacgattcccgcgtccacaccatcaatgagatactgactgtcacgtcgaagcccctcatagtggatggcgacactggcggcgaacctgcccagttcgagtac

SEQ ID NO: 191 - DNA, 4000 bp, Escherichia coli
  misc_feature (1962)..(1963): n is a, c, g, or t
  misc_feature (1965)..(1966): n is a, c, g, or t
  misc_feature (1968)..(1969): n is a, c, g, or t
  misc_feature (1978)..(1978): n is a, c, g, or t
  misc_feature (1984)..(1984): n is a, c, g, or t
  misc_feature (1992)..(1993): n is a, c, g, or t
  misc_feature (1999)..(1999): n is a, c, g, or t
  misc_feature (2013)..(2014): n is a, c, g, or t
  misc_feature (2016)..(2017): n is a, c, g, or t
  misc_feature (2023)..(2023): n is a, c, g, or t
  misc_feature (2025)..(2026): n is a, c, g, or t
  misc_feature (2029)..(2029): n is a, c, g, or t
  misc_feature (3924)..(3924): n is a, c, g, or t
agagaaaaagcccgtctgggatggggatgtaattgaatttgggcgcggcgcggcgcaattgactttctgtgcgggggagaaaaagtaacgcctccctcattgtgctgatattactcgcccggctccaggtgacattcgttgtcacagggagccgggcttttgtatatttgcctggcttcgtagccagacgggaagcgccgggactcgcttttctcggcacgcgcgccgcatccgtgaacgcggtgtatcctggccgggaaacactatgaaagcggtagaacgcaccgaaagccaacgttgttgttggaattcgtaggattgttcctgttgcggttggcggagcggacgttgttctcattgttgttccacgagccgccgcgcagcacgttctccggcgtccccacatcatgaaaatgatgttatcaagtttgcggcagggttttcatccagccgcctaatagtttgccgatttccgtcaatgcttcggcggcaaaaagatattgcgcatgatcggtcagttttcggttgtgcgccagccgaaggtacaggcgcagcttatccagttccaggtcggcggccagcaaaatatgttttttattgccagatttcaccgcctgaatcaggtcttcgtaaaagtcgaacgcggcgtcctcgatgcgtttggccagccggaaacgttcgctcttgggatatttctctgtatgctgcaacagccagagcaaaaagttggatgttttcgtaaaaatcggggattgttgtttgtcattcatacttcacctgcatcatgaaagatcgcccggcgaagcccccaggtatcgccgtgacggatatgttcggcccatgcctgcgctcgaatgagcacatcttcccgctcaagcgctccgacgcgataatcagccgccaaatggcgcaaacggcggcggaaggcgtaacccttggcaggtttgaggcggcggtgatccggaaagacgatgaaaccaagaaatgtaatcccattcgcgcagggacgcggctgggcgctattctcgtggatggtcaggcgcagacccgctaggaattggataatttctgcacgccattgccgtaattcggtcttgttgttggaaaacagcaggaagtcatccacgtaacgcaaataggcgtgcaccttcaaccggcgtttcaagaactggtcgagttcgttcaagtagacattggcccaaaactggctggtgagattgccaattggcaggccgcgcggccggttggctgaaaaaagcgtatcacccggaaaatagaccatctcatattcttccgtcaaaatgccatctccgctggccaggattcggtcaatcaaccgcatcactttttcatctccaatggtgcgcgccaggatattatgcaaaattgcatggtcaatggatggaaaaaattgcttcacatcgcacggcagaacatatttgtaccgccgcatgaaatgggtacagcggtccagggcgcggtgtgtgcctttccccatttggttggcataactatcgaatatgaatttgcgttccaggggcggtccaataacattaaccaacgcatgatgaacgacccgatcccgaaacggggcggcagaaatctttcgccgtttgggttcatgaaccataaaactgcaatagccgcccggatggtaggtttcctcccgcaattcatcccgcagggaaatcagttccgcttcgaggttgtattcgaagtgcgccacccccggctggctgcgccgcccggcagaggcttttttgaaagcctgccaaaggttgaacaggtcatagatttggggataggcagcatcacattgttttgccatactcaaaatctcaaaaaatcgattcggggggcgcattgcgccccccgaacccccggcgcgagtcagaaaatcagaaaaccagaaaacaggattccagaaccattacggcgagagaacgcaccgaaagccaacgnngnngnnggaattcgnaggatngtccccgnngcggtnggcggagcggacgnngnncacatngnngtnccacgagccgccgcgcagcacgcgaacctccccggaagccggtccggttgggttcgatgatggcgattggctgtaataggtctcgccgtaccagtccgccacccactcccagacgttcccggccatatccaatgctccatacgggctggctccggagggatatgacccaaccggtgccgtgaattcatacccgtcattcacgtttttatctgcccaatccacattgagattgacatcggcaaaattcagcaggtttccggcaggactctgattgccccaaggataggtgcgcccatctgtgccgcgcgccgctttctcccattccgcctcgctgggcaggcgcgcccccgcccacccgcaataggcttcggcgtcattccacgacacatgcaccagcgggtgatcattcaagccggccagacccgaagagggtccctgcgggtgctgccaatccgctccggagacatcgttccagttagcgccatcgaaaacatatgaactacctttaccctctgcgtcggtctggtagcctgttcgttcaacaaacagggaaaacatggcgttggtcacttcggtctggtctatccagaaagcatccaaatacaccgtatgaacaggttgttcgtctgaactgccatcattgctgcccatcgtgaagttcccttccggcacgtaaaccatcagcatcccgtccgccgggcgcgtccaggtggagccgatgccgagggctggaggttgggttgccactggcgcttcagtttcaacaggcgcttccgtagcaaccggggcttctgtgacaatgggaggcgcgggagcaactggaaccacgccgccgccagccagcgcgaagatcagggcgattgccaacccgcctataattatcaaaccacctgccagtgcaatcggccagtagcgaagcaggccagatgaactggatggcgcaaccgtctgtatggagggcgcgcgcggcgcgggtttgtctttggcggtcacatcatcccattggttgatggtcgcctgtgtatccagcgtgcgttcgcgcgggcgcgcgggttgcggcttcgctggcgcggcaactccgctgagaatggattccagcgcgatagcaaggtcgctcatgctctggtagcggtcgcccggcttcttcgccagcgctttgagcaatatctgctcgacgcggtcgggcaaatccggcacaaactgcttcgggcgcggcaaaggctcgctggcctgtttgatgatcacccccagcggagtatctgcctcgaagggacgccgcccggtcagcatttcatagaaaacgatgcccagggcgtaaatatcggcgcggttatcggcggttttggcggaggcctgttcgggagccatgtactccggcgtgcccaccgccatggccgtgccggtcaagtccactgtggcctcctcttcgatgactttggccacaccgaagtcggtcagcatatattcgccggactgggtgatgagaatgttggagggcttcacgtcgcggtggatgacaccctggctgtgggcatactccagggcatgcgccaaggggatgagggtgcgagccgcttcctgccagttcaaccgtccgcgctctttgagcagtcctttcaggttgccgcccggcaagaagggcataaccaggtagggacggccttcgtactcgccgtagtcggtcaccttgacgatgttggggtgggtcagccgcgccagggccttggcttcacgctcgaagcgtttcagggcgcgcgccagcacctccggggtgaacttctcggtgcggataaccttgaccgccacgtcggtttcgaggcgggtatcaaaggctttatagaccaccgccatcccgccctcgccgagcggctcgaggatgtggtagcgaccgaggnattgaccgatgaggttggtcataatattctcctgctgttgcggatggtttcggttgggaggtggatgatgtgtatg

SEQ ID NO: 192 - DNA, 4000 bp, Escherichia coli
  misc_feature (127)..(127): n is a, c, g, or t
  misc_feature (133)..(133): n is a, c, g, or t
  misc_feature (145)..(145): n is a, c, g, or t
  misc_feature (166)..(166): n is a, c, g, or t
  misc_feature (169)..(169): n is a, c, g, or t
  misc_feature (175)..(175): n is a, c, g, or t
  misc_feature (178)..(178): n is a, c, g, or t
  misc_feature (216)..(216): n is a, c, g, or t
  misc_feature (385)..(385): n is a, c, g, or t
  misc_feature (498)..(499): n is a, c, g, or t
  misc_feature (513)..(513): n is a, c, g, or t
  misc_feature (517)..(517): n is a, c, g, or t
  misc_feature (559)..(559): n is a, c, g, or t
  misc_feature (622)..(622): n is a, c, g, or t
  misc_feature (634)..(634): n is a, c, g, or t
  misc_feature (637)..(637): n is a, c, g, or t
  misc_feature (666)..(666): n is a, c, g, or t
  misc_feature (685)..(685): n is a, c, g, or t
  misc_feature (706)..(706): n is a, c, g, or t
  misc_feature (709)..(709): n is a, c, g, or t
  misc_feature (711)..(712): n is a, c, g, or t
  misc_feature (721)..(721): n is a, c, g, or t
  misc_feature (736)..(736): n is a, c, g, or t
  misc_feature (742)..(742): n is a, c, g, or t
  misc_feature (745)..(745): n is a, c, g, or t
  misc_feature (760)..(760): n is a, c, g, or t
  misc_feature (775)..(775): n is a, c, g, or t
  misc_feature (780)..(780): n is a, c, g, or t
  misc_feature (790)..(790): n is a, c, g, or t
  misc_feature (796)..(796): n is a, c, g, or t
  misc_feature (802)..(802): n is a, c, g, or t
  misc_feature (823)..(823): n is a, c, g, or t
  misc_feature (825)..(825): n is a, c, g, or t
  misc_feature (829)..(829): n is a, c, g, or t
  misc_feature (832)..(832): n is a, c, g, or t
  misc_feature (835)..(835): n is a, c, g, or t
  misc_feature (838)..(838): n is a, c, g, or t
  misc_feature (844)..(844): n is a, c, g, or t
  misc_feature (853)..(853): n is a, c, g, or t
  misc_feature (880)..(880): n is a, c, g, or t
  misc_feature (883)..(883): n is a, c, g, or t
  misc_feature (888)..(889): n is a, c, g, or t
  misc_feature (904)..(904): n is a, c, g, or t
  misc_feature (907)..(907): n is a, c, g, or t
  misc_feature (919)..(919): n is a, c, g, or t
  misc_feature (934)..(934): n is a, c, g, or t
  misc_feature (940)..(940): n is a, c, g, or t
  misc_feature (955)..(955): n is a, c, g, or t
  misc_feature (1018)..(1018): n is a, c, g, or t
  misc_feature (1036)..(1036): n is a, c, g, or t
  misc_feature (1048)..(1048): n is a, c, g, or t
  misc_feature (1060)..(1060): n is a, c, g, or t
  misc_feature (1063)..(1063): n is a, c, g, or t
  misc_feature (1066)..(1066): n is a, c, g, or t
  misc_feature (1078)..(1078): n is a, c, g, or t
  misc_feature (1114)..(1114): n is a, c, g, or t
  misc_feature (1117)..(1117): n is a, c, g, or t
  misc_feature (1171)..(1171): n is a, c, g, or t
  misc_feature (1174)..(1174): n is a, c, g, or t
  misc_feature (1184)..(1184): n is a, c, g, or t
  misc_feature (1262)..(1262): n is a, c, g, or t
  misc_feature (1294)..(1294): n is a, c, g, or t
  misc_feature (1326)..(1326): n is a, c, g, or t
  misc_feature (1339)..(1339): n is a, c, g, or t
  misc_feature (1363)..(1363): n is a, c, g, or t
  misc_feature (1383)..(1383): n is a, c, g, or t
  misc_feature (1449)..(1449): n is a, c, g, or t
  misc_feature (1468)..(1469): n is a, c, g, or t
  misc_feature (1471)..(1471): n is a, c, g, or t
  misc_feature (1473)..(1475): n is a, c, g, or t
  misc_feature (1477)..(1481): n is a, c, g, or t
  misc_feature (1483)..(1483): n is a, c, g, or t
  misc_feature (1488)..(1489): n is a, c, g, or t
  misc_feature (1491)..(1491): n is a, c, g, or t
  misc_feature (1494)..(1495): n is a, c, g, or t
  misc_feature (1497)..(1498): n is a, c, g, or t
  misc_feature (1500)..(1500): n is a, c, g, or t
  misc_feature (1508)..(1508): n is a, c, g, or t
  misc_feature (1645)..(1645): n is a, c, g, or t
  misc_feature (1933)..(1933): n is a, c, g, or t
  misc_feature (1945)..(1945): n is a, c, g, or t
  misc_feature (1948)..(1948): n is a, c, g, or t
  misc_feature (1954)..(1954): n is a, c, g, or t
  misc_feature (1974)..(1975): n is a, c, g, or t
  misc_feature (1984)..(1984): n is a, c, g, or t
  misc_feature (1986)..(1986): n is a, c, g, or t
  misc_feature (1992)..(1993): n is a, c, g, or t
  misc_feature (3239)..(3239): n is a, c, g, or t
  misc_feature (3750)..(3750): n is a, c, g, or t
tctgcataaatccctttgtacataatcaccgatattttaatcgggatcggttatcttataaaagcatttaccccggtcaccgattggttgtttaataatctttgccgaacagggttcatccaacacnacatcnttcaactgtttnataagagcctccgaaccggtnaangtgatntgntccacccaatccatttttggagaaccgtcatcatcagngagcaaagctccggtcttgtcctttacctgctcgtagatgtcatactggatgatcaggcattcacccttgtacttggaggcttttatctcgaagcctttcaggtggatttccctgttcaaaatgtcatcaatgtggtacttatctcccgtgagattaccactgctgttngttacttcactgaatgttttcatattgagagtttttaataaataaatactattgcaatgctgcatgaaccccaaccggctggatgcctttatccggatctcctcatcgctcannccacgttttcgtantttngccacctcccggcagaggtttttcttgttctgcttgcgggcnaggcaataatcatggaacgtcacgtatcccacgtaattgacacccctgctctctaccgggaanacctgataattnggntttatactcaaagcacgttcattattcangtagtggttgataaacacnagggttccgtggagtttctcnttntnnccatccagnaggacaatatcatcngcaaancgntaatagtaccggatncccatttcttctttnatganatgatccagntcgganaaatanaggttagcaaagaattgggananatanttnccnatnggcacnccgttctcngccgagtccacgataccgtcaagcaangcnagcanncgggcatctttcagnttncggcggattacntgtttcatgatctcntggtcnatactcggataaaanttgcgcacatcgattttcaggcagtaccgggttccctccggatccgctttcaaatcacggcgnagcttgtataaaagaggntgaataccacgnccacggatacangantangtatcacgggtnaaattggagagccatatcggttcaatcacctgcatnatngcccaatgaacgacacgatcacggaatggcagtttgaatatcttccgctctttnggntcgtaaatgntaaaagtcttgtactcggaggtgcggtaagtaccggtgataagttcacgctggagctgtaataggttcgcctccaaangggagccgtactctattacttcgcttcggcgngttttgtgacgggcggcgttgtgaaacgcctnttcgagattgccntattcgacaactcgttcaaacaantttccataccttttcatggnctgtttctgcggttctgagtgtctgagtgtctgctttgccttactcggaagcgttcgaaccgttancggcctaccagcgtccttnngngnnntnnnnntnttttnncnagnngnnangtctttcnccccatctaaccgtttcctaactgcaaagtataggggagcggacacattcgcattcgaattcgaggctgcattgttcgtattcgtagcaaacgcccctgcattcgtgccattgttagcgttagcaccggagaggcgnacacgaagcctgcgtcacactaagggtaaaacaacctgttaaacttggtttaacgatgcaaagataagccttttaaatacatttacccaaaaccggcaaaaaaatcacaaaaatcgactcgccttacggcgagttctgaaacccgccgaacagcttttccaaaactctcaatacaaaatttcaaagaacgttcttttcctctttccgttttccgttttcgttttaagccgacatcaccggatccgcatcgaaaaagcagaggggagcggacacattcgcattcgaatncgaggccgcatngtncgtatncgtagcaaacgcccccgcanncgtgccatngntagcgnnagcaccggagaggcggacacgaagccctttggatgatgctgaattctcccaaaaatagtcacagaaataagtcgaggcggtcgctccgatttcggtcggcatggcgcaaagcaagtagtaacttttctgtttgatataaccgctggttctcggaacctcgcaaaccttgataaggccggaaatcgaattgtcatcataaccggcataaagggacggggcaacatagacctcagatttctcatcacccacgttatcgataagcccccggacaatcttccaaatatgaccgaaaggatgtttcaggccgaagaacaccggaacctttgctgcataatgcaacgagccgtcctcctttagcacgttaaacgtggtttcaccgcaaccgtcacccagctcgataccggcagaggtcggaacaaccgggtaataaccccactgatcccaattcggcatattggtggttccggatccgaggccaccctgatacaaaccgttgctgtccttttcagcaatcacggcctcctgcatattgcgggttccgaatatgatcatgaaaagaatttcaaccaccgcctgagccacgtaccagttggcatcccaaccctcgccacgcttgcgggcataagttgaaaaattacggtactgcatattggttgcaaccatccccaactgcgtgcggtaagtcccgtcccggcttgcatcattgtttccaccacgatattgggcggcatcactcacaaccgaacaaaggatattgttcgtcctgtccatcacgccaccaccgagggcggaaaggccaccggcgggaatatacacgcactgtttgcctttgatgggagaaagggaaacggcataatatttcaaattacccactttccactcggcaaaataaaaaccaatattccaacaccacatatactgtcccatcgtgccgtccagcttcgccggtgtaccgtcctcgaaacggtagtggttcgtgggatccagcttgcgccgggtacggtcatcctgaacgaggtaacaaccaagtcccaacagctctggcagcttgcggagcatatcgaggctgccgtgataaccggcagcccggtacgtggaattcgattcattccaataacgtccacaaacggcgtttgcggcggtggtaaccgcctcggacaaattcataactttggactctccgtccgtgtccagcacctcgatgcgcatatcgctcacgctgccggaggcagtatcgagttcgctnatcttctttccggcttcaaaagccgaaagcatcgctaacacacgggtttcctgatcgcttgtcatatttatcaagtttttaagttaaacgtattctgcctttactgtcaatccggattttaccgcctccggtaaggcggacggacggagcctgaaccgtcacgtttatggtcttgtacaagtgggtggcctgtgtcgggatcacgtgaatccggctcgttccgattttcaacggggttacaacaccggcgggatccacgctcacggccacgtcatcacccaagaacaaaacattctgcagggagtacgaggggaacatcttggcaacgatacgctgaacgtaaggattacgctgggtgatgcgtttcgtgtaggtcagttccatcctcgtaggagccaatgaagctgcacccgatatggattcctgcagctgcttcatcttctcgatttcggcctctgctgtggtggccgtactactcgcacgggcggcagcggcaagggcttccgatttngccgcatttacagagctggcctccttattcgccgtatcagctgcggaggacgctttcgtggcggcatttgtggcattggaggcagctccgttggccgattccgtggctttctttgccgcttcggtagctgctccggcagtaccggcggcatcattggcacttttggcagcattattggccgctgtggttgccttatccgcattacctgcagacgtgttggcttttgctgcggcttcattggcggctttcg

SEQ ID NO: 193 - DNA, 4000 bp, Escherichia coli
  misc_feature (1989)..(1991): n is a, c, g, or t
cggcgttgaacccatggttaggtaacctttggaaggtgatgcgggaagcgtgccctttgcctatagacttgaaagatccaacggaccaggaaattgcaaatgctccgctgccagattctcgattcatggttgacattgttgaacctccaagcagtacatctgagcgaccacgttatgaacgcctcactgaagcgcagcaagcgctacgactggcagtcgcagcagctgatgctagcgacgcaggaacgtcgttctcattagaagattacaacttaaaacagcgctgtagaggatgtgtctacgacggaattgtggtggagaataagagtttgacaagtcaagacgcagtgaaagaggtgcgtcatttggaatttaaaccgcaagaagcttgtgaattagcatatgaggctggcgatattttgggaatcataccactcgcggtagacgtcgattgtcctaaacttctatcgctcatcggacgtttggggatggaccccgagggatgggtacgtgtgtatccatcttccacacctgaaatgaaacactcggtgccgtctgttcaagtgaaatatctcatagcaggcgcaattgatattgattcagcgtcaccaagacgttatttctttgaagtcatgagtcactttgcgggttcgtcactcgagcaagagcgtcttcagtattttgcttccgcggagggtgcggtggacttgtacaagtacaatcaacgtgagcgtagaacagtgtttgaattttttgatgatttcccatctttgagcccgtctatggcatggtttttgcaagttgcgccaagtttaaatccacggtattattctatatcatcatcaccgttcgatacagcgagcacaggtgctgtgcacatcaccgtcgcttcggtggcttggacaacgccgatgaaacgtcaacgtaaaggcctgtgctcagcatggttggcttcattacgcgtgggtgataaagtacagtatacgatcgaaaaaggatcaatcactttgccgccacaagatgttccattaatattggttggtcctggtacaggaatcgctccatttcgatcatttactcgagagcgactgcgacaaatagaagtcactcgttctatagagggccatgaaaaatctacgtgggcaccgacgctgattgttttcggttgccgagatgcccatcgcgattacttgtacaagaatgagtggaagtcggtaggaggtgatttagcgctcactggtgcgagcggtttgggtggtgtcgtcgttgcgttttctagaatgcaggataaaaaatattacgtgcaagattgcatcaaggatgaatctaaacgtatatgggcattgcttgaatcaggcgcgaaggtgtatgtcgctgggtctgcggaaaagatgccagcagcagtgtatgatgcgtttcgtaacgtcgtgcagactcaaggttcactgagcgacgatgaaagcgcgcgatacatgattcgtttaggaacaagtggaagatatttcgtggatgcatggtagaatcttttgtagaacgtaaaacaaaacatttagacgagttgcggtacgtcgcaattgtgatcgtagtatcttgtgatcaatcaacgaagcgattgaagaaaaatctcatcgactcatcgaggatacgtgcagccttcttgtttaacttttttcagcacagatgtatcgattccgagagattgcgcagcggatcggatttcatctgcgtctgcaagtggattacgatggaataaccacaatcctcccgatggttcgcacgaaccgtcagatttaagcttcgtcaatggaccgccgctaatgatcgcccaagagtatccctgtgcttcaaattctggagtgccgggtattgtatctgttgccacgacccaataaggtccgtaaagacgttttggtagaaattttgggccaacgagaagtttcgcgggatttgaagggtcttcaacaatgccacgaagtttcatgtagcctnnngcattccgcggcgttccattgacactgtcccgtacggcggtgttccaaacttcaatttcgtcgtcgtcaacaagcgtgtagtttgcacgcacgcaaaacaaatcgcgttcaggttgataccaggttgttttttgttcgagcacgtaccattccgcgctcacgtacgagttcaaatcgaatggtgacacgggtttcacattcaagcaatatccccgttgtctcgcaggctgagcgttggcgtcatcggcgtcggcgtcggcttgcgcgcacgccatcgcggtcgacgctaacaagatcaaaagtgcacgagtgagaatgaagtgctgcatgtgggtgcgtcgttgatgtgatttctgtggattcttgcgtgcttcgcaccaccgtcgtcgcgttcgagtatgaagcgaaacgtcacatgggaccgacaaaaaaccagcggtctggcggtggggtggtttgtgtcgttgtgacttgcaaacgacgacgacggcggggcgcgcgacagagtgcgacgacgagaacgaggactatgatgacgatgacaacgcacgcgagagtgacgacgcacgcgatgatggcggcgcggaggtacgtatcatacgcacacgtacctggcgataacgacgagctgacagcgattgggaccgatggattgtgcccgacgcgcgttggcctaacctttcgtatttattcgtcgtcatcacacagtttaaagacgaagcggacgcagatgactgcgaatggtgatcgcgtgggtgttagagttcgcgcgagcgcgaacgcctcctctgagcccgtggtgatttccctcaaggtggatggcatgatgtgcgacggatgcgctgagagtgtggagacgtgtttgaagaaagcagaaggtgtgagtgtgtcggcggttgatgtaaatttagacacgaagatagtcaaagtgagcgtggactgcgcgagtgtcgtcgaagggttgacaaagcttcccgcgcttgtcgaagccgtccgagcgggtggatttgaggctgaacccgaatttgattaatacacttgaatataatacattatcataccgcaatgtcacacactagactgatcgtcgtcactgcagagattctggaatgcgttgatgagggctggagagggcgatgcccgtactaatcgggacggagttgacgaaagttctctctcttggtctttggattcaggctgctgctgctgctgttgctgctgctgcgttaaaatgttagcgaaactctgctgcagcaaatcttccattttttgtgacaaactcgccaccgatgcgttcaagtgtgagagtatccgactttccatgtctgcgagcgcgcgctgcaacgcgtcgtcgccactttttgtaagcggtggtgatatcgagggtgaatcctcttctccgtctcgatcgtcgtatgtttcgtgtcgcccacaaatacgataattatcatcatcttcctcatcgactttgaggttcggtaaaagtgtctggagtaacaccttccctgacagcgagcgcgattgcgaaggacaaccatcgccgtcgtcgttgccaacagctctcttcgtcgtcctcatcggcgttgtcgtcgccgaggataacccagctagaatatgcaaaagcggcgaatcacaaatctcggatgtaatcggtggcgtcatttgacgcgtgccaccgccgccacactccggtgatgttttccacggagttgactgatgtggcggtggcgtgctcggcggtggtggcgccgtggctccgacgaatcgcggtggtgtcgccacgtccatcatatcgcacccgctgtgcgtggcaataatattttaaattcgtcgtgtcgtggcgcgtcagtcgcggcgggttctcaccacacacgcacacccccgcttggagccgagacgaaaacgctcgcaccgacgtgcgcgttacgcctgtacgcgtcgcgacaagatcgctcggacgatgcgcgtccgtcgaatatcgatattaagtattttgtatgctacaaagg

SEQ ID NO: 194 - DNA, 4000 bp, Escherichia coli
  misc_feature (1939)..(1940): n is a, c, g, or t
  misc_feature (1945)..(1946): n is a, c, g, or t
  misc_feature (1948)..(1949): n is a, c, g, or t
  misc_feature (1957)..(1958): n is a, c, g, or t
  misc_feature (1973)..(1973): n is a, c, g, or t
  misc_feature (1978)..(1979): n is a, c, g, or t
  misc_feature (1984)..(1985): n is a, c, g, or t
  misc_feature (1987)..(1987): n is a, c, g, or t
  misc_feature (1999)..(2000): n is a, c, g, or t
  misc_feature (2005)..(2006): n is a, c, g, or t
  misc_feature (2011)..(2011): n is a, c, g, or t
  misc_feature (2014)..(2014): n is a, c, g, or t
cgtaatttactgagtaaatacggctatttgtccgtagaaatgcaaaatgccatcaccaatgactacgagggtgacgaaacttcacagcgtgaaatattgaccgacaattacgcaaacaaacagttgattgatgcggaagatgtgagctttgaaagcgtgtcaagcgagcaacaagcggaaactattgaccccggatattgatagcgtatgaaactgatagttcttggttcaagtagtagtggcaactgttacattttggataacggtaatgaagctctgattatagaggctggaatccgtttccaagaagtcaagaaagcgttggatttcaatctgagaaaggttgtagggtgtgtggtaacgcacgcccacaacgaccacgccaaatatattaaggcaatggtggatagtggatttcacacgttggcattacgggaggtatggactgcaaagggcgtttgggattcccgttctttggtggttaaagagggcaaaggctataagatgggtaattttaaggtacttccttttcctgcttgccatgatgtgccatgtgtcggctatctgatagaccaccccgatatgggaaagatggtatttcttaccgatagctgtatgtgcgaatatcagttcaaggggcttaaccatgtgctgatagagtgcaattactctgataagaagctcattgaggcgattacagccgggcgcacgttgccctcacagcgtgaacgtctgcttacctcacacatggagcttactacgtgcaagggttttttggaagcaaacgacttatcccatgtttcggaaatcgtgcttttacacctttccgagaataatagcgatgagccttatttcatatcggaggtagaaaggcatacggggaaagtggtttatgcggcaaagccgggtttaacgattgatttagacagaacataaggatatggctaaactccaagtagaaaagagaaacgggttatttgatttgaagcctctatacgaatggatgcgtaacgctttggatggtatttataggatagaggttaagaaagtcagaaagccacgttctttagaccaaaacgggtggttgttcgggtgtatttaccctatccttttagacgctcttttggaagctggttgggagttcgtttcagtagaacaagtgcatgagttttttaaggctcaaatgacggctgacaaagtggtaaataagcacacgggggagattatagagttcccgtgttctacagccactatggacacggtgacattctccacctattgcgaaaaactgagggagtacgccaaagagtttctgaatgtggatattcccgacccggataaatattggagaagccatgaaaagaatacctaacagcgtggtatctgagctgatacgcttagtgcccattttgatagcaaatattccacccggacaaagtacgagagtggataacgcaataagattaacaaagaagattatcaacaaattaaaaacattgaaagatgaaagtagaaattgaagaaagcaagttgcaaacagcttatgcaaatgcttgtgatggagttaaggattttatggaaagcctgtttggaaagaaggtgtttgaggctgcaaagcccacgttggacgattacaagactatccgcacgtatgaggatgcttgtgtggcgttaaaacaagatgcaataagagtggatagtgtgaatagagatactaccacagttttaaccaatggaggtgatagggtaaatatgccatcccatattgttgctcttatgaaattagaaactattagtcgagctttgtggggtagagatttccagccaaagccggatggagagggaagcaaagtgtattggtatccgtggtttgctttgtatactaagaaagaaattaatgatatgtatcccgaacaaagaggtgcccttttgtctgctnntgcgnntnntggtgcgnntgcgggtttcggttntctgnntgcgnntnatcgttcctcgnntgcgnntgcgnacnttgggttccgcttgtgccaagaaacagaagaaaaggctaagtatttcgggcagcaattcattgaactttgggctgaatatttgaaattcaactttaccgttggaaatcgcttgaaataaaagtgtgtttattaaacatattattaactaaaaacaaggtgaaatgaaagacatcatgttagccgataccccggtggaacaaagggcacagattctacgtgatagctgcgaccaaattgtagagcgtagctacacacgcaaattcgaccaagaagaaatcaacgaaaggagggcagacctcgctaacgtggcgattcaaaaggcggatttggaacaatcattagcggaaatcagagccgattacaaaggcaaaatcaagcctttggaggaacgcatagttaaacttcgtgacgaactgaaagctgggggcgattggattaagggcgactgtttcaagtttgtagatgaggaagaaaaaatggttggcttctacagcccggagggttatttgctggaacaacgccccatgacacaagacgaaaggcagcgtaacgtgttccgtgctatccgtgcggataaaacgggtacagacgattaagtattaataattaaaacatttcaaaatggaaaatcaagaaaaaggattaaccgtgaacatcggtgagtacaagggtgaaaaacctatcgaagtagtgtacagaattggtaatgctcctaaagcattggacgaattgcccattaagcaaccggaaagtatttctgtatcaggtgttatcagaactccgttagattggttggaaaagcgtattgacaccatcgaccaaaagcgtgcgaatattaaggtaaaccgtgagaaaatgagtatcacgcttaccgtgaatgaggatgattattacaccaaaaacacctttgtaggtacggtggaattatcggaagtcttttcaaagttcggtatcaatgacggagaatgtggctggattccggctaaactggggcagttcctgcgtttgaatcgtggcgtattcatgcaaaaagaggattgtatgaagctcgtttcggtattaaagaacttcacggctaacgccaagacagaaattcagaaacagcgtgacccgtccggctctatggctgaggtgtaccgttcacaagtagaaagtaatttgcccaagagtttcacgattaacatcgccattttcaagggaactgcaaaaacacctattgaagttgagttcgaccactatctttctaatggtgatgtgttgttgcaacttgtttcgcccggtgctaacgaactggcagaggactatagagataagtgtattgacgaggtgttagacggcattcgtgccattgccccggacattgctattcttgaaatctaaatactatatcgtgggggagaaatcccccacttataacagctcataatatggctaataaaaaaatcataccgcctatgcctttcgatgccaccgcttggttatccaacaatgcggctatgaggttgtcatttgcttgtaagggcttgtggctggatatgctttgctgtatgtgggtgagtatagagcgtggggttatgatgaaacctattggcggtgcgtacacggttgatgaattagaagccctctacggaagtggaacaaaggagctgatagaatcattgattaacgctgaattattgtctgtaaggaatgatggggctttgtacaacgctgatatggttaagatggaatcaatacgggtaaaacggtctgaggctgggaaaaaaggtggtgtaactatgggtaaacggatattagccaaagttgatgcgcttgtggaaacgccaccgacagaaatgccacatacaccttccccaacggctgaaacgcaacacggggcgcaagcagacctatttcccgatgatttgccggagaatccaccgccactgactgatgaacaacagcggaagattgcaaaagccaagaagtacaattatgctgattac

SEQ ID NO: 195 - DNA, 4000 bp, Escherichia coli
  misc_feature (773)..(773): n is a, c, g, or t
  misc_feature (1623)..(1623): n is a, c, g, or t
  misc_feature (1672)..(1672): n is a, c, g, or t
  misc_feature (1942)..(1942): n is a, c, g, or t
  misc_feature (1952)..(1958): n is a, c, g, or t
  misc_feature (1960)..(1962): n is a, c, g, or t
  misc_feature (1964)..(1965): n is a, c, g, or t
  misc_feature (1967)..(1967): n is a, c, g, or t
  misc_feature (1969)..(1970): n is a, c, g, or t
  misc_feature (1972)..(1975): n is a, c, g, or t
  misc_feature (1977)..(1989): n is a, c, g, or t
  misc_feature (1994)..(1995): n is a, c, g, or t
  misc_feature (1997)..(2002): n is a, c, g, or t
  misc_feature (2005)..(2009): n is a, c, g, or t
  misc_feature (2011)..(2012): n is a, c, g, or t
  misc_feature (2014)..(2019): n is a, c, g, or t
  misc_feature (2021)..(2025): n is a, c, g, or t
  misc_feature (2029)..(2029): n is a, c, g, or t
  misc_feature (2031)..(2033): n is a, c, g, or t
  misc_feature (2035)..(2036): n is a, c, g, or t
  misc_feature (2038)..(2038): n is a, c, g, or t
  misc_feature (2040)..(2042): n is a, c, g, or t
  misc_feature (2044)..(2048): n is a, c, g, or t
  misc_feature (2361)..(2361): n is a, c, g, or t
  misc_feature (2529)..(2529): n is a, c, g, or t
agcggcgtcgtggccgcgtggtcgaggtagacgctcacgcctgggagcgcgcctcctcgatgatcgccagggcggccgggaccacctcggtgacgtcgccgaccacgccgaagtccgcgatctcgaagatcggggcgtccgggtcgtcacacacggcgacgatgtgggcggcggactgcatgcccaccgtgtggtggatcgcgccggagacgcccaggccgatgtacaggttcggggtgacggtcagaccggtctggccgatctgctcggatcgcggggcccagccctcgtcgcaggccacgcgggtcgcgcccacggcgccacccagggcgtcagccagggagcggaccagctcaaagtcgccgtcgacgccacggccgccgcacacgacggtggaggcgtcggtcagggacacgccgtcctcctcgtctgccacgaaggacacgacctcaaccgccgctgcttccgcgctcagctcgacggccaacggctcgggggtcagggaggcgggcgaggccaccggggcctcgtcaatgacgccggaggaaatacccacgatgggggtctggccctccaggacgatgcccatcgaccaggagccacccagggcggtcttgccgacctggaggacgccaccgtcgaaggacacggaggaggcaccggagatgacgccggcctcggtcagggcggcgacgcgaccggcaatctcgcggccacggtagtccgagcacagcagcacgaggccgtaggagtcggtgcccagcgcggcgatnaccgcgtcggaggcggccacggaggcgtgaccggccggacccaggtcggcgtgcagcacgcgggtcgcgcccagctcggacagggctgccacgtccggcgtgggggccacagacagggcgacgacgtcggcggaggtcagggaggcggccagcgtgaccgcctggcgggccagggacgtcaggtgcgtcccggactggtcggccaggacaaggatcggggaactcatctgctgcgtcatgtcacttcaccaccgaaagaatgtagtcggccagcgcacgcccgccctcgccggcgtcctggatgatcgtgcccgaaccgtcgcgcacgttctcctcgctgaaggtcacggaggtcagcgcgcggcgcatcaccagggtttcgccgccgggaacctcgacgaggtcgtcgatgccccactggtccaggggcttcttgcgcgcggccttcatcgccgcgaaggccgggtagcgcggctcgttgatctggtcggtcacggagacgacggcgggcagggccgcgcgcagcgtctcggtaaagccgtcaacggagcgttcgatcgtggcgacgccgtcctcgacgctcagcgtgcgggccaggcccagcaacggcatgtgggccttggcggccagggcgccgggcagcatggaggtcatcgcgtcgagggacgccatgccggtgacaaccaggtcgacggggccgcactcgtcggagatcttcgcgatcgcgacggagagcacggaggccgtcgtaataacgtcggagccctcgaggaactcgtcagaaaccaggaaggcgcggtccgcgcccatttgcagggcgcgcatgagcgcgtcctcggcgtcctcgggncccatggtcagggcgatgacctcggcctcgcggccagcgtcctcttcgntttccttgagctggaccgcagcctcgatggcgttctcatccagttcgttgagcacatcgtcctcaccgcgcaccaggcggccgccctcaaaacggcgttcggactgcatgtctgggacatgcttcacacacacgacaattctcatggcttctagcgtgccacattcctggcccctcgcccatatgagggtcacctcaccggcgcacaccacagtccgcgcgcggggcaccctcctgtgtgtgcgcacgttctatgcgccttcccataggnctttttcccnnnnnnncnnncnncntnntnnnngnnnnnnnnnnnnnggggnnannnnnnttnnnnngnnannnnnncnnnnngggntnnncnngnannngnnnnnttttatgtccgagcgatccggctcgtcccctgctcccacacggcgcgtcaccgaacctaacccgcagcccacccgcctgggcgtctacccgtcgggcgacgggctcgacgtcgcggtgatcgcgcgcaacgcctcgggggtggacatgtgcatcttcgacgaggccggggctgagacgcgcttcgctctgctgggtccgaagaccggcgtgtggcacgggcacattccgggctacggtgcgggcacacgctatggattccgcgcgcacggcacctgggacccggacggcggcaagttctttaactcccacaanctcctgctggacccctacgggcgcggcgtggacggattcgtggacatgaagcccgccgtgtacgcccacagcgtggacgaggatctgtacccgtcggaatacccgatgcgtcgctcccccatcgattccgctccctacatgccgcgctcggtcgtggtcgagccctcnttcccgatcatcccccagcccgacatcccctgggagacctcggtcatctacgagatccacgtcaagggattcaccaagaacatgcccggcgtgcccgagcctctgcgcggcacctacgcgggcctggcccacccggcgtccgtgtcctacctcaaggacctgggagttacggccgtggagctgctgccgatccacgccaagtgcgatgagcctttcctcaccgagcgtggcctgacgaactactggggctactcgacgctgtccttcttcgcgcccgaaccctcctacgcgaccgccgactcgcgggcccgcggtgcccaggccgtcgtcgacgagttccgcggaatggtctccctcctgcacaaggcaggcattgaggtcatcctcgacgtcgtctacaaccacacctgcgaaggcggagacgcaggcccctccctgtcgtggcgcggcctggactccgacatgtactaccgtcacacgaactcgcgcccggttcagagcatcgacgtgaccggcaccggcaacacgatgaacatggacaatccccggactatccagatggtcctcgactcgctgcgctactgggtgcgcgacatgggagtggacggcttccgcttcgacctggctgcgacgctggggcgttttgccaccggctttagcccgatgcacccgctcctcatcgcgatggccacggacgacatcctggcccgcaccaagctcattgccgagccttgggacgtcggccccggcggctggcaaaccggcaactttcccgttccattctccgagtggaacgaccactaccgtggtgccttgcgtaacttctggctggcggatgtgcgcgcccaggcctcgggccacatcgtgttcggccccaacgacctggcgacccgcttgtccggatcccgggacgtctttgatcatgggctgggtcggctgcgcggaccgcgcgcctccattaacttcgtgaccgcgcacgatggcttcaccctggcggacatgaccgcctacgaccacaagcacaacaaggacaatctcgagaacaaccgcgacggctcagacgataaccgctcgtggaaccacggcctcgagggaacgctcgcgtcgggcgcgacccaccctgattccgcgacgccctaccgaatcctggccaacatgccgatcgcgcagctgcgcgcgcgctcgcagcgcaacatcctggccaccatgttcgtctcctcgggaacgcccatgctcacgggcggcgacgagttcggacgcacccagtacggcaacaacaacgcctactgccaagacggcccgatctcctgggtcgactgggacctggccgagggccagcaggcccagatcgacgccgtctcctggctgatcgccctgcgcaaggcgcacccggtgctgcgccccgactccttcgcgaccgggcgacccttcggcggggactccatcgccgacctgtcgtggtacaccgccc

SEQ ID NO: 196 - DNA, 4000 bp, Escherichia coli
  misc_feature (1950)..(1950): n is a, c, g, or t
  misc_feature (1956)..(1956): n is a, c, g, or t
  misc_feature (1962)..(1962): n is a, c, g, or t
  misc_feature (1968)..(1968): n is a, c, g, or t
  misc_feature (1974)..(1974): n is a, c, g, or t
  misc_feature (1980)..(1980): n is a, c, g, or t
  misc_feature (1986)..(1986): n is a, c, g, or t
  misc_feature (1990)..(1990): n is a, c, g, or t
  misc_feature (1992)..(1992): n is a, c, g, or t
  misc_feature (1998)..(1998): n is a, c, g, or t
  misc_feature (2008)..(2008): n is a, c, g, or t
  misc_feature (2010)..(2010): n is a, c, g, or t
  misc_feature (2014)..(2014): n is a, c, g, or t
  misc_feature (2016)..(2016): n is a, c, g, or t
  misc_feature (2025)..(2025): n is a, c, g, or t
  misc_feature (2028)..(2028): n is a, c, g, or t
  misc_feature (2031)..(2031): n is a, c, g, or t
gcttgcgcatatcgcctcgtggcgggaggcatttcggggcttcggggcgaagccacagcgcacgcgcaactgtctcgaagccctcacccgccgcgccgagaaaggtctaccgcgggtgaacgcgcttactgacgtctacaacgcgatctcggtgctgcaccagattcccctcggcggcgaggaccttcatcgctacaacggcccggcacgtctgatccgtgccacgggacaagaatcgttcgacacgaccgcgaacggagaggccgtgatcgagcaccctgaaatcggtgaggtcatctggtgcgacgacgccggggtgacgtgccggcggtggaattggcggcagggtcgacgcaccggcctcaccgataccactcggacggcgttgttcatcctcgacgccctcgccccagttaccgacgaggaactgcacgccaccagcgacgcactcattgaggcgctggcgaacctaggcgaaaacgtgcagaccacaacacggctgataggcgcgcaacccagcgggaactgacgacgaaatcacgatcatcacactcactgtgctcgattcgaccggccaccatgcctatcacctgggcgaacatacccacattgcagagctgaccgtcgagcatacgagatcaacactcacgtccaccggcatcaaaggcctgcgcagctcacgcgtcctcacccgtgtgagatacgtcgcaagtaggctccatcagtatcgctgactggatgcttatcaccacgttcaaagtacgcgcatgtaattcgtacacctatgcaataaaagcagccgtgtgggttttagtgtgattatttttgttcgtgtcggtaatcgacatatgcgaaaaaggcgagctgtcttagtggtagcatttcagcttgttaaccgcaggttagctatcaccaagtttccaacccctaggagaaacgatgcgtcgaacaagaatcactgtggcagctgtgacagcaactgccttaatcggctcactatcagctatcacccccctccccgcgaatgctgcttctaacgggaacagctccataacccagtcagctgccttcagcccccgcgccacgacaaagatcagcgaggactgccgcaaagccatcatcaacgacctgaaactgcgcggcgcgatcgtcggagcactcgtcaaggctggactcagcgcagccgacgcagccgccctggccccccgtatcgccgccgaaatggcagcagagggtacccttaccatcaaccatcaccgactgaaggtcctcgtcgcttcccagctgggcctcgtagcagacgctgcggtccaacacgcagctgcagccatcgacctcagcttcaaggccatcctaggcgcgtcgatcatccccaacgcactaggatcagccgcgttcaagaacgcggtcatcgcaaacctcgtcgctgctggtatcgacaagcacctggcacgagccaccgccgtggcgatcgtcgccaccgcactgaaccccgccctcgggcccatcgcgaagttcgaactcatcaaagctgagatcgccgcccaagcagctcttctcatccgaaggggcgtccatctccagaaggcagccatcgagcacgtcatcggccgcgccttcgacgccgctgtcgcgaccgcgattatcagctctccgatcctgagtgcacgcatcgtcactcacctggtcagggctggaatagacaagtccattgccatcagccttgcaccgcatatcgtcaagcgcctggccaaggagccgctactggcgttcaacaccgccaagctcgtcaaggacatcgcccggcaaatcgtcgacatccgcaacacccaggaagccatagcagtctacaagcaactcaaggctgaactaccaaccctggacggactcgtgcagaaggcctgcacccccgagccgactcctacgccgaccccgactcctacgccgacnccgacnccgacnccgacnccgacnccgacnccgacnccgncnccgacnccgacaccgncnccgncnccgacaccnacnccnactccgacaccgacaccaacgcccactccaacaccgaccccaaccccaacccacggggccacaaccaccacgccgatcagccggacaacggaccgccacaacctcgggtctcatcacacccgcatcgcggcccccgcactgatccacgcgaaggccctcccagcaacaggaacgggagcctgacagcctcaggaaacaacgcaaggttcctctcacaactaacaatggtcgtggtcccacaagcctgtggaccacgaccatttacattcccccaagcaaatgactcgcatacgggtgttctccaggaacaaccacagcaaaatcaccaacctaccgagaaacaatgcttggatccagctccacatccttcggatagactatctccaaggggtaatcaaacgctcgtctgccaagcggaaaatataccaacgctgtaacaacaaggcccacgagccacgagatgtccgctccacccatcgctgcggcgaccggccccacataaaaggcctgagagatgaacggaatctgcacaaccacgcctagcaaataaacaacaatggtcggccagtggagcttgccataacggcccctcggagtgtacagcgcaggaatgtcaatacagccacgacatataaggtaatagttcagcaagttgatcgccgaccatggcaggaaaaacatcagcagagtcaagatgaaagacttgaaaacttgcagaaaatccgacgacgccgcgagcgccgtcaggacaaccacaacattgaaaccaatcacgaaaccgaaacgagtcttcggagagacactactcttaccggtgaaacccgaaagagctgtcgacaacgccatgactccgccatacgcattcaaggtgttgatggtcagcttgccaatcacaatggagatgaaaaccaagatcgccaaaacacgattctgggcaaggttccccataaacccaacctgatcgccaatgaaagcttgaccaccagcagcagcaatgaacacacccagcgtcatcgaaatcgtagctccaagtactgatcccgcgaagggaccgaaccacgcactcccaaacttcgtgtcacggggaagatagcgtgagtaatcactggcatacggtgcgtaagtcaactgccatcctgccgctaaagcaatcgacaggaggaaaggcaccaccgagaagtgcacatcggtcagctgcggcccaaaggaactcacttggaacagacgaaccgcgacataaagcagccccaggaggccaattgtcgatgacaccttccccagcttgtggattaggtcatacccaaacatggcaataattgccgtcagagctgcaaaaaccagtattccgatccacctggactggacaccaaatgcattgttgatagcttgtccagccaagacagttccagtagcagcgaagccaaagtagagaagcagtacgagaaacagcggaagcgcagcaccataaacgccaaactgtgcccgcgaactgatcatttgtgggagccccagcgcgggcccctgagcggaatggagcgccataacagcgccgccgatgacttgcccaataaaaaggccaattatcgcccatacaacatcggccccgaaaacaatcgccaaagcaccattcacgacagccgtaatctgcatattcactccgaaccacagtgtgaactgactcttcggagtgccgtgcctttcgccgtcaggaaccatatcaatcgttcgcttctcaacaccgcgaccagccccagaagcggttggagccgtatttccatgacgaatttcatcctgagcactatttggcgcggacaccacaattcctcctaccgagcgacggccatgtcgctttacagtcgcccacaaggacttcatccttctctgaacgagatacccattgcacctgcgggatagtgccattcaagcgagcctggcgcagcaaccgccagacaagtgccacactccagac

SEQ ID NO: 197 - DNA, 4000 bp, Escherichia coli
  misc_feature (1960)..(1961): n is a, c, g, or t
  misc_feature (1963)..(1968): n is a, c, g, or t
  misc_feature (1970)..(1977): n is a, c, g, or t
  misc_feature (1979)..(1979): n is a, c, g, or t
  misc_feature (1981)..(1986): n is a, c, g, or t
  misc_feature (1988)..(1989): n is a, c, g, or t
  misc_feature (2036)..(2044): n is a, c, g, or t
  misc_feature (2046)..(2046): n is a, c, g, or t
  misc_feature (2048)..(2065): n is a, c, g, or t
  misc_feature (2113)..(2118): n is a, c, g, or t
  misc_feature (2120)..(2120): n is a, c, g, or t
  misc_feature (2122)..(2126): n is a, c, g, or t
  misc_feature (2129)..(2137): n is a, c, g, or t
  misc_feature (2139)..(2141): n is a, c, g, or t
  misc_feature (2188)..(2190): n is a, c, g, or t
  misc_feature (2192)..(2192): n is a, c, g, or t
  misc_feature (2194)..(2197): n is a, c, g, or t
  misc_feature (2199)..(2200): n is a, c, g, or t
  misc_feature (2202)..(2208): n is a, c, g, or t
  misc_feature (2210)..(2211): n is a, c, g, or t
  misc_feature (2213)..(2217): n is a, c, g, or t
  misc_feature (2264)..(2286): n is a, c, g, or t
  misc_feature (2288)..(2299): n is a, c, g, or t
  misc_feature (2303)..(2304): n is a, c, g, or t
  misc_feature (2306)..(2306): n is a, c, g, or t
  misc_feature (2310)..(2313): n is a, c, g, or t
  misc_feature (2315)..(2315): n is a, c, g, or t
  misc_feature (2320)..(2321): n is a, c, g, or t
  misc_feature (2323)..(2324): n is a, c, g, or t
  misc_feature (2327)..(2329): n is a, c, g, or t
  misc_feature (2331)..(2331): n is a, c, g, or t
  misc_feature (2333)..(2334): n is a, c, g, or t
  misc_feature (2336)..(2336): n is a, c, g, or t
  misc_feature (2338)..(2342): n is a, c, g, or t
  misc_feature (2344)..(2347): n is a, c, g, or t
  misc_feature (2349)..(2353): n is a, c, g, or t
  misc_feature (2355)..(2357): n is a, c, g, or t
  misc_feature (2359)..(2360): n is a, c, g, or t
  misc_feature (2362)..(2365): n is a, c, g, or t
  misc_feature (2367)..(2375): n is a, c, g, or t
  misc_feature (2378)..(2380): n is a, c, g, or t
  misc_feature (2382)..(2382): n is a, c, g, or t
  misc_feature (2385)..(2389): n is a, c, g, or t
  misc_feature (2391)..(2391): n is a, c, g, or t
  misc_feature (2396)..(2397): n is a, c, g, or t
  misc_feature (2399)..(2400): n is a, c, g, or t
  misc_feature (2403)..(2405): n is a, c, g, or t
  misc_feature (2407)..(2407): n is a, c, g, or t
  misc_feature (2409)..(2410): n is a, c, g, or t
  misc_feature (2412)..(2412): n is a, c, g, or t
  misc_feature (2414)..(2414): n is a, c, g, or t
  misc_feature (2416)..(2426): n is a, c, g, or t
  misc_feature (2429)..(2431): n is a, c, g, or t
  misc_feature (2433)..(2434): n is a, c, g, or t
  misc_feature (2436)..(2440): n is a, c, g, or t
  misc_feature (2444)..(2451): n is a, c, g, or t
  misc_feature (2454)..(2456): n is a, c, g, or t
  misc_feature (2458)..(2458): n is a, c, g, or t
  misc_feature (2461)..(2465): n is a, c, g, or t
  misc_feature (2467)..(2467): n is a, c, g, or t
  misc_feature (2472)..(2473): n is a, c, g, or t
  misc_feature (2475)..(2476): n is a, c, g, or t
  misc_feature (2479)..(2481): n is a, c, g, or t
  misc_feature (2483)..(2483): n is a, c, g, or t
  misc_feature (2485)..(2486): n is a, c, g, or t
  misc_feature (2488)..(2488): n is a, c, g, or t
  misc_feature (2492)..(2500): n is a, c, g, or t
  misc_feature (2502)..(2503): n is a, c, g, or t
  misc_feature (2505)..(2505): n is a, c, g, or t
  misc_feature (2510)..(2522): n is a, c, g, or t
  misc_feature (2524)..(2526): n is a, c, g, or t
  misc_feature (2530)..(2531): n is a, c, g, or t
  misc_feature (2534)..(2534): n is a, c, g, or t
  misc_feature (2537)..(2538): n is a, c, g, or t
  misc_feature (2540)..(2541): n is a, c, g, or t
  misc_feature (2543)..(2543): n is a, c, g, or t
  misc_feature (2548)..(2549): n is a, c, g, or t
  misc_feature (2551)..(2552): n is a, c, g, or t
  misc_feature (2556)..(2557): n is a, c, g, or t
  misc_feature (2559)..(2559): n is a, c, g, or t
  misc_feature (2561)..(2562): n is a, c, g, or t
  misc_feature (2564)..(2564): n is a, c, g, or t
  misc_feature (2567)..(2580): n is a, c, g, or t
  misc_feature (2582)..(2588): n is a, c, g, or t
  misc_feature (2590)..(2590): n is a, c, g, or t
  misc_feature (2592)..(2594): n is a, c, g, or t
  misc_feature (2597)..(2602): n is a, c, g, or t
  misc_feature (2606)..(2607): n is a, c, g, or t
  misc_feature (2609)..(2609): n is a, c, g, or t
  misc_feature (2613)..(2616): n is a, c, g, or t
  misc_feature (2618)..(2618): n is a, c, g, or t
  misc_feature (2624)..(2624): n is a, c, g, or t
  misc_feature (2626)..(2627): n is a, c, g, or t
  misc_feature (2631)..(2632): n is a, c, g, or t
  misc_feature (2634)..(2634): n is a, c, g, or t
  misc_feature (2636)..(2637): n is a, c, g, or t
  misc_feature (2642)..(2647): n is a, c, g, or t
  misc_feature (2649)..(2649): n is a, c, g, or t
  misc_feature (2651)..(2653): n is a, c, g, or t
  misc_feature (2658)..(2660): n is a, c, g, or t
  misc_feature (2665)..(2665): n is a, c, g, or t
  misc_feature (2667)..(2674): n is a, c, g, or t
  misc_feature (2676)..(2677): n is a, c, g, or t
  misc_feature (2680)..(2680): n is a, c, g, or t
  misc_feature (2682)..(2682): n is a, c, g, or t
  misc_feature (2684)..(2684): n is a, c, g, or t
  misc_feature (2687)..(2687): n is a, c, g, or t
  misc_feature (2689)..(2693): n is a, c, g, or t
  misc_feature (2699)..(2699): n is a, c, g, or t
  misc_feature (2701)..(2702): n is a, c, g, or t
  misc_feature (2706)..(2707): n is a, c, g, or t
  misc_feature (2709)..(2709): n is a, c, g, or t
  misc_feature (2711)..(2713): n is a, c, g, or t
  misc_feature (2716)..(2722): n is a, c, g, or t
  misc_feature (2724)..(2727): n is a, c, g, or t
  misc_feature (2729)..(2730): n is a, c, g, or t
  misc_feature (2732)..(2733): n is a, c, g, or t
  misc_feature (2735)..(2735): n is a, c, g, or t
  misc_feature (2737)..(2739): n is a, c, g, or t
  misc_feature (2741)..(2741): n is a, c, g, or t
  misc_feature (2744)..(2751): n is a, c, g, or t
  misc_feature (2753)..(2753): n is a, c, g, or t
  misc_feature (2757)..(2757): n is a, c, g, or t
  misc_feature (2760)..(2760): n is a, c, g, or t
  misc_feature (2764)..(2764): n is a, c, g, or t
  misc_feature (2766)..(2767): n is a, c, g, or t
  misc_feature (2769)..(2769): n is a, c, g, or t
  misc_feature (2775)..(2775): n is a, c, g, or t
  misc_feature (2777)..(2778): n is a, c, g, or t
  misc_feature (2782)..(2783): n is a, c, g, or t
  misc_feature (2785)..(2785): n is a, c, g, or t
  misc_feature (2787)..(2788): n is a, c, g, or t
  misc_feature (2790)..(2790): n is a, c, g, or t
  misc_feature (2792)..(2795): n is a, c, g, or t
  misc_feature (2797)..(2797): n is a, c, g, or t
  misc_feature (2802)..(2805): n is a, c, g, or t
  misc_feature (2807)..(2808): n is a, c, g, or t
  misc_feature (2811)..(2815): n is a, c, g, or t
  misc_feature (2820)..(2829): n is a, c, g, or t
  misc_feature (2834)..(2834): n is a, c, g, or t
  misc_feature (2839)..(2844): n is a, c, g, or t
  misc_feature (2850)..(2851): n is a, c, g, or t
  misc_feature (2853)..(2854): n is a, c, g, or t
  misc_feature (2857)..(2859): n is a, c, g, or t
  misc_feature (2863)..(2865): n is a, c, g, or t
  misc_feature (2868)..(2868): n is a, c, g, or t
  misc_feature (2870)..(2875): n is a, c, g, or t
  misc_feature (2878)..(2881): n is a, c, g, or t
  misc_feature (2883)..(2883): n is a, c, g, or t
  misc_feature (2888)..(2889): n is a, c, g, or t
  misc_feature (2892)..(2893): n is a, c, g, or t
  misc_feature (2895)..(2905): n is a, c, g, or t
  misc_feature (2908)..(2910): n is a, c, g, or t
  misc_feature (2912)..(2912): n is a, c, g, or t
  misc_feature (2915)..(2919): n is a, c, g, or t
  misc_feature (2921)..(2921): n is a, c, g, or t
  misc_feature (2926)..(2927): n is a, c, g, or t
  misc_feature (2929)..(2930): n is a, c, g, or t
  misc_feature (2933)..(2935): n is a, c, g, or t
  misc_feature (2939)..(2940): n is a, c, g, or t
  misc_feature (2945)..(2948): n is a, c, g, or t
  misc_feature (2950)..(2956): n is a, c, g, or t
  misc_feature (2958)..(2962): n is a, c, g, or t
  misc_feature (2965)..(2980): n is a, c, g, or t
  misc_feature (2985)..(2986): n is a, c, g, or t
  misc_feature (2991)..(2995): n is a, c, g, or t
  misc_feature (2997)..(2997): n is a, c, g, or t
  misc_feature (3002)..(3003): n is a, c, g, or t
  misc_feature (3005)..(3006): n is a, c, g, or t
  misc_feature (3009)..(3011): n is a, c, g, or t
  misc_feature (3015)..(3017): n is a, c, g, or t
  misc_feature (3020)..(3025): n is a, c, g, or t
  misc_feature (3027)..(3030): n is a, c, g, or t
  misc_feature (3032)..(3037): n is a, c, g, or t
  misc_feature (3039)..(3056): n is a, c, g, or t
  misc_feature (3059)..(3061): n is a, c, g, or t
  misc_feature (3063)..(3063): n is a, c, g, or t
  misc_feature (3066)..(3072): n is a, c, g, or t
  misc_feature (3077)..(3078): n is a, c, g, or t
  misc_feature (3080)..(3081): n is a, c, g, or t
  misc_feature (3084)..(3086): n is a, c, g, or t
  misc_feature (3088)..(3088): n is a, c, g, or t
  misc_feature (3090)..(3092): n is a, c, g, or t
  misc_feature (3095)..(3101): n is a, c, g, or t
  misc_feature (3103)..(3107): n is a, c, g, or t
  misc_feature (3109)..(3110): n is a, c, g, or t
  misc_feature (3112)..(3119): n is a, c, g, or t
  misc_feature (3121)..(3131): n is a, c, g, or t
  misc_feature (3134)..(3138): n is a, c, g, or t
  misc_feature (3141)..(3147): n is a, c, g, or t
  misc_feature (3153)..(3157): n is a, c, g, or t
  misc_feature (3160)..(3161): n is a, c, g, or t
  misc_feature (3163)..(3168): n is a, c, g, or t
  misc_feature (3170)..(3173): n is a, c, g, or t
  misc_feature (3175)..(3177): n is a, c, g, or t
  misc_feature (3180)..(3181): n is a, c, g, or t
  misc_feature (3183)..(3184): n is a, c, g, or t
  misc_feature (3186)..(3188): n is a, c, g, or t
  misc_feature (3190)..(3196): n is a, c, g, or t
  misc_feature (3198)..(3203): n is a, c, g, or t
  misc_feature (3205)..(3207): n is a, c, g, or t
  misc_feature (3210)..(3211): n is a, c, g, or t
  misc_feature (3218)..(3223): n is a, c, g, or t
  misc_feature (3229)..(3229): n is a, c, g, or t
  misc_feature (3231)..(3232): n is a, c, g, or t
  misc_feature (3236)..(3237): n is a, c, g, or t
  misc_feature (3239)..(3239): n is a, c, g, or t
  misc_feature (3241)..(3244): n is a, c, g, or t
  misc_feature (3246)..(3249): n is a, c, g, or t
  misc_feature (3251)..(3251): n is a, c, g, or t
  misc_feature (3254)..(3257): n is a, c, g, or t
  misc_feature (3259)..(3259): n is a, c, g, or t
  misc_feature (3261)..(3269): n is a, c, g, or t
  misc_feature (3271)..(3274): n is a, c, g, or t
  misc_feature (3276)..(3276): n is a, c, g, or t
  misc_feature (3278)..(3283): n is a, c, g, or t
  misc_feature (3286)..(3287): n is a, c, g, or t
  misc_feature (3290)..(3290): n is a, c, g, or t
  misc_feature (3293)..(3293): n is a, c, g, or t
  misc_feature (3295)..(3298): n is a, c, g, or t
  misc_feature (3304)..(3308): n is a, c, g, or t
  misc_feature (3311)..(3313): n is a, c, g, or t
  misc_feature (3316)..(3319): n is a, c, g, or t
  misc_feature (3322)..(3324): n is a, c, g, or t
  misc_feature (3326)..(3327): n is a, c, g, or t
  misc_feature (3329)..(3331): n is a, c, g, or t
  misc_feature (3333)..(3337): n is a, c, g, or t
  misc_feature (3339)..(3339): n is a, c, g, or t
  misc_feature (3342)..(3355): n is a, c, g, or t
  misc_feature (3357)..(3359): n is a, c, g, or t
  misc_feature (3362)..(3364): n is a, c, g, or t
  misc_feature (3366)..(3366): n is a, c, g, or t
  misc_feature (3369)..(3373): n is a, c, g, or t
  misc_feature (3375)..(3375): n is a, c, g, or t
  misc_feature (3380)..(3381): n is a, c, g, or t
  misc_feature (3383)..(3384): n is a, c, g, or t
  misc_feature (3387)..(3389): n is a, c, g, or t
  misc_feature (3393)..(3394): n is a, c, g, or t
  misc_feature (3398)..(3401): n is a, c, g, or t
  misc_feature (3403)..(3404): n is a, c, g, or t
  misc_feature (3406)..(3409): n is a, c, g, or t
  misc_feature (3411)..(3413): n is a, c, g, or t
  misc_feature (3415)..(3416): n is a, c, g, or t
  misc_feature (3418)..(3418): n is a, c, g, or t
  misc_feature (3420)..(3420): n is a, c, g, or t
  misc_feature (3422)..(3431): n is a, c, g, or t
  misc_feature (3433)..(3434): n is a, c, g, or t
  misc_feature (3438)..(3440): n is a, c, g, or t
  misc_feature (3442)..(3442): n is a, c, g, or t
  misc_feature (3445)..(3449): n is a, c, g, or t
  misc_feature (3451)..(3451): n is a, c, g, or t
  misc_feature (3456)..(3457): n is a, c, g, or t
  misc_feature (3459)..(3460): n is a, c, g, or t
  misc_feature (3463)..(3465): n is a, c, g, or t
  misc_feature (3469)..(3470): n is a, c, g, or t
  misc_feature (3475)..(3479): n is a, c, g, or t
  misc_feature (3481)..(3485): n is a, c, g, or t
  misc_feature (3487)..(3487): n is a, c, g, or t
  misc_feature (3489)..(3489): n is a, c, g, or t
  misc_feature (3491)..(3495): n is a, c, g, or t
  misc_feature (3497)..(3504): n is a, c, g, or t
  misc_feature (3506)..(3508): n is a, c, g, or t
  misc_feature (3510)..(3510): n is a, c, g, or t
  misc_feature (3515)..(3518): n is a, c, g, or t
  misc_feature (3521)..(3526): n is a, c, g, or t
  misc_feature (3532)..(3536): n is a, c, g, or t
  misc_feature (3539)..(3541): n is a, c, g, or t
  misc_feature (3544)..(3547): n is a, c, g, or t
  misc_feature (3550)..(3554): n is a, c, g, or t
  misc_feature (3556)..(3561): n is a, c, g, or t
  misc_feature (3563)..(3563): n is a, c, g, or t
  misc_feature (3565)..(3565): n is a, c, g, or t
  misc_feature (3567)..(3567): n is a, c, g, or t
  misc_feature (3570)..(3570): n is a, c, g, or t
  misc_feature (3572)..(3577): n is a, c, g, or t
  misc_feature (3579)..(3587): n is a, c, g, or t
  misc_feature (3590)..(3592): n is a, c, g, or t
  misc_feature (3594)..(3594): n is a, c, g, or t
  misc_feature (3597)..(3597): n is a, c, g, or t
  misc_feature (3599)..(3602): n is a, c, g, or t
  misc_feature (3608)..(3612): n is a, c, g, or t
  misc_feature (3615)..(3617): n is a, c, g, or t
  misc_feature (3620)..(3623): n is a, c, g, or t
  misc_feature (3626)..(3626): n is a, c, g, or t
  misc_feature (3628)..(3631): n is a, c, g, or t
  misc_feature (3633)..(3640): n is a, c, g, or t
  misc_feature (3644)..(3647): n is a, c, g, or t
  misc_feature (3649)..(3649): n is a, c, g, or t
  misc_feature (3651)..(3653): n is a, c, g, or t
  misc_feature (3655)..(3662): n is a, c, g, or t
  misc_feature (3667)..(3668): n is a, c, g, or t
  misc_feature (3671)..(3671): n is a, c, g, or t
  misc_feature (3673)..(3678): n is a, c, g, or t
  misc_feature (3684)..(3688): n is a, c, g, or t
  misc_feature (3692)..(3698): n is a, c, g, or t
  misc_feature (3701)..(3701): n is a, c, g, or t
  misc_feature (3703)..(3706): n is a, c, g, or t
  misc_feature (3708)..(3719): n is a, c, g, or t
  misc_feature (3721)..(3725): n is a, c, g, or t
  misc_feature (3727)..(3733): n is a, c, g, or t
  misc_feature (3735)..(3739): n is a, c, g, or t
  misc_feature (3742)..(3743): n is a, c, g, or t
  misc_feature (3745)..(3746): n is a, c, g, or t
  misc_feature (3749)..(3753): n is a, c, g, or t
  misc_feature (3755)..(3755): n is a, c, g, or t
  misc_feature (3760)..(3764): n is a, c, g, or t
  misc_feature (3768)..(3770): n is a, c, g, or t
  misc_feature (3773)..(3773): n is a, c, g, or t
  misc_feature (3776)..(3776): n is a, c, g, or t
  misc_feature (3778)..(3782): n is a, c, g, or t
  misc_feature (3785)..(3785): n is a, c, g, or t
  misc_feature (3787)..(3793): n is a, c, g, or t
  misc_feature (3796)..(3803): n is a, c, g, or t
  misc_feature (3805)..(3806): n is a, c, g, or t
  misc_feature (3808)..(3815): n is a, c, g, or t
  misc_feature (3817)..(3819): n is a, c, g, or t
  misc_feature (3822)..(3822): n is a, c, g, or t
  misc_feature (3824)..(3829): n is a, c, g, or t
  misc_feature (3831)..(3831): n is a, c, g, or t
  misc_feature (3835)..(3838): n is a, c, g, or t
  misc_feature (3844)..(3846): n is a, c, g, or t
  misc_feature (3848)..(3848): n is a, c, g, or t
  misc_feature (3850)..(3850): n is a, c, g, or t
  misc_feature (3853)..(3857): n is a, c, g, or t
  misc_feature (3859)..(3863): n is a, c, g, or t
  misc_feature (3865)..(3871): n is a, c, g, or t
  misc_feature (3873)..(3881): n is a, c, g, or t
  misc_feature (3883)..(3884): n is a, c, g, or t
  misc_feature (3886)..(3889): n is a, c, g, or t
  misc_feature (3891)..(3891): n is a, c, g, or t
  misc_feature (3894)..(3895): n is a, c, g, or t
  misc_feature (3897)..(3898): n is a, c, g, or t
  misc_feature (3900)..(3904): n is a, c, g, or t
  misc_feature (3910)..(3914): n is a, c, g, or t
  misc_feature (3916)..(3917): n is a, c, g, or t
  misc_feature (3920)..(3925): n is a, c, g, or t
  misc_feature (3927)..(3931): n is a, c, g, or t
  misc_feature (3933)..(3933): n is a, c, g, or t
  misc_feature (3936)..(3942): n is a, c, g, or t
  misc_feature (3945)..(3958): n is a, c, g, or t
  misc_feature (3960)..(3961): n is a, c, g, or t
  misc_feature (3963)..(3964): n is a, c, g, or t
  misc_feature (3969)..(3971): n is a, c, g, or t
  misc_feature (3974)..(3974): n is a, c, g, or t
  misc_feature (3976)..(3979): n is a, c, g, or t
  misc_feature (3981)..(3981): n is a, c, g, or t
  misc_feature (3985)..(3990): n is a, c, g, or t
  misc_feature (3993)..(3993): n is a, c, g, or t
  misc_feature (3997)..(3998): n is a, c, g, or t
ctttgaagaaacaattgtggcaacaaactgtaatggccaaaatcgtcaatcaggccaacctgctggggcaataccggattgccaacaagcgactcattaatctggtaactcaggtgaagagtggcgacagtgataattgcgaagcccaggctgccagctattattggaaaaacattttccccattttcccagactttagaaggcatagggaaggagcaccgcccaataatctgctcaactacggctatgctattttacgtgcggtagtagccagaaatcttgtcggtagtggcttgttgcccacgttgggtatctttcaccgaaaccaatacaatgcctattgtctggcagatgatatgatggagccgtatcgtccttatgtggataaagtagtgtatgatatcgtaaggaacaatggaaactttttagagttgacaccgacaatgaagcaacagctattgagtattccggtgatagatgtgatgatagatgatgaaaaaagtccgttgatgaatgctgtgcaacgtactacggccagtttggccaaatgttttgaaggaaataccagaaaactgctgtttcctgttttatctgcttcaatgtaactgagatgaattttgaacgtttaaatgcttatcgtgttatgtgggtacttgtaatgttcgacctgccaaccaccaccaaggccgagataaagcgttatgcaaaatttaggaagcaaatcttagatgatggttttagtatgtttcagtttagtatgtacattcggcattgtatgagtcgggaaaatgcaaccgttcatatacaaagagtaaagaaaattttaccatccaaaggtcatgtaggtattatgtgtattaccgataaacaatttgggcaaatggaaatattttatggaaaggaaactgccgacagtcccattccggcacaacaattagaactattttaatgatgagaagatcacaatttattcgtggaattattggtgttttaggcgtttcggctctacctagtaaaatggtaaaacagtaccaaagaatttatttactacagagttttgtacgagggtttagattttatgaagggccaaaattactggatcagatgcaggaaggggatctgttgcaactaaagcgggaaccggataataaattcgatgaccatgctatcgctctttttttcaataatcgtaaaattggttttcttccacaggaagacaatgaaatcctcagtaagctgatggacgccgaggtagtagatttgcaggcgggcattacgcatttagaaaaagcagcccaggcttgggagaatgtacatgtagccgtatttgtactcaaggagctgaaggatccgctacctgaaaccgcaaaatatttaacagttttggaaactcctcattatcacagcctgaaattatcagaagacagcgtagtaaatatttattatggagatgacgaggaggaagaactattggatgtagatgatttttttgaggaattgggaaaaagcacaaacggtaaagcagtgaaagacaaaatgcggcaaggattatctcccgaaatggaatgggaacagatgatttatgaaggtcgtctggtggttaataaaaacaaattgccggccgacttgaaggggaaagatattacccatgccctaaaagaaggtgaaatattgctgaaccacttatttgatgaggaaggctttttagtagccaatgtaaatgaggtagctcggttgagcactaggatagacaaagtggtagaggcggttgatagtactggaaggttattttatgagattcgatttgtataaaaaaatgagccaatagaaataaaaaaacgagctattcggctcgtttttttatgctaatgacatcctgtaatcctttgctgttgtggctttggtcgaattgagatgtcaaagaccaaagatcataaaaacttgaaagcaattcacaacnnannnnnnannnnnnnnantnnnnnntnngatgtcaaagaccaaagatcataaaaacttgaaagcaattcacaacnnnnnnnnnangnnnnnnnnnnnnnnnnnngatgtcaaagaccaaagatcataaaaacttgaaagcaattcacaactnnnnnntnannnnngannnnnnnnntnnngatgtcaaagaccaaagatcataaaaacttgaaagcaattcacaacnnnanannnntnngnnnnnnntnnannnnngatgtcaaagaccaaagatcataaaaacttgaaagcaattcacaacnnnnnnnnnnnnnnnnnnnnnnnannnnnnnnnnnnaaanncnaaannnnanaaaanntnnaannnantnnanannnnnannnnannnnngnnncnntnnnntnnnnnnnnnaannncnaannnnnanaaaanntnnaannnantnnanancnnnnnnnnnnnttnnncnncnnnnncctnnnnnnnnaannncnaannnnnanaaaanntnnaannnantnnanaacnnnnnnnnncnntnaaaannnnnnnnnnnnntnnnaaannacnaannannanaaaanntnnaaannantnnanaannnnnnnnnnnnnncnnnnnnntngnnntgnnnnnnaaanncnaaannnnanaaaaantnnaaannantnnaaaannnnnnantnnnattannnttccntnnnnnnnntnnaanancnaanannnnnaaaaantnnaaannantnnnaannnnnnngnnnnannannantnnngnggnnnnnnnntnaaanacnaaanannanaaaaantnnaaannantnnanannnnanaaaannnntnnccnnnnnattgnnnnnnnnnnaaaancaaannnnnnaaaaanntnnaannnattnnnaanannnnnnttnnnnanttaannaannannnnnnnnnnnaannncnaannnnnanaaaanntnnaannnattnnaaaannnngnnnnnnntnnnnnaannnnnnnnnnnnnnnnaaaanncaaannnnnanaaaanntnnaannnattnnnaannnnnnannnntnnnnnnannnnnnnnnnnnnnnnnnaannncnaannnnnnnaaaanntnnaannnantnnnaannnnnnnannnnntnnannnnnnnnannnnnnnnnnnaannnnnaannnnnnnaaaaannnnnaannannnnnnannnntnnnagnntnncnnnannnnnnnannnnnngnnnaannacaaaannnnnnaaaaantnnaaannantnnnnannnntnaannnnantnnnnnnnnntnnnnanannnnnnaannccnaanannnnaaaaannnnnaannnatnnnnaannngnnannncnnnnnanaannnnnnnnnnnnnntnnnaannncnaannnnnanaaaanntnnaannnattnnaaannnntnnannnntnnnannantnannnnnnnnnntnnaaannncnaannnnnanaaaanntnnaannnattnnaaaannnnnannnnnantnannnnntnnnnnnnnannntnaaaannnnaannnnnnaaaaannnnnaannnatnnnnaannnnnannnnnntntnanaantnnnnnnannnnnnnnnaannncnaanannnnaaaaannnnnaannnatnnnnaanannnnannnnnnnntaannnnanannncnnnnnnnnaaaannaanannnnnnaaaaannnnnaaannnnnnnaanannnnannnnnnnnnnnnannnnntnnnnnnngnnnnnaannannaannnnnanaaaannnnnaaannnatnaanannnnngancnnnnnnnaannnnnnnngnnannnnnnnnannnaanannnnnnanaaannnnagaaannnananaannnnnannnnnannnnnnnannnnnnnnngnngnnnnanaannannannnnnaaaaannnnnannaannnnnnannnnngntannnnnnnacnnnnnnnnnnnnnnanntnnaagannnaanannnnanaaannnnnnagnaatnnac

SEQ ID NO: 198 - DNA, 4000 bp, Escherichia coli
  misc_feature (439)..(439): n is a, c, g, or t
  misc_feature (1146)..(1146): n is a, c, g, or t
  misc_feature (1878)..(1878): n is a, c, g, or t
  misc_feature (2433)..(2433): n is a, c, g, or t
  misc_feature (2476)..(2476): n is a, c, g, or t
ttgtaatgataaatttcatagttgatatcacatactattttatcgacccaagaatcaggcttaaggaagaggcaagctaggaatgttaaacaaaactttcaataaaatttacgataccgatatagggtatagcttttttaattcaaaaattgcaatgatctcttccgctgttttgtttattatttttctttgttcaatttttgctggtgtggtttcgccctataacccttttgacccagcttcagtctcattaatggatgcatttactccgccttcgtggtcagaaggaggaagccctagctttatccttggaacagatcaacaaggtagagatatgttctcaactattatctatggctcaaggatttcattaattgtgggctttgcatcaatcctttttgcaatgatacttggcgtattccttggcgttactgctggntatataggcggtagatacgagataattgtcatgcgagttacagatgtccagctcacaattccaagcatcctcatggcactactcgttaacggtatcgcgaaatcagttatttcacaatcgatgcatagtgaaatggcaatttatgtgttaatttttgcaattggtatctcagagtggcctcaatttgctcgtgtttctagagcatccaccttggttgaaaaaaataaagaatatgtctcggcatcaagaattataggactatcaaacgtcctgattatgtttaaacatatcttaccaaacatactcaggcctctattagtgattgctacaataggattggctcttgcaatcataaccgagtctacgctcagttttttaggtgtaggagttccacccaccactccttcactaggcacattaattagatttggaaatagttttttattttcaggtgaatggtggattacattttttccagctatctttttaatcgttttagctttgtctattaacctactaggagattggatgagagacgccttaaatccaaaattaaaaataagatgagtctgctaaaggttaaaaatttaaacattagttatccaactagaaaagaaactattgttgctagcaaggatgttgaatttacgctggagaggggtgaaatattaggaatagttggtgaatcaggctctggaaaatctacnattgcaaacgccatcatcaatttaattgacccgccaggtgaaataacaagcggatcaattaaaattgataatgatgaattaagagataacgaagagcttatccaagaaatcagaggaaagaaaattggatttgtttttcaagatccacaaacatcccttaatccactatttaaaataaaagatcaattaattgaaaccatccaaacacatcttaatttagactatcaagatgcattaaaaaaatctattcagctcttagaagaagtaggcattgataatgctgaaaaaagaattgaagattatcctcatcaatttagcggaggcatgcgccaaagggttgttattgctttagcgattagctgtgaaccagatttgattatagccgatgaaccaacaactgctttagatgtaagcattcaacatcaaatacttgaattactaaaggatctgactaaaaaaagaaatttaggggtaatgattatcacccatgatatgggcgttattgctgaaacaacagacaaagttattgtcatgagacacgggcttattgttgaacaaggtgatacaaaggagttattaacgaatcctaaatctaatgaagctcgaagcttagttatttcagtgccgccaacaaataaaaaaattgatagattcaaacttatcagccctgatggaaaagaaattacatctgactctaaaaatttaacaaaaaatattattaaaacctggggngctagagaaaatacaaatcaaaagttattagagctttcaggagttactaaaatttttgatgataagtccttagtgagtaatttttcatttgggtcaaaaaatgaaaccgctgctaaagtggtaaaggcagttgataatgtttcttttgaactgtttgagggagaaactctaggcttagttggtgagtctggctctggtaaatcaacaatagcaaaaattattacagggctcgttagaccaactaatggggaaatcttttataacaatctctcgctttataattcaaaaagaaaataccaaattgataagagcagaggacaggttcagatgatatttcaagacccctactcatctttaaacccaagatttaaagtaagggacataatatctgagccaataaggctttttcaaaaaaatattagctctagtgagcttacaaaaaatctttatgacttaatagatattgttgggatgtcaagacaatcactggatcgctatcctcatgaattttcaggtggacaaagacaaagaatatcaattgctagagctttagcnactcgtcctcgcttgttaatttgtgatgaacctacatctgcgntggatgtaagcatacaagcacaagttctaaaccttttaaaagatattcaagatgagctccatctggccatgctgtttattagtcatgatcttcctgtgattagacaaatgtgtaatagaattgtagtgctgaaaaatggcattgtttgtgagacaaaagaaagcgaagagttatttaataatccagaacatccttacacccaagaacttattaggctcatgccgaaaattgaatctataatttaatttatttataaatttattagaaaaacatatgcaactaaaaataaactctgtgcgcaatcgcatgaaggataacaatgttgatttaattgctcttggtcctggcactcatatgaaatggttgttaggcttcaatccctcgcctgatgaaagaccttgtatgttattgatgggattggaaaatgatgccttccttatgccatcagtgaatgcagaggatgcaatgaagcgctctgatattaaaatgtttagctggaaagatgaaaatggccctgatgaagcactagatgaggctctttcttatactggctcatcaaatgcaaaacatattgcaatagatgaggcaatgcgctctcactttgcattattacttatcgacgcattaccaaaaccgacctatgagtttactaactctacgattggtgcactcagaatgcgcaaagatgataatgagtactctaatcttaaagagaatgcgctgatcgatgatagagcaatgcaagctggctttgcagcaatcaaagaaggtgtgacagagcttgaaattggtgaggcaataaacaaacactttatttctgaaggggcgaaacctcaattttgtattgtaggatctggcccaaatggtgctttcccgcatcatcatactggaaatagaaaagtagaaaatggtgacgtagtactgattgatatcggtggtcgaaaaggaaccttcccaagtgacatgacacgcatgtctgtagtaggagaaccgccaaaagattatcttgaggttcatgcgattgtagaacgtgcagtgcaagcagcaatggcggcagcaaaaccaggagttatggccaaagatgtagatgctgcagcaaggggtgttattactgaggccggctatggagaattttttgttcataggacaggacacggtcttggcattgatattcacgagccaccctatatcactgcaacttctgaagttgtcctagatgagggaatggtgttctcaatcgaaccaggaatttatcttcagggtaggtttggtgttcgcctagaagagattgttattttaagggctgatgggcccgaaattctttcggaactcactcgaaaaacgaactttataacgtagtcaaaaagcgccaaaaaaacatctgcaacatattgaaaaatgtgtattattttgcattctgtttaatggttattagtagctatgaaaaaagaatttagttttggaacacaggttagaaaatctccatattttgatgcgactgtgcgttggggagcaaagggattt

SEQ ID NO: 199 - DNA, 4000 bp, Escherichia coli
  misc_feature (22)..(22): n is a, c, g, or t
  misc_feature (25)..(26): n is a, c, g, or t
  misc_feature (33)..(34): n is a, c, g, or t
  misc_feature (36)..(36): n is a, c, g, or t
  misc_feature (39)..(39): n is a, c, g, or t
  misc_feature (56)..(56): n is a, c, g, or t
  misc_feature (66)..(66): n is a, c, g, or t
  misc_feature (68)..(69): n is a, c, g, or t
  misc_feature (74)..(75): n is a, c, g, or t
  misc_feature (77)..(78): n is a, c, g, or t
  misc_feature (81)..(81): n is a, c, g, or t
  misc_feature (84)..(86): n is a, c, g, or t
  misc_feature (88)..(91): n is a, c, g, or t
  misc_feature (93)..(94): n is a, c, g, or t
  misc_feature (96)..(96): n is a, c, g, or t
  misc_feature (102)..(102): n is a, c, g, or t
  misc_feature (104)..(105): n is a, c, g, or t
  misc_feature (110)..(111): n is a, c, g, or t
  misc_feature (117)..(117): n is a, c, g, or t
  misc_feature (131)..(131): n is a, c, g, or t
  misc_feature (138)..(138): n is a, c, g, or t
  misc_feature (141)..(141): n is a, c, g, or t
  misc_feature (147)..(147): n is a, c, g, or t
  misc_feature (156)..(156): n is a, c, g, or t
  misc_feature (162)..(162): n is a, c, g, or t
  misc_feature (165)..(165): n is a, c, g, or t
  misc_feature (168)..(168): n is a, c, g, or t
  misc_feature (179)..(179): n is a, c, g, or t
  misc_feature (183)..(183): n is a, c, g, or t
  misc_feature (186)..(186): n is a, c, g, or t
  misc_feature (190)..(190): n is a, c, g, or t
  misc_feature (197)..(197): n is a, c, g, or t
  misc_feature (204)..(204): n is a, c, g, or t
  misc_feature (207)..(207): n is a, c, g, or t
  misc_feature (209)..(210): n is a, c, g, or t
  misc_feature (216)..(216): n is a, c, g, or t
  misc_feature (218)..(218): n is a, c, g, or t
  misc_feature (222)..(223): n is a, c, g, or t
  misc_feature (228)..(228): n is a, c, g, or t
  misc_feature (237)..(237): n is a, c, g, or t
  misc_feature (240)..(240): n is a, c, g, or t
  misc_feature (242)..(242): n is a, c, g, or t
  misc_feature (249)..(249): n is a, c, g, or t
  misc_feature (273)..(273): n is a, c, g, or t
  misc_feature (276)..(276): n is a, c, g, or t
  misc_feature (288)..(288): n is a, c, g, or t
  misc_feature (290)..(294): n is a, c, g, or t
  misc_feature (300)..(301): n is a, c, g, or t
  misc_feature (303)..(303): n is a, c, g, or t
  misc_feature (309)..(309): n is a, c, g, or t
  misc_feature (333)..(333): n is a, c, g, or t
  misc_feature (335)..(335): n is a, c, g, or t
  misc_feature (372)..(372): n is a, c, g, or t
  misc_feature (383)..(383): n is a, c, g, or t
  misc_feature (407)..(407): n is a, c, g, or t
  misc_feature (411)..(411): n is a, c, g, or t
  misc_feature (428)..(428): n is a, c, g, or t
  misc_feature (435)..(435): n is a, c, g, or t
  misc_feature (438)..(438): n is a, c, g, or t
  misc_feature (444)..(444): n is a, c, g, or t
  misc_feature (447)..(447): n is a, c, g, or t
  misc_feature (456)..(456): n is a, c, g, or t
  misc_feature (458)..(459): n is a, c, g, or t
  misc_feature (468)..(468): n is a, c, g, or t
  misc_feature (470)..(470): n is a, c, g, or t
  misc_feature (474)..(474): n is a, c, g, or t
  misc_feature (485)..(485): n is a, c, g, or t
  misc_feature (489)..(489): n is a, c, g, or t
  misc_feature (498)..(498): n is a, c, g, or t
  misc_feature (501)..(501): n is a, c, g, or t
  misc_feature (506)..(506): n is a, c, g, or t
  misc_feature (513)..(513): n is a, c, g, or t
  misc_feature (1959)..(1959): n is a, c, g, or t
  misc_feature (1962)..(1963): n is a, c, g, or t
  misc_feature (1972)..(1972): n is a, c, g, or t
  misc_feature (1983)..(1984): n is a, c, g, or t
  misc_feature (1986)..(1986): n is a, c, g, or t
  misc_feature (1993)..(1993): n is a, c, g, or t
  misc_feature (2012)..(2012): n is a, c, g, or t
  misc_feature (2023)..(2023): n is a, c, g, or t
  misc_feature (2025)..(2025): n is a, c, g, or t
  misc_feature (2032)..(2032): n is a, c, g, or t
  misc_feature (3560)..(3560): n is a, c, g, or t
  misc_feature (3596)..(3596): n is a, c, g, or t
ttctgtatattgcatcaacttnttnnttctagnncntcntctaaatctagttgatnaagtatttcntnntctanntnnccnatnnntnnnntnntnagattntnnctgtnncaatgntttaatattcctanataactntgnacactngcatttatntcattnatntcnacctcctcttnatantantttntctgtanatatttnagncnncttttnantttnnttttngtgcttttnctnanttttctntatggtggataagtaacatatccncanaaatctattccntnnnnnatattnncnacagtngttttgttgttaagttctaatttnanataatcagcaagaaatatttctatctcctgtctgatngtatgtaattnattttttgattttcctaaaataanaaantcatccatatatctaanataatgnttngctttnagngtatgcttnannaatttatcnanaaantctaaataaanattngcaaacatntgnctggntagattnccaataggtattccaattcctttaattttgccttcttcaaaatggtgatctcccaggtgaatgccaaactcaccatcatcgcttttaattattctccagagtaatcttagtgtatctttgcaatctatctttcttttaataagttcaaaaagaactcgatgatctattctataaaagtattttgctacatcagctttcagaaaataagtttcgcctggttgtctgtcgagctttctcatccagtgtcttaattgatctgcagcataatgagtgccttttccaactctacaagcacagctatgctcataaaatatattgtcgaagataggaaatacttgtcggtaaatagcccattgaactacccggtccctaaaaggaagagccataaccagtctttgctttggttcatatacataaaactgatgatatttgccctgttcataagttttgtgtatcaattcattctgcagctggataagattgctttctaactgcctggtaaactttaaaacttcatttttaaatctttttttctttcttgcttctatataagctaaatataaattctcaaaatcgtatatttttggatataaatttctaaatttttttggaatgttatcaccactttctctgtattcaggtgaaaagaaaaacccgctcttatttagagcaggttttaaggtgccggccgtgacaactttctatatttcaatacttgctgcctaactgacaatttaaattttttcctggagggacaaatttgtttctcaggatggaagtaggcccctttatttatgttgctggcactggataacaacccagtaggttgctaacttctggcctaaaaatataaatagagcggagcggaagccaatgttgttgttcgagttcgaacgctcgttgttcaggttcaactgaaagacaccggctgtcgagccgttgttccagttgccaccacggatcggcaaacgcatcggcctactaccgaaaatttataaaattttattgtttcttttctattgttttcatccagccgccgatcaacttacctacttcatcaagtttttcggaccagatgccatactttttaaaaggaagaaattctaaatctttggctaatcttatataagtagttatcaattctaattgagtatccatttctcttaatgtagtttttttataatattttttattagttatgataattaattttaaaagctttatcattgcctcttttatctctgcagcaaaagtatgcttttcgctgcgaggaaattgttttaatgcctggtaaccatactggatcatgtcataagtcttttgatatactattagattttccaaattatcatccttcaagtaatgtaggggaaggctatcgcccacccctaacagattttagagttcagatttatagagaaacaaaagcggagcggaagccaatgntgnngttcgagtncgaacgctcgnngntcaggtncaaccgaaagacaccggcngtcgagccgcngntccagcngccaccacggatcggcaaacgctcaccgtagtttctaacataaatataatctccgttatatcctgtgccttccgggaatacagccaaatattttagtctttcaggaactgtaaagccagtatcagcggtcatattctcaaaaatatgagagatatattcgctacttgcttcgtccattacattgtcaattacactatcaagctgtaatgtagtgccgtctacatccatataagctccgagatctaaccagcctgtattatctccagcagcattaccagtctgaaaatcattttcatcatgaacccaaattttaccgtcaactagctttaagccatcgacccattcatgaacatttccatttaaatcaaatatgcctgctagagttccatcgtgagaccatgaagcaggtccagatccggttgctaccctatatgttttgtaagggtctccaccaccataagtttctacacctttttcatgcggagcacttatatcctgaccatagtcattgttacctctgggctcataaccatttttcctgcaccagagtgcaatagcagcccattctgcattggtcataagatgccagccagttcccttagcaaatgatgcagctctcgctgtatcaaaattaattgatgttgctgggtcctgattagggattgaataagcccggctgttcttgataatattttgatattttgaaatgaaaatttcatccttaaccacaccgttaacaatgaaagctggatgcggttcgtttggccaggtgtctacaacatcatctaaattaaacttaggcagcctatacataacagaaggatttccctgatcatcatatagaactgtgtttcttcctccggtttgagcttcaacagctgctctgtaactatcttttatactaaatacaaaaggttccattaattaatcacttcctctttttgattttgtttaagaatataattaggtagagcccataaatcgagcactacttcgtctacattaaaaggttttttgaccttttcgtaaactgtttttccatcttcgtccacttctccagtgccctgcatttcatattcagctgcaggaatagttatgtttgctacataccatttatcgataccttccaccagattacctgttttatttgtgcaaatatcgacagttttcttttcatcatcctgcattacctctaaatcaaggccaatgcttttatctaaaacactcaaaactaaaaaattcccatttagggaatagtcagctttttctccagtattcaattcgttaattatcatctattgctgcacctccttatttgacatcaaagttaattaaagtccatttgatagtcgcttcatcttcactaccggtaaaactaactttaaatccatttgatgtcttgtcataaacctttatgtcaccaacaaagccagggtcaccagatacaagctcagtaactacttgataatcaggtgcatcatactgcacaaaaccatctaaagctacagctgtataattatcagcagtnacagtcacttctccctgcattattttttgctttttnattttctcaaattcctggttaagtttctgaacaaactgcagagtctggaaagcaagtatcccggatggtcctaaagctgtttgaacaccggattcaattctttccattttctttttacttataactgtaccctgctgtataacattaccatctgcatccactacatgatctatccactcgagtggagtataattttcatcatatatcatttattatttacacctcctggatatcaaaatcaaaagcgatcaataaaccttttaaatctcctttttctatctgatctggtttatcagcaaaaatacttccttcatcatcaatgagctcaaaattggttaggtccccaactccctcggcttcatttaaatagagaaagattctaagtttgctgccatctattttaa

SEQ ID NO: 200 - DNA, 4000 bp, Escherichia coli
  misc_feature (86)..(86): n is a, c, g, or t
  misc_feature (200)..(200): n is a, c, g, or t
  misc_feature (221)..(221): n is a, c, g, or t
  misc_feature (227)..(227): n is a, c, g, or t
  misc_feature (344)..(344): n is a, c, g, or t
  misc_feature (431)..(431): n is a, c, g, or t
  misc_feature (952)..(952): n is a, c, g, or t
  misc_feature (973)..(973): n is a, c, g, or t
  misc_feature (1321)..(1321): n is a, c, g, or t
  misc_feature (1333)..(1333): n is a, c, g, or t
  misc_feature (1627)..(1627): n is a, c, g, or t
  misc_feature (1985)..(1985): n is a, c, g, or t
  misc_feature (1995)..(1995): n is a, c, g, or t
  misc_feature (2015)..(2015): n is a, c, g, or t
  misc_feature (2136)..(2136): n is a, c, g, or t
  misc_feature (2667)..(2667): n is a, c, g, or t
  misc_feature (3251)..(3251): n is a, c, g, or t
  misc_feature (3254)..(3254): n is a, c, g, or t
  misc_feature (3263)..(3263): n is a, c, g, or t
  misc_feature (3274)..(3274): n is a, c, g, or t
  misc_feature (3284)..(3284): n is a, c, g, or t
  misc_feature (3369)..(3369): n is a, c, g, or t
  misc_feature (3429)..(3429): n is a, c, g, or t
cctattaaccgttaaaaactctatccatactgataccacgttcaccagctatcgtataggcatcacgcatttgagctaatgctgcnattgtcgcctttacaaggttgtgaggatttgaagacccctttgactttgcaatcacgtcagaaacaccagcactttcaagcactgcacgcatagcaccaccggcctttagaccngtaccagctgctgctggcttnagtagnacttgagcaccaccaaaagaaacttcaatttcatgaggaacagttccttttaatacaggaactttcacgagattcttttttgcagactcaacacccttagagattgctgttgtcacntcaccagccttaccaaggccccagccgacaacacctttgccatcacctacaacgacgatagcagcgaatgtgaatgtacgaccaccntttgtaaccttggttacacggttgatagcaaccagacgatctttcagttctacgtcactatttactttaactttattcattgccataatcgtttagaatttaagtccaccttcacgagctgcatctgcgagagcctgtacacggccatgatacaagtaaccgttacggtcgaacactactgactctatgccggcagcctttgctttttctgcaacaagtgcaccaactttctttgcctgttctatctttgccaacttttcaaggcctaatgaacttgcagaagcaagcgtcttgccagtcaaatcattaataacctgagcgtaaatctgcttattagagcggaaaacacttagacgtggacgctcagctgttccgttaacactcttacgaatgcggaactttatcttaattcgtctttctactttctttgttgtcataatcgtaaaatcaattaaaattacttagctgcagcggtcttaccagactttctacgaataacttcacccttgaacaggataccnttacccttataaggctcaggnttacggaaagaacgaatttttgcacagatgagaccaagcaactgcttgtcacatgactcgagtgtaagaattgggttctggtttctttctgatttagactcaaccttgatttcttttggaagttccatgaaaatagggtgagtataacccaaagagaattcaatgagattaccttgattagaaacacgataacctacacctacaagttcaagtactttctgatagccttcgcttacaccaacaaccatgttgttaacaagtgaacgatagagaccatggaaagattgtttctgcttaatatctacagggctattctcatctacgctgaaagtgatatgaccatcagcnatttccatcttnatagaaggatctacatactgagagagttcgcctttaggacctttaactgtaactacatttgtcttctcatcgaagtttactgtaactcctgctggaatactaattggcaatttacctattcttgacatattaaaatcctccaattaataaatgtagcaaagaacttcaccaccgatctttaaatcggaagcttccttgtctgtcattacaccttgggatgtagataagatagcaatacctaatccgttaattactctcggcatgtctttataaccggtatacttacgcaaaccnggtgtagacacacgcttcaaactcttgatagcgctctgctttgttgatggatcgtacttcagtgcgaccttaattgaaccctgaggaccatcttcaatgaacttgtagttcaagatgtatcccttctcgaagaggatcttggtgatctctttcttcaagttagacgcaggaacttcaactacacggtgatgagccatgattgcgtttctgagtcttgtcagataatctgctattggatctgtcataaaatataaatgtttaattaatcgggacaaccccgacaatattaaaaaaatccgtttaagaacgattagaagtaaagtgactgatgttcgtctgtaaagcaagccgagtagantaactttccnattccaaagaaatcatcgtntaaaagctatcaaattgtagcacattatgacgcttattaccaaatgaaatattaggaattataaagctaatcaaaaggagcttaattacagatgcttaaacatcattcactttgctattcngaattaccagcttgctttcttcacaccaggaatcaaaccagctgatgccatctcacggaactgaatacgagacaaaccgaactggcggatataacctttaggacggcctgtaatcttgcaacggttgtgtagacggataggattagcattcttggggatagcctgaagtttgcgtgcagcttcataagcttcagcaacatcttcagacgtagcgataatctttttcagagctgcgcgcttttcagcgtaacgagcaacaagctttgcacgcttaacctcgcgagctttcattgattcttttgccatattccttaatcgtttttagcgttcttgaatggaagtccgaatgccttgagaagagcaaaaccttcttcatcagttgctgctgaagtaacgaaagtgatgttcataccctggatacggtctatctcatcgatattaatctctgggaagataatctgttcggtaatacctaaagtgtagttaccgcgaccatcaaactttgttgtgatacccttgaagtcacgaatncgtggaagagaaacacggataagtctttctaagaactcatacatgcgctgaccacgaagtgttaccatgacgccgattggcatcttcttacgcagtttgaagtttgcaatatccttcttagaataggttgcaacagccttctgaccagtgatagcggtaatctcattaactgcaacatcgacaatcttcttgtcttgtgttgcatcaccgagaccctgattaatcacaatcttcttcaaaacaggaacctgcattgctgaagaatagttgaactgcttctgaagttcaggagctatagtctccttatatactttctttaactgtgctgtatccattatttaatttcctcccctgactttttagcgatacgaatcacattcttgccttcatgcttgatggcaactcgagtagctttaccactcttgggatcgatcagactcagatttgatacatgaataggagcctccatctttacaatgcccccctgaggattctttgctgaaggcttagtgctctttgatacaaggttacgtccctctacgatagcacaattcttgctaactaacaccttgagcactttaccngtnttgcccttntctcttccggnaagaacaacnaccttatcgtcttttcttatatgtaacttactcattacttacttgttttatgattaattaaagaacctcaggtgctaaagaaacnaccttcatattcaccgcacggagttcacgagcaactggaccaaagatacggctaccacgnagttctcctgcattgttaagcaatacacaagcgttatcgtcgaaacggatataagaaccatctgcacgacggatttccttctttgtgcgaacgatcaaagcttttgatactgcaccctttttcaaatcacttgatgggatgacgttctggacagctaccacaataacgtcacctacgctggcataacgacggccggtaccaccgaggacacggatacattttgcttcacgtgcgccgctgttatcacatactgtaagtcttgattctgcctgtatcataattacttagctttttctacaatttgtactaatctccatctcttagtctttgacagaggacgagtttccataatctgaactgtatcgcctacatttgcttcattcttctcgtcatgagcgtggtatttctttgtcttttgaacaaacttaccataaatagggtgcttctctttgaacttagaggctataacaatggttttatccatcttgttgctgacaacaacaccctgtcttacttttcttaaatttcttgtttccatctggaccattattatttattaagttctctctga

SEQ ID NO: 201 - DNA, 4000 bp, Escherichia coli
  misc_feature (1954)..(1955): n is a, c, g, or t
  misc_feature (1960)..(1961): n is a, c, g, or t
  misc_feature (1967)..(1967): n is a, c, g, or t
  misc_feature (1978)..(1979): n is a, c, g, or t
  misc_feature (1982)..(1982): n is a, c, g, or t
  misc_feature (1987)..(1988): n is a, c, g, or t
  misc_feature (1993)..(1993): n is a, c, g, or t
  misc_feature (2008)..(2009): n is a, c, g, or t
  misc_feature (2018)..(2018): n is a, c, g, or t
  misc_feature (2021)..(2021): n is a, c, g, or t
  misc_feature (2026)..(2027): n is a, c, g, or t
attcttcggtttcgtcccggcgggaacgcaaaacggcctttacgcatttgtcgtaatccggccggccccatacttccaccgtgtcgtaatcgtacgccttccttgcggccggtacctggtcgccttctgcttcggccataggttccggcgttacttccacttcggtaatattgtagttgtaatgccaactgccgttgcccaagtcctgcaaaatgggcggtctatcgtttgaatttgatttcatacttcgatgttttagaaagtttcttaatcaagtgtttgctatcgcaagacttcgcccaaccccaccaagggcaaatagcctgcttaaagtccttttcggataatggccttttccgtttgttcagcttcgccaaccgccggcaaaaagtctttttaatgccctttcgcattcgggtatgcgtgtggaaaaatacatatcctacgaagtcgataccgcgagccgctacggggaaaacttgccaattccctttaacctctaatttcaaatcccccaaatacgccctaatttcgcccattaaggaatgaaggtaggatttatccgaagcaagtattacaatatcgtccgcgtagcggaagtagtgctttacccgcttctgttcctttatccaatggtcgaagtaggttaaatagaggttagcgaaatattggcttaggtagtttccgataggtacgccgtccgccgaatctataatttcgtcaagtaggcgaagtagccttttatccttcaacttgcggcgcagaatggattttagcacgtcgtggttaatcgaagggtagaacttgcgaatatccaatttcaaacaaaacgtagtaccttccgggtcttcccgtagggcctgttttaccttcttcgcggccgcatgaatcccccggttcttaatgcagctataagtgtccgccgtgaaggtcgaaacccaaataggctctaagacgttcattatagcgtggtgcaaaatacggtcgggaaagtaaggcaagcggtatatttcccgttctttgggttcgtaaatagtgaatacgtcgtacttcgatgtatggaaagtaccgtttagcaaggtttcgcgcaacttcaataggttcacttcccgttttttatcgtgttcgataactccgtacgtgcgtaacttacccttacgggccttttcgtccgcaagctgcaagttctcgatagaacaaaccttctcgtacaagttacctattcgcttcatcgcactacttatttgctgattccttagggaatgttcgggaagtcctactaataccccttaaatagttgttgttttttgccaagtggcaaggtttttaccccgttaaaatctgcatagctgggagctgacattcgcattcgtattcgaagccgtgttattcgtattcgcgtacgaaaagccggcattcgcgctgttattcgcattaccgccgaaaagcacgccccaagggtaaaccgcctttattttcactcgaaataataccttgttcccgaagcccgcatagttactttacgcgggaaggcgttacgctccttaatcttcccaaggatatatttaatttcttgcgaattggtaaagaacttccgcgcgtctttatccgggtcttctttattgaacttaatcttaaccaagaagcgaccggttccgaacttcgttttaacgtcgtccaagaagtcaataacccaaaaagaaaggttaattaacttctgctgggttatttccgaacaattgaagtgcttgttattcgcgtccggctcaatctgcaagaaagctaaacttccgtcgtcctgcctgttgttttccatttttgcgaaaaattgaacggcgggcattcgtcctaatttgagctacttcgaaagcccgccgtagttaaacttctttgttaaatgcgttccgttacgtgtcgtttcaagcgggtaaaaagcaaagccgggagccgacanncgcanncgtatncgaagccgcgnnatncgtanncgcgnacgaaaagccggcanncgcgccgtnatncgcannaccgccgaaaagcacgcccctttgtccggtattgcttactacgttcgtatagaagtaatcggcgaagtaagtagtagaacttgcgcctactgctgtcggcatattttcgccgtactcgccaatcatcataattttaacgtaaccttcattgcggggtagctcgccgcgcttctcgtaatcggtatagtcgttactttgaaacttggccgggtcggtacatacgaaaaactcactaacgccgcccgcgtccgcactttgaatattgcacttgcatccgtccgtccaactccatacgtgcccgaaaggattttccaaacctcggtagctgggtacgctaagggtttggccgtcggttccgtcgcttttcttgtatgtgtagtttactacgcctgtcttatttcccaacgggttggtaaccccgcaaggaaccatagggttataactgttatagccgtcccaatcgctcatattggtaacgccttggcttaatccgccctgcttatatccttcgcttgtaggttccgcgttataggcaagttggcaattaaagttagcgtattcgacggcgtaaagccaccagcaagttttttgtacttcgtaaacgtcgcaattccaaccggccccgttcttgccggcattcccccggttccgggcatacttccgaaagttggtaaggctgatagatgtagccggcatacctaaaaggcttctatatgttccgtcccaaccggccgtattgttaccgccacggaaagccgtagaagtatttacgacgcttgcaagtttcggcgtagccgatacggtgcggtctacggccgcttcgtaagccgaacgataggcaagctgcaccaaatggaaccccggtagcgcgtgttcggaaagaaggcaccggaatttagtaccgtctacttcaaatttgcggtagtgggctggtatttctaccattacttgcccgtcggtgccgtcaagtttggcggcggctcccgtatcgcgcttggtgctgtcgttcgcgtgaaggtaataagctaccgttccgttgtcgcgcaagacacaacggcgcattttactttgaataggcagcgaaacgtgaagttccgggcgaccaattcgggtacaagccgaagaagctacgttagaatcccattctataccgtagtagtaatcgtagggaaacgtcggcttcgtgtttcctactccaatcaataaacccatagccgtataagatttagtacccccaaacaagggtagcgttaatactcgtttgcttaatctcgcggactatttcggggttccaacctatttcgaagcgcgtagctacgaacttgcccggctccatgccccaaaggtttacttcaagaacgacggcggtttctccgtcgttcttaatgttaaacggcgtatcttccattttgaagttacccgtacttagcccttcaatggggccgattgttccaatttgggcggaaaccgtttcgccccctcttgttgtactcattttgtcgaaatattaagttacacaaaaataccccgttgcgtattattataatacgcttgttggtaaaaaattaaaaactaactttctgccttcgtagaatagcgagtatggtttcgtaaaatccaagttccataaatattcacaaactccattaactcaccgggagataataccccaacttgggtataggaagattttgtaccctttacgaccgtacagggatatgatgatgaattatataacgcacaattatacccgttatggtcttcgttggcctccattaaaaccccgaattgtgctccggcggtcaaggccatgtagcaattttcggaaactgccaacaccgtagtaaattgcgaaggcgggcagttggtttttgtatatatcgttttatacgacccgctcgtttcaaagtaattggaaacgcatcgtccgtccttatatactcggaacttggcccggttgccctccattgcag

SEQ ID NO: 202 - DNA, 4000 bp, Escherichia coli
  misc_feature (161)..(161): n is a, c, g, or t
  misc_feature (216)..(216): n is a, c, g, or t
  misc_feature (239)..(239): n is a, c, g, or t
  misc_feature (246)..(246): n is a, c, g, or t
  misc_feature (275)..(275): n is a, c, g, or t
  misc_feature (437)..(437): n is a, c, g, or t
  misc_feature (1571)..(1571): n is a, c, g, or t
  misc_feature (1598)..(1598): n is a, c, g, or t
ccatcgcaggggtgcctcgaatcgagcgctgagattataccctcataacctgaccggataataccggtaggggagcaaggcatggaaaggatgttttccatgattccaggccgcactgcgtcatttagtaattaaaaactcaaacgacgatgcgcaagacntctttattctttattctttttggatgcccgtgtatcctcttctcccaagcgaagnccccggaggattcaccgcaactntcagaanttcaagtggattccatcttgaaaacggtngaattgttgccagcaacgattgcagccattcaaaacccggaaagagctccgtttccaagacaaaccattgatgcggttgcattagccaagcgcgatggttccatggacatgccttttttacttcgctttaccccttcattggtggtgacttcggatgcgggnggcggtgtaggttacacatcgatgcgcatccgaggatcggaccagacccacatcaacgtgacgttgaacggtgttgcgctgaatgatgctgaatcccatcaagtgtactgggttgatttgccagacttatcaagcagcgtggacgagttgaacattcagcgaggagtcggaagttcatcgaacggaccgggcgcgtttggagccacggtgggcatgcaaaccatgcaatttgatcggaatccaggcggaaaattgctggttgcaggaggatcatttggaacgcaaagaagcatgcttaaatggtccaccggcgagttgggtgctggtttctacatggagggaaggacctcgcggattttgtccgatggatacatggaccggtcgggaagcaagctgaccagcatgcaattgggattgggctaccaatggcaatcgggtcagatgtcctacaccgcgatgttggggcacgaacgcacgcagcaagcttggtatggcgtgcctcaggtgtcgcttaacggaacgcccgaagaaatttgggactgggctgccaactcttacgaatatggatacggtgcggatagcacccgaatattggatttgatctcccgaggtcgccagcataattattaccggtatgtggatcaagtggacgattaccgtcaagaccatcatcagatccatgcgagtcaacgatggggagcatgggattttggagcgaccgttcattatacagcaggaggcgggtattatgaacagtaccgggaggcggatgatttgagcctgtacggtgcaggcgatttgggactggcggataccaccatttcttctggggatgttattcgccgaaggtggttgggcaatgacttttacggcgcgttgatccagggcacaagaaaatggtcatcgacagccttgcagttcggtgccggttcttttcgttacgtgggcgaccattttggccaacccatttggatgcaatatggagcgtcccagctttcgccgcagcaccgatactacgataaccgaggtgaaaagacggatcgttacggattcgtaggcttggatcgggatgttttcggaggcgatgtccgcgtgcgtgtggaagcacaatggcggcaggtcggctatcaggtncacggcacagacaacgaccttcgcgtnctcgatgtggatacggtgatggcttttttgaatcctaaagtgggagcagattggttgattaatgaccaaaatcgtgcgttcatttccgttgcacaggcgagccgagagccagtcagaaccgactacattgaccgagccaccagcgcctatccgcttccggagcacttgaccgatgtcgaactgggatgggaacattcaacgtcgacctggagcattcaggccgtggctttttacatgcggtatgccaaccaattggtgctgacgggagccctcaatgacacgggctctcccattcgccaaaatgtcgaccgcagttacagagcaggccttgaatggacccaagagtggaggccattcaatgggtttaaatggtacggaacgaccacgctggccctcaatcgaatcgaggcatttgatgaggtcttatttgattatgccgagggatttgaccccgtcgtctcggtggcgcatgagggcaccgctatcagtttctcgcccggcttcacagcctctagcgtggcttcttgggagttctggaaccggatttcatccgaaggtttgggatcgaccgcttcggtagaatggtcctttcggcatgtcgcacgtcagtttcttgacaatacctcatcggaaagccgttctctgccagcttatgctgttcacgatgcgcgcttgcgttggatgaagcaccgatcgaatgcggggcacataggcgtttctttgtttcttaggaatctcctgaatgcccaatacagcgcgaatggttggacatacagttatttgtatggaggcctagatgccatgtcaaccgaggtatacgtttaccctcaagcgggtcgcaatggactcgtctcagtggaactcaccttctgaaatcagagctcgttcatccggtttggcgcgctatcttttggtagtttttggggtcgggcagccaagacaaatcttgcgggcgctgctctatggcctggccgacaacgaccaagtctgctcctgcatgccaagcggcatggattcctgcggcatcttggatgccaccgccgatgatcaagggcgtggacgtgctcttacggactgctgaaatggccgatacaggaacgggttgtcctgcaccgctgcctgcatccaggaaagtcagtttgagacccaacatttcccccgcgacagccgttgcagcgacgatttgaggtttatggagggggatcggtgttgtttggctgatgtacgccgctgtgctcaatggaccgtcaccgactaatatgtaacccgttgggacgacctccatgcccatctgtttaattcgcatggccgattctacgtggcgaccaattaaaaagtcggggtttcgtccggaaatcagggagagaaaaagaacgctgtccgcaccgggtgttacttgttcaggagagccaggaaaaatggtcaacctaccttgaaagcgagcccgcaatggatgaagcacatctttgacttggcgcctgttgagcaagctacctccgatgaaaacatccgtgacgggggacgctgccaatgcgtcaatgaatcgcacccaatctcttccgacgggcaagtcatccgggtcgagcaaagcggcaagccgcttagtgccttccatctgatcttgtacgagagtactcagccaattcatgaacggaatatacgttgaaaggtgggatcaagcacctcttccctcagcattccatgtcctgagggtatggaatgaaagtgaatatgcggttgttttctcgttagccttttaaggcggtttgcattggatgcgggaatgattttatcgcggtctccaaaggctaagtcgattcggttgctctcgagaaacgcgcgactcaacgctcggtgtgttggccagcacaaccgatgtgcacgccaaccgtgccagaccatcatgcgcatttcgtgtgattcgatatgaaattcactgaaggcatacaggtgttttgacaacaagccaacggcatgcaatcgggcgttcaatctgcggataagcgcggcatttcggtcaatgaaaaaccaagcccatcggccaaggcgagtgtgaactgttaggcgatagaaaggcgattttttcaatccgtcaggtgccatcaaaagggtgtgcgaccatttttggggggtatcgtggataagggccagagccacgcgtccaccgatgctgtagccgaataatttgcgttgcttggcctgcggtgcttctcgttgagctatggcttcgagcactttgttcatttcagatggcgagatggggtgatcccatggaatagaatccgatcgcggttggctttgtccgtggtgcaataggtgcactccaatgaagcaatcagtgggagcccagcgtttcgcaacgggcagtaaatcttccagcggccttgcaaatccgtggaaac

SEQ ID NO: 203 - DNA, 4000 bp, Escherichia coli
  misc_feature (1)..(10): n is a, c, g, or t
  misc_feature (12)..(15): n is a, c, g, or t
  misc_feature (17)..(18): n is a, c, g, or t
  misc_feature (20)..(20): n is a, c, g, or t
  misc_feature (22)..(25): n is a, c, g, or t
  misc_feature (28)..(28): n is a, c, g, or t
  misc_feature (30)..(30): n is a, c, g, or t
  misc_feature (32)..(32): n is a, c, g, or t
  misc_feature (34)..(35): n is a, c, g, or t
  misc_feature (38)..(39): n is a, c, g, or t
  misc_feature (41)..(41): n is a, c, g, or t
  misc_feature (44)..(47): n is a, c, g, or t
  misc_feature (49)..(59): n is a, c, g, or t
  misc_feature (61)..(64): n is a, c, g, or t
  misc_feature (66)..(67): n is a, c, g, or t
  misc_feature (69)..(76): n is a, c, g, or t
  misc_feature (78)..(81): n is a, c, g, or t
  misc_feature (83)..(84): n is a, c, g, or t
  misc_feature (87)..(88): n is a, c, g, or t
  misc_feature (90)..(93): n is a, c, g, or t
  misc_feature (95)..(100): n is a, c, g, or t
  misc_feature (102)..(104): n is a, c, g, or t
  misc_feature (106)..(106): n is a, c, g, or t
  misc_feature (109)..(112): n is a, c, g, or t
  misc_feature (114)..(115): n is a, c, g, or t
  misc_feature (117)..(120): n is a, c, g, or t
  misc_feature (123)..(123): n is a, c, g, or t
  misc_feature (125)..(131): n is a, c, g, or t
  misc_feature (133)..(135): n is a, c, g, or t
  misc_feature (137)..(138): n is a, c, g, or t
  misc_feature (140)..(142): n is a, c, g, or t
  misc_feature (144)..(150): n is a, c, g, or t
  misc_feature (152)..(153): n is a, c, g, or t
  misc_feature (156)..(157): n is a, c, g, or t
  misc_feature (159)..(160): n is a, c, g, or t
  misc_feature (163)..(166): n is a, c, g, or t
  misc_feature (168)..(168): n is a, c, g, or t
  misc_feature (171)..(177): n is a, c, g, or t
  misc_feature (179)..(179): n is a, c, g, or t
  misc_feature (181)..(181): n is a, c, g, or t
  misc_feature (184)..(186): n is a, c, g, or t
  misc_feature (188)..(191): n is a, c, g, or t
  misc_feature (193)..(199): n is a, c, g, or t
  misc_feature (201)..(205): n is a, c, g, or t
  misc_feature (207)..(208): n is a, c, g, or t
  misc_feature (212)..(213): n is a, c, g, or t
  misc_feature (215)..(218): n is a, c, g, or t
  misc_feature (220)..(223): n is a, c, g, or t
  misc_feature (225)..(225): n is a, c, g, or t
  misc_feature (227)..(228): n is a, c, g, or t
  misc_feature (231)..(233): n is a, c, g, or t
  misc_feature (235)..(235): n is a, c, g, or t
  misc_feature (237)..(240): n is a, c, g, or t
  misc_feature (242)..(245): n is a, c, g, or t
  misc_feature (247)..(252): n is a, c, g, or t
  misc_feature (254)..(261): n is a, c, g, or t
  misc_feature (263)..(264): n is a, c, g, or t
  misc_feature (266)..(267): n is a, c, g, or t
  misc_feature (269)..(269): n is a, c, g, or t
  misc_feature (272)..(276): n is a, c, g, or t
  misc_feature (278)..(278): n is a, c, g, or t
  misc_feature (281)..(281): n is a, c, g, or t
  misc_feature (283)..(287): n is a, c, g, or t
  misc_feature (290)..(297): n is a, c, g, or t
  misc_feature (299)..(306): n is a, c, g, or t
  misc_feature (308)..(315): n is a, c, g, or t
  misc_feature (317)..(318): n is a, c, g, or t
  misc_feature (320)..(325): n is a, c, g, or t
  misc_feature (327)..(330): n is a, c, g, or t
  misc_feature (335)..(345): n is a, c, g, or t
  misc_feature (347)..(352): n is a, c, g, or t
  misc_feature (355)..(356): n is a, c, g, or t
  misc_feature (358)..(361): n is a, c, g, or t
  misc_feature (363)..(363): n is a, c, g, or t
  misc_feature (365)..(373): n is a, c, g, or t
  misc_feature (376)..(379): n is a, c, g, or t
  misc_feature (381)..(383): n is a, c, g, or t
  misc_feature (385)..(401): n is a, c, g, or t
  misc_feature (404)..(404): n is a, c, g, or t
  misc_feature (406)..(407): n is a, c, g, or t
  misc_feature (409)..(409): n is a, c, g, or t
  misc_feature (1220)..(1220): n is a, c, g, or t
  misc_feature (1229)..(1229): n is a, c, g, or t
  misc_feature (1250)..(1250): n is a, c, g, or t
  misc_feature (1253)..(1253): n is a, c, g, or t
  misc_feature (1257)..(1257): n is a, c, g, or t
  misc_feature (1259)..(1259): n is a, c, g, or t
  misc_feature (1268)..(1268): n is a, c, g, or t
  misc_feature (1559)..(1559): n is a, c, g, or t
  misc_feature (1580)..(1580): n is a, c, g, or t
  misc_feature (1992)..(1992): n is a, c, g, or t
  misc_feature (2074)..(2074): n is a, c, g, or t
  misc_feature (2146)..(2146): n is a, c, g, or t
  misc_feature (2525)..(2525): n is a, c, g, or t
  misc_feature (3434)..(3434): n is a, c, g, or t
  misc_feature (3611)..(3611): n is a, c, g, or t
  misc_feature (3878)..(3878): n is a, c, g, or t
  misc_feature (3884)..(3884): n is a, c, g, or t
  misc_feature (3929)..(3929): n is a, c, g, or t
nnnnnnnnnncnnnntnntngnnnnggnantnannccnncnaannnngnnnnnnnnnnncnnnngnncnnnnnnnncnnnntnnggnngnnnncnnnnnncnnncnggnnnngnngnnnnccntnnnnnnngnnncnncnnngnnnnnnncnnccnncnnggnnnnanccnnnnnnntnanggnnntnnnngnnnnnnngnnnnngnntttnnannnncnnnngncnnccnnnancnnnnannnngnnnnnntnnnnnnnngnngnntnccnnnnngnccngnnnnnggnnnnnnnncnnnnnnnncnnnnnnnnanntnnnnnncnnnnaaaannnnnnnnnnngnnnnnnccnncnnnngntnnnnnnnnnttnnnngnnnannnnnnnnnnnnnnnnnccngnngnacgtaggagggattcatggctgacgtacacgcagacaagaaccaggacgagtggaacgaggagaccgtctacggtccctccaccgtgatcgccgccctcgaccagatcgaagacctcgtcgagtcctcccgcgcgtttcccctgtcagcttccatcatgatcaacaaggccgaaatcctcgacctgctggatcaggcgcgcgaagccctgcccgaggacctcgtcgccgctgacgccgtcgtcgccgacgcggacgccgtcctgggacgtgccgattccgccgctgagacgcgcatcgccgaggccaactcgcgtgcctcctccaccctcgaccaggccaatgagcgtgccgcccagatccgctctgacgccgaagaagaggctgagcgcacgcacgcacgtgccgacgccgaggctaccgccctgatctcccaggcgcgcgctgacgccgaagccaccattgccgacgcgaacgcgcaggccgagcgcatcgtctccaccgagaacattgtgcgcatggccgaagaccgtgcccgcgaaatcgtctccgaagccaagcgttcggcgacccagctgcgcgagggtgccgacgactacgtcgccacctcccttgacgaactcgcgcgccttatttccgacgtgtcacgccgcaccgaggccggtcgccgagcgatcgccgaacgccgcggcgtcgacgtcaccgatgtggacctgagtgatgaatgacaagaccttgaccctatccctggcgcgcctaccgcgcgcgctgggatccacgctccacgaagacatcgtgtggagcaccccagangacctgggnaccccctccatggcggttgcnccnggcncncccctggangtgtccgttgacctgaccagcgtcgaggacggcgtccttgttcaggtcgcgacgtccgtggacctggtgggggagtgcgtgcgctgcctcgacgaggtacgcgaccaccacgacgtgtccagtgcggaggtctacttcgaacccggcgctcctgccttgacgtcctccgatgaggaggacgaggaagccgacgacctttttgtgatcggtgaacgcgacacgatcaatatcgacacgcagctgcgcgatgccatcattaccctcgtcgacccgcttcccctgtgcagcccngactgcgcgggcctatgcgangtgtgcggagacaagtgggctgacctgcccgccgatcacgagcactttgtcgtcgatccgcgtctggcctccctggcgtccctgctggacgagcacaccgagccggggcgatcctgatggcccgctcaaagcaccttcccgtcccgccgcgcaccgacaccgacgcgctcgtggaggcgtggggcacgcgcattgatgctcccttgttgcagctcgcgctcgtgcaccgctcctacgcgaacgaggccggcggaatcgcgaacaatgaacgcctggaattcctgggcgactcggtgctctcgatcatcattgcgcagaagctctacgagcagtatccggacgtggccgagtcggacctgtcgcgcatgcgtgcggctaccgtctcccagcagcccctcgcggcggccgcccnccgcatcggcttgggcgacttcgtgttcctgggcaagggtgaatccatgcatgggggacgcgagaaggactcgatcctgtcngacaccttcgaggcactcatcggtgcgacctacctgaccagcggattggaggaggcgcgtcgagtcgttctngagcgcctgcgtttcctgctggtggacgctccctcgcgcggccatcaccaggactggaagacccttctcgtagagtactcacagtctgagggcctgggtgaagtcacctatgcggtggagggcgagggtcccgatcatcagcgcgtgtttaccgcccatgccttcgtcgccgagcgctccgacgcggtcggatcggggcaggcctcgtcgaagaagcacgcggagaatgcggccgcgcaggacgcaatgaatcggctgtccccagaagaagaataggtacccgagggcgtccgccctcctaacagttagtatgaactcgtgagtgaaaatacttccgcgcgcacgcgcgttatgatcgtcgacgatcacgagatcgtcnggcgtggtattgccgaaatcgtcgaccgcgacgagtctttggaggttgtcgccgaggccggttcggtcgcagacgcggtgcgtcgggccgacctagtacgccccgacgtcatcctcgtcgacctgcagttgcccgacggcaccggcatcgacattatgaacagtctgcgcgccacccacccgcagatcctccccgtcgtcctgacttcctttgacgacgacgaggccttggctgagtccctggaggcgggtgcccgcgcgtacatcctcaagaccgtgcgcggcgctgagatcaccgacgttatcaaggcggtcgcggacggccgcgtcctgctcgacgagcgcacactgacacgccgccgcgtcgatcacgaggatccgaccgccgacctgacgccgtcggaacgcaaggtcctggaccttatcggcgatggcctgtccaaccgcgagatcggagagaagcttggcgtcgcggaaaagaccgtgaagaatcacatcacctctcttctgtcgaagatgggtctgcagcgacgcacgcaggtggcggcgtgggtggccgggcagagggcagccgcgtggcgtaactgaacccaggcctcgtcccctgcggggatgagcacgacgggaagcgggtcggatcaaccggcccgcttcgctgtacccgatgccgacagtcaagaatcatacgagcgtgtcagtttcgctctcatcatggattctactggttgtggggaagctccaatcaaaatggtttgcggataagttacatgaggtaacgttcacctcatcctcatcgacgaggacgggcaatgcagtccactacccctgtgaaaggacacaccgtgaacctcaagcgaacgcttgccggttgtgtggccgccgcgacacagccgcccgtcatcgccgcagnccccgcctcgacgtccacgaccgagggagaggtcgcgagcttcatggtcgtcgcctccggtcgcacgctcgccaccatccagtggcgccgcatgcccaaggacggaacagaggccacgatgatcgagggaccccgatgcctcgtactcgctggaaacgatgctggccgctgacggtncccagttctacgcggtggcgacgaacgctctactccaagggcgcgatccaacgtagcagcgtgccaaccccgccctcgccgggtcccgcgtcgaagctacctcggtggcgacgggcacgctcggtcatgttcgctatgcctgagttgcgcgtgcgattcggatcgataccccggccgtcgtcggtgatgaggatacgcacgcgaccgcacttgccctgcccggacacgtcgacgttgacggtcgccgccgtcgcgtgggcgtggcgngcaatnttggacaggccctcgcgcacgatagcgacgacgtcgtcggataantcagggtcgacgcggccattgaactcgtcgatgacgaccagttcgttgtccaggtcagagttgatcgcctc

SEQ ID NO: 204 - DNA, 4000 bp, Escherichia coli
  misc_feature (38)..(38): n is a, c, g, or t
  misc_feature (132)..(132): n is a, c, g, or t
  misc_feature (143)..(144): n is a, c, g, or t
  misc_feature (150)..(150): n is a, c, g, or t
  misc_feature (940)..(940): n is a, c, g, or t
  misc_feature (1830)..(1830): n is a, c, g, or t
  misc_feature (1876)..(1876): n is a, c, g, or t
  misc_feature (1989)..(1989): n is a, c, g, or t
  misc_feature (3150)..(3150): n is a, c, g, or t
  misc_feature (3986)..(3987): n is a, c, g, or t
gacttcggatgccaggaaggccgcgagctcggccgagncgaagggggcagtcgagccgctgtcgccgccataccccgccgtgtccgcatcggccttgagcatggccgcggtgtaggtgaaggtcgcgattanctcgctggtcnngtcgangaaggtcagggtgaaaccgcccgccgtcagatcatcggccggcgggcccgcactgccgctcgagagctcgaacgcggcatcgtaaagcacgcggggcagggtggcattcaggacgccatagggccacatccccacgtcgagaggagtcgagcccacgccccagctcgtgacactccatgtagtgccctcgggagtgaacgaagccgcgttcgtttggtcgtccggtccctcgcccgaggtcagaacgtagaaagcaacgtcaggattaccgcccgagtcatcggacatccggatcggggagttggcttcgaccaccgtcttaagccgcgtttgaatggtggatggcaccccgtcgccgtcggaaaggtccgagatgtcaagggtaaaccggccctcggtctgcacgtaggtgtcatcttttttgacttcgacgtacaggagctcagtcaccgaaagcgcgaacgcgaagtagtcgtattgggcagcacccgacggctggccgcagtagcacgtgagggccggaaagcgcccggtcaagaagtcgtcatggatgacggacagatcccccgtgtagttgttgagccaattgaggttgccccaattgttgatgacgaacgagaccgcttgctcgacattggcgaagggtagccaagtcgtcaccggcgggcttccagactgccccgctgccacccatgccgccgtcccgtcgcggctcaccacgatggagcccgcgggccggtagcttggcggcgaggtcccgttgtcgatggcttcaaaagccttgtagctngtcgggggaatgccggcgggcccgttgaccacgggagctccgcaaggaatgccggtcgagggtgatccgctgcccatggggagaactccaccgagttgaacgtctgcgctcatgtggcggccgcttggctaggggtttgcgtgaaaacgatcaaggtgctgcaccccggaaggctttggggcaccaagcccgacttcgtccacgcttgaaccgcggggtgaccgtcgagaaaatcggtgaacgagtcgtagcccgtccaatggataaacttcgttgcgccgctggtcgggtctgcgatcgtgcccgcgttgatcgcctcggccacggcgagatcatcctcgtgtatctcgcgcccaaagggtcgaccgtcgccatcgcccgccgtgctgtagcgccggcccgcctgcgttcccagcgtgcccgggttgacggtgatcgctttttcgatactccacccgtgcgcggccgcatcgttctttaggacccactggatcgcggccttctccgtctggctcgctcccgcgtgctcgctcgcgctcacgcgcgacatgcccacagcatcggccgtgacgtcactccggcccgtggccgcgttgacctgggccacgaggtcagagagcgactcttgcagcgacccgtccgcgtttagatgcgaggtcgtgagctgctttccacgaccaaggaaggcccgcacgacttggatcggatcatcgcccatgaaaaaccaccatgctaagaggagtagcacaccaagccagaagaccagatgcgaggttttcaaggctcatgcccccaccgggtagattatgtcgaacgtgctggggatcgtggctctgacgagggccaccacatgatcggccagcccatcgcagcccatgaccacgttcgcncggagctcgagcgctaggcaaaggttccaggcgggcaactcctctngcgtggcatatgccggattcaaggagtaggacaccaccaagcggataccgtcgccgccgtctgtgatctcgcagccgtcccctaggccgttgccgaaggtcccaccgttcagnaagatcgcggagttgatttgccccaaaacatgggtcaccccttggttgtcccgtcggatagcgaaggccgcgagcccacaggcccacccttccccctcggttccgttgtaggcaccaaggggatcgtaccccgggaaattcgcgagccactccgcccggcgaaagaaggccgaggctaccaggcacatgcgccggtcaaggccccagatgtcgatcgtcgcctgacccgtggttgcggtcgggttgcggtacgcgtcgccgtccaaaggattgtggaccgaggcaatcacgagctcgagcccgcgatcctgccccagcgggacacgcgcttgcccgctcgagaggtcccacactagggagaatttgcccatggtcggagcttaggacgcgctgtcgctgtagtcgtcactcccatacgaacccatgccggtatcagaagacccggagctgcccaacagactcgcgacgctgcccgcggcgccggcgctggcggttatgagcgagctagctcccgcaagcgtgctgccggttccggtgaggaccacaggggtggacgttccgcccggcatgctcgcacccgtcgcatacgctcccgtggtggccaccacggcgggcttacgcaggatgacgaaatacacaaccacgatgccgactcccaagaggactagtgtgctggttttcatgtgctgagctccgtttcagagaagactcgccgcaacgccggcgaattgcagagactgcgcgaggctaggggccccgctcgaaagattcatccccttgccctgcgtccacacggacgaaccacccgggccggatttggtctgcccgaagccaagcgtcttggcttgagtcgatgtcatgtcgtcaaaatcgacgtacccgtacaagtcgagctccgcttgccacgcgttcagctgggccgaatactcgagcgtgccgggcacgagaggatccgtgattaccgaggtcccacccactcccccgccccaatacccgccttgcatgagttgcttgaaccattcgacgctcaagaactcgtagccctgcccgatcatggtcgcgtcgatgttgtcgatggggacgccggcgaacaggcccaccgtctgaccgttgaacgcgtccgcgccaagggtggcaaactggctcgcggtcaggctgttnaggttttgcaggttgcccttttgagccgcagcgagaatgcccgcgatcgtgggatcgctcgagccccctcccgctgcctgaacagcgtccgcggccgcatcgtaggccgttacctgcgcttgcgtgtagacggtgcccgccgtggctgcgccctggctaggcccgggcgtggcattgcccgggccggcgctcgagctggccgcggccgcggtgctagagtggtggagcaagagcaccacgaccagcaccacgacgcctagtagcagatatgtcgatcggctcgacatggccgcgagctaggaccgggccgggtgaggcgagacctggggactaggggacagctgcgaaccgggcagggcggcgagtgccttgccaaggctggcttgcaagtcgcggaaagacgaggtcacgaaagcgtgctgagtgctgggcagcgtgttgtaggtgaagttgacgggcagctggaagttgccgcgcggcttgagggtggaacgaaggtccatcccaaggcccggctgcttcaggaacaggaattttatgtcggccgggttgatgccgctgaccgtgtccggcccgccgctgacaacatcggcatagttcccgttttggtcgagcccgacgggggaagccccatagcgctgggcgtcgaggcgagccttgatgaacgcgggcacgttctgcatcttgttaatgcccagcttcgggcagtcgatctctgtgatgttgtccatggtcgtgttgccgccaaggcccaccaaggaggacagcagcgcgatcgaaaacacgtagtccttgggattcgagccgctggcgttcgtctcgttgaaccggcgcanngtgatctgcgagc

SEQ ID NO: 205 - DNA, 4000 bp, Escherichia coli
  misc_feature (127)..(127): n is a, c, g, or t
  misc_feature (415)..(415): n is a, c, g, or t
  misc_feature (1985)..(1986): n is a, c, g, or t
  misc_feature (2034)..(2034): n is a, c, g, or t
  misc_feature (2553)..(2553): n is a, c, g, or t
  misc_feature (2685)..(2685): n is a, c, g, or t
  misc_feature (2721)..(2721): n is a, c, g, or t
  misc_feature (2897)..(2897): n is a, c, g, or t
  misc_feature (2900)..(2900): n is a, c, g, or t
  misc_feature (3058)..(3058): n is a, c, g, or t
  misc_feature (3385)..(3385): n is a, c, g, or t
  misc_feature (3409)..(3409): n is a, c, g, or t
  misc_feature (3454)..(3454): n is a, c, g, or t
  misc_feature (3704)..(3704): n is a, c, g, or t
  misc_feature (3741)..(3741): n is a, c, g, or t
  misc_feature (3795)..(3795): n is a, c, g, or t
  misc_feature (3879)..(3879): n is a, c, g, or t
cagccctgccgctcgcgcaccgcgacgtacagctgtgcggtgaacaccgccgcgaccaccgacgacgccgtcgtcaccaccgcgccggcggcggcggcggcgaaggtcgccgcggcgatcccctccnggccgacgatcaggcggacgacgacgccgaccaccgcctgcaccgccagcgtcgggatcagcacgaccagcgagaacagcagcagcaccgcgatcagcttgcccgtcagcccctgcgtcagctcgatcgagcgcgggatcgcgcgcagcccgcggcgctcgttgaggatcaccgggttgagcagcacgatccgcgccgacagccacagcgcgaacgccatcagcaccagcccgtagaggaagatgaaccccgccgcgccgcccgacatctgcgcggcggtatcgggcntggtgaaatcgacgccggcgcggatcagcgcgacgatgatcggcaaaaaggcgagcgtcaggatcgcgcccagcaccagcacgacgcccagcgccggcagcagccgcgcactcgcctgcgcctgcgcgtcggcgcggccggtcgccgggtcggtcgcgatcgcgatgatcgccagcgtgccccagatcgtcgcgaccaccgacgccagcgcgaccgccgccccggcgagcgcgctgcccggcgaggtcggggtgaagctcgtcacgccggcgctcagcacgttgggcagcaggatcgcgagcgcggcgatcggcgtgatgatccccgcccgcccgcgcagcacgtcgaccgtgcgatcccagacgttgcccatgctcaccatgtcgttcgttccccgttgtcgtacccggtcactcttgcacgcctcgccgcgcgcggccagatgccgcgggtgaccgtcgcccccctcccctcgcccgaatggcgcgtctcgccggggctgacgccctatgccgacgcactcgccgagatggagtcgcgcgccgccgcggtcggggcgggcgaggcggcggaactcgcctggctgctcgagcatccgccgatctacactgccggcaccagcgcgcagccgaccgacctggtcgatccgcgcttccccgtcgtgccggcggggcgcggcggcaagtatacctatcacggtcccggccagcgggtcggctacctcgtcctcgacctcggccggcgcggccgcgacgtgcgctgcttcgtccacgcgctcgagggatgggtgatcgccgcgctcgccgaactgggggtggagagcttccgcgcgcccggccgggtcggcatctggacgatcgacggcgacggccgcgaggcgaagatcggcgcgatcggagtgcgcgtgcggcgctgggtgacgatgcacggcttctcggtcaacgtcgcgcccgacctgtcgcacttcggcggcatcgtgccgtgcgggttgcccgagttccccgtcaccagcctcgccgcgctgggcgtggaggccgacatggcaaccttggacgcagcactggcgttgtgtttcccgcgcttcctccaaactctttcttgtgcctcgcaaaacgaggcttgaggggtcgcgggtaaccgtctacacgtccacgtcgatttgggcgaaaacagggcaatcgatggcccgccaaatcctctatctagggagcttccacatgcgttcgatcttttccaaggttctgaccggttcgatgattgccggtgcggcgctggccgtgtcggcttgcggtccgaagaccgagaccaccaccgacaacacgatggtcaccgacatgaacaccaccgagggcatggacaccatgaccgacaacatgaccgccgtcgacggcagcatgaacggtggcatgatggccaacgacacgatgatgtcgaacgacaccatgatggcgaacgacaccatgtcgaacgccggcatgaccaacaacatgatgtaattgcttcggcaattaccgtgttggaggggccgtccgggcgaccgggcggccctttctcgttgcggcgagtgcgnngcgccaacgggatcgttccggctgcgaccagcggttggtcgcaaccangccaccgccagccgtcgaaactggttaattcccgctatgctcgcgcgcgaaatgcgatagattccagcgacaaggttcggtggagtagcaggcgtcatgaaggttttcggtttcgcggtcgcgatcgcagcggcgatggccggaacggcggcgacgcccgcttccgcgcaattctactatcagaattacgattacaacggcgcgccggtgcggggcgacgagccggggatcggccagccgctgccgggtgccaatcccgtcgaggtgaccgcaggcttggtctggacgctccgcgccgcgctcaacgtcgccgcgctgcaatgtcagttcgaaccgacgctgctgaccgtcggcaactacaacgccatcctgctcgaccacaaggacgagctgaaggcgtcgtgggacgtgctcggcaagtatttcaagcgcaccaccaagaccccgcgcgaggcgcagaacgcgctcgaccagttcggcacccgcacctattcgagcttcgcgacggtgacctcgcanttcaccttctgccgcaccgccaattcgatcggccgcgatgcgctgttccagtcgcgcggcagcctcgcggcgctggcgcagacgcggatgcgcgagctgcgcaacagcctcaagcccttcggcgagcagcgnttctcgcgcggcctgcgcttcgacaccgccagcgtnccgcggatggacccgatctgctggaacaagaagggcgagtggcaggtcaagaagtgcggcgccttcgcctggcccgccgcgacgccgccgatcgcccccctcgccgcagcggtccccgccacgacggtcgccaacgcgcagtaacgccgatcctcccccgccagggggaggattcngangtcagcgcagcccgagcagcttgtgcgtctgcaacgacaaccgccaccgcggccgcgccagcaccatctccacgcacgcctcgcgattggcgtcggccgccggatcgtcgagcggctggagcagatgatgcgcgaagtcccagcgctccaccgcgtcnagctcgatccccgcctgcggccagaccagcttcagctcgtcgcccgatcgctggaccacctcgctccccgccttggggctgatgcacacccagtcgatccccggatgcacgggcaacgtcccgttgctctcgatcgcgatgcggaagccggcggcgtggagcgcgtcgacgaaggcgtcgtcgacctggagcatcggctcgccgccggtgaccacgaccagccgccgctcggttcccgcgccccaatgcccctcgaccgccgcgaccagcgcggcggcgtcggcgaacttgccgccgcccaggccgtcggtgccgacgaagtcggtntcgcagaagcggcacaccgcggtngcgcgatcctgctcgcgccccgaccacaggttgcaccccgcgaancgcacgaacaccgcgcgcgcgcccgcgttcacgccctcgccctggagcgtcaggaacatctccttgaccgcgtagctcatgcgtcggcgggccgcaccgcgtagcgcgtcggatcggcgacgcccgcttcctcgaaccccttcgcgcgcagccggcagctgtcgcagcgcccgcagtggaggtcgccatccccgctcgagaccggatcgtagcacgaccagctcagccccaggtcgagcccgaggcgcantccctcgcgcacgatgtccgccttggtcatgtgctgnagcggcgcgcggatgcggaaacgctcgccctccgcccccgccttggtcgccagntcggcgaggtcctcgaaggcggcgatgaactcgggccggcagtcggggtatcccgaatagtcgagcgcgttgacgccgatgtanaggtcgcgcgcgcccgccgcctccgcccagccgagcgcgaggctgaggaagatcgtgttgcgcgcgggcacgtaggtcaccgggatgccgggctgcacgccgtccttgggcacgtcgatgt

SEQ ID NO: 206 - DNA, 4000 bp, Escherichia coli
  misc_feature (1998)..(1998): n is a, c, g, or t
atcacagataataacgccttttccggcagcaagaccgtctgctttgacaacacatgccccaagggtacgggcaaagtcgcacgctggcgctgtttgggtgaaatactcccactgtggctgggcaatatcatgtctggcacaaaaagctcgggcaaatcgctttgagccctcaagttgggcggccgctgcacgcggaccacacaccgcaataccagttgcttctagcttgtcagcaaggccatcaacaagtggtgcttctgggccaataatcacaaggtcgcaggcctcatctcgtgccaaagcaacaagaccatccagatcatctaaggatgccggaatacaatgcccgcgcccatcaatcaaatcagcaatgccaggattgcctggggcaaccagcacaagctcacataaaggggaggctgaaacagcccaggcaagggcatgttcacgcccaccgcttccaatgataagtaccttcacgttcgtcctgcctttatattttatcaagaatgaattcttacaagttctagcgtaatctgagcagatgcgccatagtatctgccatgattgatgataatgattataccctatctaatgctgcgacgaatgatgctgggcttagtaataatgcttatttgtcggttggcgagctgagtgcagcggttaagcgcacaatcgagggcacgtttgattatgttcgcgtacgcggcgagatatcacagccccgcacgccagcgtccggacatgtctattttacgttaaaagacgaaaaaaatgctcttgccgctgttatctggcgcggcgttgcctctggcttgcaggtgcgccctgaagatgggcttgatgttatctgcaccggtaaaatgacgacctttggcgggcagtcaaaataccaattaattgtgaatgaaattgaagtagctggcgaaggcgctctgctgaaacagcttgaagataggcgccgtaaacttgcctcagaggggctgtttgataatgcacgcaagaaaccaatccctgctatgccgtcggttattggtgttgttacaagcccgactggcgcggttattcgcgatattctgcaccgtgtacgtgaccggtttggggttcatgttcttgtctggggtgtgaatgtacaaggggtgggagccgctgagcaaatcactgccgccattgaaggatttaacgctctgccagagggcggtgcggtgccgcgtcctgacctgctgattgtagcgcgcggcggtggctcacttgaagatttatggtgttttaatgaagaaaatgtcgtgcgggctgcggctggctcacagattccgctgatttcggctgtcgggcatgaaacagacacaactctgattgactatgcttctgacatgcgagcgccgacaccgagcgcagctgcagaaatggcaacgcctgttgccgccgagcttgctgcgcggttaagtgaaattgatgcccgtctgcgccgcgcaattacccgccagcttgataatgctgagcagatggtacgcgctattatgcgcggcctgctacatcctgcagaacagattgcacgccagacccaaagccttgatatagcgcttgctgggcttgatgccggcatgatgcgcttggttgaggttaatgacaggaaattagcaaaactgtctgacagaattgtctctcctgaacagcggcttgccgtcgtgacccagcgtcttggtgtgatgcaagaacggcttgatagtctgatgatgcggcggcaggagcgcgcccaagagacgctgtcgcaggcctctcgtctgctgtctgcaaattcttatgagcgcgttcttgagcgtggttttgcgcttgttacggatgagacgggacaggccattaagcggagcgatgaggctgcaataggcgctaaggtagagattaaatttgcagataaaaaacgcgccgcccagctggacccggataccgcctcgtccgttaatccaaaagcagggccagtaaaatcggcagtaaaancggcagtaaaaccggcagcaaaacctacatcccaagaagagctattctagctcatcatccttaaccacagacttaccccatctgcgatggggccagagccattgttccggggctgctgaaatccagtcttcgaatgtttcatttatctgtttggcaatcagcattgttgctctgtcatcatcaccttctggcattatcagagggtcggagattgtgacagtcagcctatcatctttggtccgcacgccatgcgccataaaaatgggctttcccattttgcgcgcaactttgatataggaaatagcggttgtcgctggatggccaaaaaacggcacaaattcgccttcgcgcagttgctggtctacaaccatcatcatgaagccgccttttttgacggtgcgtaccatgcccatcgcagcttcgcgtcccttgatgtagctatccgccccagtgaattgaactctgtttttgaaaatccagtttgcatagggattattcaactcacgatagataaggccggtcttaatattcgccgcaatgctgagaagcccaacagcctcccaattactgagatgggcactaataataaatccgccatcatagggggttaatttttccagaccggtaaagctaatgcgccccgatggcagcattgtttttatatggggatattcaccaatacagcggccaatattattccacataccatgcgcgatatgctggcgttcaggtaatgagaggtggggcagtgcaaatttcatattcgcaagagctcgtttatgccacggcgtgagcggcccaagactttgaaaaagccggcccatagtggcactagcaaccgaagccggaaggcaccgcaagatgccaacagcaagaaagagcagggctgcttcgcacggccagatgataaagcggtaaagggctgttaggacaggacccctataggacattgacactgaatgttcctctcagattaacagcgacgcgctataaagagcgcttcatcgcaacaatatcatctaccatattcatgaccagctcttcggcctctgtctcaaacgacatgcttacctgtagaacacttacacggtcgcgccattcagggggcaggcgcatccagtctttcagtgtcgtgacaagctcagcgccgttctgaacagcatccagatgaagccgtgttaagtctgcatcgctataggggtgatgatcagcaaaagcaagcgtttgaacaaggtcggcgccgcaggctgcaaccgttttgaaaaagcgggacggacgaccaatgccggcaaaggcaagaaagcgttttcccttaatgtctgctgcactgtcagggtcgggaacaaggctgccggtgataacctgaacgctatcagcaagccgtgcggtaaggcctgtctcatcctcaccatttatgacggcaagagagagttgtgcaactccggatgaaaagctctggcgtaacgggcctgctggtaaaatccagccattgccgcacccagcactaccatcaaaaacaccgatgacaatatcctttgccagccacggattttgcatgccatcatccatgatgataatatcagcttcggttgagcgttggataaaataagcgcctttcagccggtcaggactaacaataacaagctcattcagcgccagcataagaggctcatcgcctacatcatctgtgccatgcaggctggcatcaacaataagaggccctttttcagaaccaccatatccgcgtgtcaggacagccggattataccctcttgccctcagcaactgacacagactagctgtgagcggtgttttgccagtgcctccgatgctgatattaccaacacagataacaggcaaggataccgtgccggctgttgccattttctgccgcagaaacgttcccaaccgccaaatccaggatacggggatcagcatggccgctagcgcatttttctggtcccagaatgacggtgttttcaacatattattgattattacc

SEQ ID NO: 207 - DNA, 4000 bp, Escherichia coli
  misc_feature (191)..(191): n is a, c, g, or t
  misc_feature (210)..(210): n is a, c, g, or t
  misc_feature (273)..(273): n is a, c, g, or t
  misc_feature (294)..(294): n is a, c, g, or t
  misc_feature (580)..(580): n is a, c, g, or t
  misc_feature (620)..(620): n is a, c, g, or t
  misc_feature (648)..(648): n is a, c, g, or t
  misc_feature (671)..(671): n is a, c, g, or t
  misc_feature (725)..(725): n is a, c, g, or t
  misc_feature (1052)..(1052): n is a, c, g, or t
  misc_feature (1102)..(1102): n is a, c, g, or t
  misc_feature (1161)..(1161): n is a, c, g, or t
  misc_feature (1168)..(1168): n is a, c, g, or t
  misc_feature (1231)..(1231): n is a, c, g, or t
  misc_feature (1397)..(1397): n is a, c, g, or t
  misc_feature (1628)..(1628): n is a, c, g, or t
  misc_feature (1774)..(1774): n is a, c, g, or t
  misc_feature (1991)..(1991): n is a, c, g, or t
  misc_feature (2285)..(2285): n is a, c, g, or t
  misc_feature (2424)..(2424): n is a, c, g, or t
  misc_feature (2603)..(2603): n is a, c, g, or t
  misc_feature (3141)..(3141): n is a, c, g, or t
  misc_feature (3745)..(3745): n is a, c, g, or t
  misc_feature (3808)..(3808): n is a, c, g, or t
  misc_feature (3951)..(3951): n is a, c, g, or t
  misc_feature (3954)..(3954): n is a, c, g, or t
  misc_feature (3976)..(3976): n is a, c, g, or t
  misc_feature (3987)..(3987): n is a, c, g, or t
tcctcctcttcctcttcgccttcgtgccgcgcctccgggcggtagaccatcgcgtagcgcgcgatctgaaagccgcacgcctcccagaagcgcaggccgcggacgttgcccgccactaccgcggcgtagacctcgcccgcgccctgcgcccggagaaactcgatcaccgcttcggccaggcgtcggcccangccctcgcggcggtactcngggtagatgaagaactcggcgaccatcccctgggagcgcccgtcgaccatgccgcgctgcagngtggcgacggcgaatccgacnttgcggctctgatccaccgcccaccagatgtgccgcgtcttgccctggtctttgaagaggactttcagatactggtccagccagtcgtccggcggcgcctcaccgttgatttcctcgcggtagtggcgcatccagtcacgaaacttcttgtcgccgggatcgacgtgctcgagcttcatcggctgcccaactccaatgctcgctttcgatgggtaatgttttgtcttgctggaggatcactgaagaggttacggcgcctggttggactgctcctgcctcggtgggnggcgggcggcgacagtgccaggggcgcgcgccgccgctanccgatgatgccgtattcgtaaggactgnggatcaaggctccgtccgcgaancgcgacgggcggaacacgccgatgtcgatgctgctccgctcgccgaggacggtntgggccatgacctcaccgatcgccgggctgagcttgaacccgtggccgctgaatcccgcggcgacgaacagcccgtcgatgccgtccgccgggccgagcaccggctgccagtccggggtgacatcgtagaggctggcgaagccgccgcgcacctcgccgtctcgcgacccggggtatcgccagacgagcttgcgcacgatccgctccgcgaaatcgaaatccagcccctcgtcaaagcgatccgcggacacctcttcctcatccgtctcctcgatcgaccccagcagcacctggccgccgacgtcgggacggaggtaaaaccccttnagcagatcaccgcagactcgttcgatggccacggcgcgcaggtggaccancgcgacctggatgcgcatcgtccggatcgggaggtggacccgtagcggatccagcagangggacgnccacggtccggcggccaccaaaacgcgcggcgcgtggatcatgccggcggaggtctccacccnctgcacgaccccgcgctccacgacgatccgcgtggcggtggcgccgggtgtgacctcgacgccgtgccggcgggcggcggcggcgaacgcggtgctggtggcatacccgtcggcatagccggagtccggttcgtaagcggccgcggccacgtcatccagattcatngccggatccaggtcggccagtgcgcgcggactcaacacggaggtgcgcacgccgagggaggactgcaggcgagcgttggcttccaggtgggcccggtcggccgcccccgccagcagcagaaaccccgtcgtgcggaagtccgcggtgccgccgaccatgtcggcgaaatgctggaagatctccaggctgcgccgggccagccggatgagtggctccagtgagtagtgcatncggatgatgccgctggagcggccggtgggcccgccccccacctggcctttctccaggaggacgcagcgcacgccgcggcggcccagttgaaaggccgtgctcgtgccggtgcagccgcccccgatcaccacgacgtcggcggtcgncacgttagagcgggatgttgccgtgcttgcgcttcgggttggtctggcgcttggtctgcaggagttcgagagcggcgatcagccggggtcgggtctcgcggggctcgatcacgtcatcgatgtagccgcgcccggcggcgatgtagggattggcgaactgcgcgcggtaggcctcgacgagttcgcggcggcgggcctccgcatcttcggcctccgncagttccttgcggaagatgatgtcgatggccccctccggccccatcacggcgatctccgcggtcggccaggccaggttgaggtcgccgcggatgtgctggctgctcatgacgtcgtaggcgccgccgtaggccttccgcgtgatcacggtcagtttgggcacggtcgcttcgcagtacgcgtagaggagtttggcgccgtgccggatgatcccgccggactcctgcgccgtgccgggcatgaatcccgggacgtccacgaaggtcaccagcgggatgttgaaggcgtcgcagangcggacgaagcgggcgcccttgtccgcggagtcgatgtccagcaccccggccagcacggcgggctgctgggcgacgatgcccacgggccggccgttcaggcgggcgaagcccaccagcagattgggggcgaactcgcgntgcacctcgaggaactcgccgtgatcgacaatgcggtggatgacctcgtgcatgtcatagggcttcgtcggttcctcggggaccagcgggttcagcgcgtcgtccatccgcgcggggtcgtcggtgggctctctgcgcgggggatcgtccacgttgttctgcggcaggtaggcgagcanacggcggaccagcccgagggcgtcctcgtcgtcttcggcgacaaagtgggcgacgccgctcttcgcggcatgcacgtcggcgccgccgagttcctcgtggctgacatcctcgcgcgtgaccgccttcaccacctgcgggccggtgacgtacatgtaggacgtcccccgcaccatgatgatgaagtcggtcatcgccggcgaatagacggccccgccggcgcagggacccatgatcacggagatctgcggcacgacgcccgaggtcatcacgttgcggaagaagatctcggcgtacccgccgagtgccgtcacgccctcctggatgcgcgccccgccggagtcgttgagcccgatcacggggatgccgctggaaagggccaggtccatgatcttgacgatcttctcggcgtgcccttcgcccagcgagccgcccagcaccgtgaaatcctgcgagaacaccgccacgggccggccgtcgatcgtcccgtggccggtgacgacgccatcggccggggcctcgatcttgtctaggccgaantcgcggccgcggtgcgtgacgaagcgatcgagttcgacaaacgacccgggatcgagcaggaggtcgagccgttcgcgcgcggtgagtttgccggcctcgtgctgtcggcggatgcgctcctccccgcccatgcccaagaccgtctcggcgcggcggcggaggtcgtccagccggtccacgactctttgctcctgcgggtcgccggtcccgccggttcccaggccccgttaggcctggacgggaacttcgtgcgcgagagcggagcgaggacggatcgagatgatggcgtgcttgaagactaattcctcaatgccccgcgcttccacgagcaggctgtaggtgccgaagtccttgaccaccgcttcggggatctcgtagccgtcgcggcagcggatgtggacgacgacgccgctttggatcagccggcggtagaagtcgtcttccagccctccccgcccggcggcgcggccgctctcggcgcggtagggctcctcgcgtgtggacatcactgcacctccctcagcttccggacgaatctcctgcacgccggcgataacatcctctctcggcgagaccgcgacgggcgccgcgctcatcgacggcncgccgggcgacgcgggcgggctcacctcgagcggcatgttgacctggggcgtgacgcggggcncggcctcggccccgtcgcccgccggaccttccgccggcgcggggatggcgacgtcgggccgggcgccgccggattcagcggtcacactcggcaaatattcaacggcgccgccggccggcgtctcgcgcgggccgcccaccggnggnggcggcggcccctgcggcaggnggatcaagcgntggtactgcgccc

SEQ ID NO: 208 - DNA, 4000 bp, Escherichia coli
  misc_feature (1985)..(1985): n is a, c, g, or t
  misc_feature (1988)..(1988): n is a, c, g, or t
  misc_feature (1991)..(1991): n is a, c, g, or t
  misc_feature (3213)..(3213): n is a, c, g, or t
  misc_feature (3383)..(3383): n is a, c, g, or t
  misc_feature (3673)..(3673): n is a, c, g, or t
  misc_feature (3703)..(3703): n is a, c, g, or t
  misc_feature (3820)..(3820): n is a, c, g, or t
agaatcttcaggcggtcttacataaggaatattttcaatctcatcatcagttactggaatattaaacttatccctaaatgacttgatattatcaagcgataattttttgacctgatgagtggtattgtctgcttctctggaaccaacaccgtatccttttgttgttaaagccaatataaccgtaggtgctccagaggaattaactgccttatgataagcagcataaactttataaggatcatgaccacctctatttagtttgtatatatcctcatcagttaaatcttctacaatttttagggcttccggatcctttgcaaagaaattttctctagtatatgcaccaccttttgctttaaaattttgcatttccccatccaatacagcatccataatatcttgaagcttaccctctttatctttagccattattggatcccactttctaccccaaacgactttaataacattccatccagcgcccctaaaagaaccctctagctcttgaataatttttccattccctcgaacaggaccatccaatctttgcaaattacaatttataacaaaaattagattttctaagctttctcttccagcaagagctattgcaccttttgattctggttcatccatctccccgtcaccacaaaaaacccatacctttctatcatttctagggactaaacctcttgcagacatatatctcattatatgagcttgatatatacccataattggtccaagacccattgagactgttggaaattgccaataatctggcatcagccagggatgagggtatgaagacaaacctggctttttaacctctcttctaaaattatctaaatcttcttcatgtagatacccttctaaaaaagaccttgcatatatcccaggagatgagtggccttgataataaatcaaatcttctagttgaccttctgaacctctaaaaaaataattaaagcctacatcatataaagttgcagctgatgagaaagttgatatatgtcctcctaaatcatcatcattcttatttgctcttaaaactaaagctaaagcattccatcttattaaagaacgaattcttctttccataaataaatcaccaggcatctgtgcctcgtcttttaatggaattgaatttctaaaaggtgttgtaaggttgtatgaaggaattgctccctcttcatttaatttcttagcgagttttgtcattaagaatgatgctctttcaacaccctctttctcaataacgctatctatagcttccaaccattcacttgtttctataggatctttgtcttcaggtatcatatatatgtcaaattttatgaatctaattttactgtagattatgttaaaaatatacaatattcataataaatgttaaatattgtaaataaattacaaatatatataattaaattatgattttagatactctagtaaatggtgatgtaaaattaagcaaatctgaaaaatggattgcgctttctgtattaaataatcccactaaagttataagtcaatcgattacatctttagccaatgaatctggtgttagcttacctactgtaaatagattctgtaaaaaacttggctttgatgggtatcctgcttttaaaattcaaatagctcaagaaattactaatactaatcaactattagacagattcaatgtagataaggatactcctgaagttgtgaagagagttatgagtgatatacagtcaactattgtaagcgttggtcaaaatcttaatccagaatcgatcgataaggcaacagactttctggcaaatgctagtagtattacattttttgggcttggtggctcaggacctgttgcattagatgcgcagcacaaattttttaggtttggaattcctgtcgttgctcatacagattatataaaccaaagaatgattgtttcaatgatgaaggaaggcgatcttctagtattaatttcttttacaggnagnacntctgaaatagtagagactgctaaaattgctaaaaaaaatggtgtaaaaacaatagcattaacttctgaagactcccctcttgccaagctttctaatgttgttctgcatatacatactcatcttgagaataatcttcatatccctatgacatctagactagctcatttagctattattgatatactttctgcgaccgtccaggctagatttggaaaggtttttgatagtagaaaggatgaagttattaaaaatattgaaaaaactagagtttaattatttaactattaagtttttaagaaataatatttattttgatttctgtttgattgagtagaaaatacaaaggtaattctttgttacttttagcttgttcatagacctctaatttctttttattaggtattaataaaaatatatttttggattgaagtatcatagacagattcatactaactcttttatgtgcaggactgcccatagcttctgtataaattatttctggttttgatgatggctcaaaatagttagaattagttttaattaatgatgggaataaagaggcaaaatgaccatcctcacccatgcccaacaacataacatcaaaaggcctttgaatatttagagctttgtcaggtgaattgcataaggatataaaatttgtatttatagcattattaatcatcaaattttctatgactagtttttcattagaatcgttatgagatttatcaacaaatctatcatcaacaagggtgatatttactttagtccaatctagatgcattagtgagagttcattaaatatttttactggactggagcccccgcttacaactaaacttgcttcgttgctttctttaatagcaagttttagtatttcgattatttgatctgataaatttttcatttttataataaattaaatgagtttgctattccatctattacaaattcaattgctagcgcgccaagaagtaaaccaaatattttttgtactacagtaataatggttggacctaattttgatgataactttgcagataaccacatggcaatagtagctataaatactactatgagtattggtagatatgaaaccaagccatctaaagctgaagcataagattcttttgatattaataagcttgttgccatagctccaggacctgctattagaggtatggataaaggaaatattgctattgattttatggtttcatcntctatggctgtatctgctgtattttgtcgcctgatttgtctttgctcaaaaaccatctgaaatgcaataacaattaagaatagtccaccaattatcttaaaagagtccatgctaatattcattgcgtcaagaatggcattaccaaataaccaaaaaatagtaagaactantaaagatacaaaactagctcgcaagtaaacagatttaacctgatgtttatttagacctgcggttagacctgcaaaaatcggtattaaagatattggatctattgcaacaaacatcaataaggtgctttctacaaaagtatcaaacatgctaaatatttataatttgaatagcttctgagtgctcttctgaaaatatacttgaaaccataataaactttaaatcttttttgtctttaccataatatttttttaaaatctttgaaacattagccaatgttttatcatggttngatagatttgataaataaaagggaactgtngaacctataagagatagttgattgagagtttttttatttccagtaaaggtaaaaactggaatgccgttaggtttagagtttgaaatgtaattagctgttttaccagttcttgtaatngctatgatgccgtctgcattaattgtctcagcaagattttttgctgccacaccaatatgctgccaatcagagtttggtgtgaaattcttctcataacctaaagttctaaacttttctgttttttctgctatagattttaagaaggttacacattccgatggatatttaccaacacttgtt

SEQ ID NO: 209 - DNA, 4000 bp, Escherichia coli
  misc_feature (1925)..(1925): n is a, c, g, or t
  misc_feature (1934)..(1936): n is a, c, g, or t
  misc_feature (1939)..(1939): n is a, c, g, or t
  misc_feature (1951)..(1952): n is a, c, g, or t
  misc_feature (1987)..(1987): n is a, c, g, or t
  misc_feature (2012)..(2012): n is a, c, g, or t
  misc_feature (2019)..(2019): n is a, c, g, or t
  misc_feature (2037)..(2037): n is a, c, g, or t
  misc_feature (2055)..(2055): n is a, c, g, or t
  misc_feature (2061)..(2061): n is a, c, g, or t
  misc_feature (2071)..(2073): n is a, c, g, or t
  misc_feature (2117)..(2118): n is a, c, g, or t
  misc_feature (2122)..(2122): n is a, c, g, or t
  misc_feature (2166)..(2166): n is a, c, g, or t
  misc_feature (2173)..(2173): n is a, c, g, or t
  misc_feature (2220)..(2220): n is a, c, g, or t
  misc_feature (2226)..(2226): n is a, c, g, or t
  misc_feature (2229)..(2229): n is a, c, g, or t
  misc_feature (2238)..(2238): n is a, c, g, or t
  misc_feature (2244)..(2244): n is a, c, g, or t
  misc_feature (2250)..(2250): n is a, c, g, or t
  misc_feature (2256)..(2256): n is a, c, g, or t
  misc_feature (2316)..(2316): n is a, c, g, or t
  misc_feature (2319)..(2319): n is a, c, g, or t
  misc_feature (2352)..(2352): n is a, c, g, or t
  misc_feature (2370)..(2370): n is a, c, g, or t
  misc_feature (2376)..(2376): n is a, c, g, or t
  misc_feature (2380)..(2380): n is a, c, g, or t
  misc_feature (2382)..(2382): n is a, c, g, or t
  misc_feature (2391)..(2391): n is a, c, g, or t
  misc_feature (2394)..(2394): n is a, c, g, or t
  misc_feature (2457)..(2457): n is a, c, g, or t
  misc_feature (2480)..(2480): n is a, c, g, or t
  misc_feature (2496)..(2496): n is a, c, g, or t
  misc_feature (2505)..(2505): n is a, c, g, or t
  misc_feature (2520)..(2520): n is a, c, g, or t
  misc_feature (2523)..(2523): n is a, c, g, or t
  misc_feature (2550)..(2550): n is a, c, g, or t
  misc_feature (2565)..(2565): n is a, c, g, or t
  misc_feature (2596)..(2596): n is a, c, g, or t
  misc_feature (2601)..(2601): n is a, c, g, or t
  misc_feature (2610)..(2610): n is a, c, g, or t
  misc_feature (2616)..(2616): n is a, c, g, or t
  misc_feature (2628)..(2628): n is a, c, g, or t
  misc_feature (2634)..(2634): n is a, c, g, or t
  misc_feature (2658)..(2658): n is a, c, g, or t
  misc_feature (2661)..(2661): n is a, c, g, or t
  misc_feature (2697)..(2697): n is a, c, g, or t
  misc_feature (2709)..(2709): n is a, c, g, or t
  misc_feature (2745)..(2745): n is a, c, g, or t
  misc_feature (2747)..(2747): n is a, c, g, or t
  misc_feature (2750)..(2750): n is a, c, g, or t
  misc_feature (2922)..(2922): n is a, c, g, or t
  misc_feature (2928)..(2928): n is a, c, g, or t
  misc_feature (2931)..(2931): n is a, c, g, or t
  misc_feature (2943)..(2943): n is a, c, g, or t
  misc_feature (2973)..(2973): n is a, c, g, or t
  misc_feature (2991)..(2991): n is a, c, g, or t
  misc_feature (2994)..(2994): n is a, c, g, or t
  misc_feature (3018)..(3018): n is a, c, g, or t
  misc_feature (3030)..(3030): n is a, c, g, or t
  misc_feature (3036)..(3036): n is a, c, g, or t
  misc_feature (3073)..(3073): n is a, c, g, or t
  misc_feature (3087)..(3087): n is a, c, g, or t
  misc_feature (3096)..(3096): n is a, c, g, or t
  misc_feature (3159)..(3159): n is a, c, g, or t
  misc_feature (3162)..(3162): n is a, c, g, or t
  misc_feature (3250)..(3250): n is a, c, g, or t
  misc_feature (3273)..(3273): n is a, c, g, or t
  misc_feature (3284)..(3284): n is a, c, g, or t
  misc_feature (3297)..(3297): n is a, c, g, or t
  misc_feature (3315)..(3315): n is a, c, g, or t
  misc_feature (3321)..(3321): n is a, c, g, or t
  misc_feature (3374)..(3374): n is a, c, g, or t
  misc_feature (3390)..(3390): n is a, c, g, or t
  misc_feature (3402)..(3402): n is a, c, g, or t
  misc_feature (3423)..(3423): n is a, c, g, or t
  misc_feature (3426)..(3426): n is a, c, g, or t
  misc_feature (3432)..(3432): n is a, c, g, or t
  misc_feature (3435)..(3435): n is a, c, g, or t
  misc_feature (3466)..(3466): n is a, c, g, or t
  misc_feature (3468)..(3468): n is a, c, g, or t
  misc_feature (3470)..(3471): n is a, c, g, or t
  misc_feature (3486)..(3486): n is a, c, g, or t
  misc_feature (3507)..(3507): n is a, c, g, or t
  misc_feature (3510)..(3510): n is a, c, g, or t
  misc_feature (3513)..(3513): n is a, c, g, or t
  misc_feature (3519)..(3519): n is a, c, g, or t
  misc_feature (3525)..(3525): n is a, c, g, or t
  misc_feature (3555)..(3555): n is a, c, g, or t
  misc_feature (3558)..(3558): n is a, c, g, or t
  misc_feature (3585)..(3585): n is a, c, g, or t
  misc_feature (3588)..(3588): n is a, c, g, or t
  misc_feature (3619)..(3619): n is a, c, g, or t
  misc_feature (3642)..(3642): n is a, c, g, or t
  misc_feature (3654)..(3654): n is a, c, g, or t
  misc_feature (3657)..(3657): n is a, c, g, or t
  misc_feature (3666)..(3666): n is a, c, g, or t
  misc_feature (3678)..(3678): n is a, c, g, or t
  misc_feature (3700)..(3700): n is a, c, g, or t
  misc_feature (3729)..(3729): n is a, c, g, or t
  misc_feature (3732)..(3732): n is a, c, g, or t
  misc_feature (3735)..(3735): n is a, c, g, or t
  misc_feature (3747)..(3747): n is a, c, g, or t
  misc_feature (3759)..(3759): n is a, c, g, or t
  misc_feature (3774)..(3774): n is a, c, g, or t
  misc_feature (3798)..(3798): n is a, c, g, or t
  misc_feature (3807)..(3807): n is a, c, g, or t
  misc_feature (3811)..(3811): n is a, c, g, or t
  misc_feature (3819)..(3819): n is a, c, g, or t
  misc_feature (3828)..(3828): n is a, c, g, or t
  misc_feature (3852)..(3852): n is a, c, g, or t
  misc_feature (3867)..(3867): n is a, c, g, or t
  misc_feature (3912)..(3912): n is a, c, g, or t
  misc_feature (3921)..(3921): n is a, c, g, or t
  misc_feature (3925)..(3925): n is a, c, g, or t
  misc_feature (3954)..(3954): n is a, c, g, or t
  misc_feature (3978)..(3978): n is a, c, g, or t
  misc_feature (3984)..(3984): n is a, c, g, or t
  misc_feature (3987)..(3987): n is a, c, g, or t
  misc_feature (4000)..(4000): n is a, c, g, or t
aaaagttatcaaagaattgcttcgtgacaaacgaaccttggctatgatgtttgtagcgccggtatttattatgtggctgatgaacctcatgttttcagctagtacaaccgtgaatgtcaagttagcgacacaagatctaccaactggtttgataacgaaaatggatgagcttgatcatgtggacatcgagacttatcaagacttagatcaggccaaagaagcgctagcaaatgaaaaagtcgatgctgtgatttcttataaagacggtgagtatcaggtcgactacgcaaatacagatgcctccaagacatctatgatacgacaagtgttacgaacaagtatcgccagtgaaggcaccgatcagttactatctcgtatcaaacaagctcttccacaattgaaattagatgcaaaggcgcctgaaatcaaagaatcttaccaatatggagataaaaatactggattctttgcacgtatgattccaattttaattggctttgtggtcttcttctttgtctttttgatttctggtatggcacttttgaaagagcgcacaagtggaaccttggatcgcttgttagcaaccccagtgaaacgttctgaaattgtctatggctatatgttgtcttacggtattattgcgatttttcaaacggcagttgtcgtcttagcagcaatttggctactagatgtagaagttgtaggaaatattttaaatgttataatagttaatgtggtactggctcttgtagcactagcttttggaattctcttgtctactctagcaaaatcagaattccaaatgatgcaatttattcctctcgtgattatgcctcaactctttttctcagggattattccattgtcatccatgggagcatgggctccaactgtggggaaatttttgccattaacctattctggtgatgcaataagccagattattctttacggacacaatcttggtgatattttgccaaatcttggtgttttaatgattttcttgatcattttaacaattctcaatattgttggattgcgtcgttatcgtaaagtttagaaatcaacataaataatgctaaaaaggtgtgaagattagatggataagactgtttttgaatcgtttgaagattacttagaagaagcgaattaccctcaaggaaagaaaaaaatcatgcaggcagcagtggatctcatatcaactaggagttaccatgggacctcaactcttcacatagctgagcgtgctggactaagccaggcaactttgtttaagtattttaagacgaaggatgatctactgacggctattttacatcctgtagtcccaggcattttcggtagttttgttgaggaactcttagcttttgaaacgacagaagagagggttcgttatctcgtccacgatcgtatgagctatctcaaaaaaaatcgtgctttgatgaaaatcattctgcaggagagtttttcaaataagaaactaaaaaatgaacagatttttatctggaatgctattcaagataaacttcgagtgcttcataaagaattgctagcagatccacgtgtaaatccagagttaacgattcctcaaatggttcgtatttgtgttggtccattgttggcttacttcgctcaactttatatcgttagcgacaacggagaaataaaggaagaggacctagacttattagaaaaacagattttaggtggtttgtggaaataagggagttctagaagagctaagatttatttacttgactttcaaacaagctaaaaaagacatgttctgcttatttcagattcatgtcttttttgttgttggattttgtattcttcataagtcctcaatcgctttgccaaaacagaaaccgacttctccagcggtgcaacgatttctcaagtgtatggaagaggagatttctggnttgctaaannnaantccttgacactnngtcagcttttgatacaatagtacaaaatcagaggnggtgggttatgattcagaaacatgngattccnattttagagtttgatganaatcctcaggcggtcatnatgccnaatcacgagnnnctggacttgcacttgcccaagaagtgtgtctatgcttttttagnngagnagattgaccgttatgcgagggaagtaggggcggactgtgtcggngaattcntttctgccaccaagacctatccagtctatgtcgtgaactacaagggngagganatntgtctggcncaggcncctgtnggttcngctccagcggcccagtttatggattggttgattggctatggtgtggagcagattatttcnacnggaacctgtggtgtgctagctgatatagagganaacgcctttctagtcccngttcgngctntncgagatganggngctagttaccactatgtggcaccttctcgttatatggaaattcagccagaggctattgctgcnattgagcgagttttggaagccanagggattccctatgangaagtcatnacctggacgacaganggnttttaccgagaaacggctgaaaaggtngcttatcgcaaggangaaggctgtgctgttgtggagatggagtgtnctgcncttgcggcngtagcncaactgcgtggngttctntggggagaattgttgtttacagcngantctctagcagacttggaccagtacgatagtcgtgantggggttcagangctttcgaaaaggccttggaactctgccttgagatngnctntcagatctagctactctccttctttttatggtacaatggatgtatgttattcaaattatttgtgaaaaaacttgaaagggtctttggcggactttcgccagctcgtcggatttttttaagtttcgctggagttatttttataggttctctccttttgagtttgccttttgtncaggcnagnggttcgcaggcnacttattttgaccatctttttacgacggtntctatggtctgtgtgacnggnctttttacgcaaccggtggctacnacctataatgtntggggncagttgatttgtatgctcttgatacagattggtggtntggggctcatgacntttatcggngtcttttatattcaggggaagcaaaagctcagtcttcgcagtcgtgaaaccattcaggagagnttnagttacggggagactcggtcgctgaaggcctttatgcggtccatctttttgacgacttttctggtggagggcttgggtgccttcctgntaagttttcgttttattcctgantttggctgggnacggggcattttnacctctatctttttagcnatttcngccttttgtaatgctggttttgataatttcggcagtagcagtttagtggcttntcagacggatcccttnatcaatctggtnattgctggcttgattatcacnggnggtctnggntttatggtctggtttgacttggcaacccagntngnnaagaagaaaaaacgncgtctgcgtttccacaccaanctngtnctcttnttgacngcagggattttgctgtttgggacagtatcnacnctctttacggagtggcacaatcctggnacnattggcaatctcagtgtcccagagaaagtgntggttagctttttccaaaccgtnagcatgagaacngcnggttttgcntctattgactanactcaagctcggcctgtgaccntgtttatctatatcctacagatgtttctnggnggngcgcctggaggnacggctgggggnctcaagattacgacnttctttgtcttattggtctttgcncgtagtganttgntgggcttncctcatgcnaatgttgcgcagagaaccattgangctcgaacagtccanaaatcctttagtgtcttcattatctttttgatgaccttcttgttnggcttgatnttgntgggaattacggcagaaggaacaccgcgntttatctacctcatgtttgagacnatttcngcncttgcgacagttn

SEQ ID NO: 210 - DNA, 4000 bp, Escherichia coli
  misc_feature (1)..(3): n is a, c, g, or t
  misc_feature (5)..(7): n is a, c, g, or t
  misc_feature (9)..(12): n is a, c, g, or t
  misc_feature (14)..(15): n is a, c, g, or t
  misc_feature (17)..(39): n is a, c, g, or t
  misc_feature (41)..(46): n is a, c, g, or t
  misc_feature (48)..(59): n is a, c, g, or t
  misc_feature (61)..(78): n is a, c, g, or t
  misc_feature (80)..(83): n is a, c, g, or t
  misc_feature (85)..(87): n is a, c, g, or t
  misc_feature (89)..(96): n is a, c, g, or t
  misc_feature (98)..(98): n is a, c, g, or t
  misc_feature (100)..(102): n is a, c, g, or t
  misc_feature (104)..(108): n is a, c, g, or t
  misc_feature (110)..(114): n is a, c, g, or t
  misc_feature (116)..(117): n is a, c, g, or t
  misc_feature (120)..(140): n is a, c, g, or t
  misc_feature (142)..(157): n is a, c, g, or t
  misc_feature (159)..(159): n is a, c, g, or t
  misc_feature (161)..(219): n is a, c, g, or t
  misc_feature (221)..(222): n is a, c, g, or t
  misc_feature (224)..(244): n is a, c, g, or t
  misc_feature (246)..(273): n is a, c, g, or t
  misc_feature (275)..(280): n is a, c, g, or t
  misc_feature (282)..(289): n is a, c, g, or t
  misc_feature (291)..(294): n is a, c, g, or t
  misc_feature (296)..(304): n is a, c, g, or t
  misc_feature (306)..(322): n is a, c, g, or t
  misc_feature (324)..(337): n is a, c, g, or t
  misc_feature (340)..(349): n is a, c, g, or t
  misc_feature (351)..(355): n is a, c, g, or t
  misc_feature (357)..(358): n is a, c, g, or t
  misc_feature (360)..(371): n is a, c, g, or t
  misc_feature (373)..(391): n is a, c, g, or t
  misc_feature (393)..(399): n is a, c, g, or t
  misc_feature (401)..(411): n is a, c, g, or t
  misc_feature (413)..(419): n is a, c, g, or t
  misc_feature (421)..(425): n is a, c, g, or t
  misc_feature (427)..(441): n is a, c, g, or t
  misc_feature (443)..(447): n is a, c, g, or t
  misc_feature (449)..(453): n is a, c, g, or t
  misc_feature (455)..(460): n is a, c, g, or t
  misc_feature (462)..(465): n is a, c, g, or t
  misc_feature (467)..(484): n is a, c, g, or t
  misc_feature (486)..(492): n is a, c, g, or t
  misc_feature (494)..(500): n is a, c, g, or t
  misc_feature (503)..(513): n is a, c, g, or t
  misc_feature (515)..(525): n is a, c, g, or t
  misc_feature (527)..(539): n is a, c, g, or t
  misc_feature (541)..(541): n is a, c, g, or t
  misc_feature (543)..(556): n is a, c, g, or t
  misc_feature (558)..(564): n is a, c, g, or t
  misc_feature (566)..(566): n is a, c, g, or t
  misc_feature (568)..(568): n is a, c, g, or t
  misc_feature (570)..(570): n is a, c, g, or t
  misc_feature (572)..(576): n is a, c, g, or t
  misc_feature (578)..(585): n is a, c, g, or t
  misc_feature (587)..(592): n is a, c, g, or t
  misc_feature (594)..(601): n is a, c, g, or t
  misc_feature (603)..(611): n is a, c, g, or t
  misc_feature (614)..(615): n is a, c, g, or t
  misc_feature (617)..(617): n is a, c, g, or t
  misc_feature (619)..(632): n is a, c, g, or t
  misc_feature (634)..(653): n is a, c, g, or t
  misc_feature (655)..(683): n is a, c, g, or t
  misc_feature (685)..(694): n is a, c, g, or t
  misc_feature (696)..(702): n is a, c, g, or t
  misc_feature (704)..(740): n is a, c, g, or t
  misc_feature (742)..(755): n is a, c, g, or t
  misc_feature (757)..(757): n is a, c, g, or t
  misc_feature (759)..(762): n is a, c, g, or t
  misc_feature (764)..(780): n is a, c, g, or t
  misc_feature (782)..(784): n is a, c, g, or t
  misc_feature (786)..(788): n is a, c, g, or t
  misc_feature (790)..(806): n is a, c, g, or t
  misc_feature (808)..(816): n is a, c, g, or t
  misc_feature (818)..(823): n is a, c, g, or t
  misc_feature (826)..(829): n is a, c, g, or t
  misc_feature (831)..(858): n is a, c, g, or t
  misc_feature (860)..(866): n is a, c, g, or t
  misc_feature (868)..(872): n is a, c, g, or t
  misc_feature (875)..(888): n is a, c, g, or t
  misc_feature (890)..(920): n is a, c, g, or t
  misc_feature (922)..(925): n is a, c, g, or t
  misc_feature (927)..(929): n is a, c, g, or t
  misc_feature (931)..(933): n is a, c, g, or t
  misc_feature (935)..(947): n is a, c, g, or t
  misc_feature (949)..(952): n is a, c, g, or t
  misc_feature (954)..(966): n is a, c, g, or t
  misc_feature (968)..(971): n is a, c, g, or t
  misc_feature (973)..(973): n is a, c, g, or t
  misc_feature (975)..(977): n is a, c, g, or t
  misc_feature (979)..(980): n is a, c, g, or t
  misc_feature (982)..(982): n is a, c, g, or t
  misc_feature (984)..(988): n is a, c, g, or t
  misc_feature (990)..(996): n is a, c, g, or t
  misc_feature (998)..(999): n is a, c, g, or t
  misc_feature (1001)..(1009): n is a, c, g, or t
  misc_feature (1011)..(1021): n is a, c, g, or t
  misc_feature (1023)..(1026): n is a, c, g, or t
  misc_feature (1028)..(1028): n is a, c, g, or t
  misc_feature (1030)..(1044): n is a, c, g, or t
  misc_feature (1046)..(1051): n is a, c, g, or t
  misc_feature (1053)..(1056): n is a, c, g, or t
  misc_feature (1058)..(1094): n is a, c, g, or t
  misc_feature (1096)..(1100): n is a, c, g, or t
  misc_feature (1102)..(1104): n is a, c, g, or t
  misc_feature (1106)..(1107): n is a, c, g, or t
  misc_feature (1109)..(1111): n is a, c, g, or t
  misc_feature (1113)..(1115): n is a, c, g, or t
  misc_feature (1117)..(1129): n is a, c, g, or t
  misc_feature (1132)..(1133): n is a, c, g, or t
  misc_feature (1135)..(1148): n is a, c, g, or t
  misc_feature (1150)..(1154): n is a, c, g, or t
  misc_feature (1157)..(1160): n is a, c, g, or t
  misc_feature (1162)..(1163): n is a, c, g, or t
  misc_feature (1165)..(1170): n is a, c, g, or t
  misc_feature (1172)..(1173): n is a, c, g, or t
  misc_feature (1175)..(1181): n is a, c, g, or t
  misc_feature (1183)..(1184): n is a, c, g, or t
  misc_feature (1186)..(1188): n is a, c, g, or t
  misc_feature (1192)..(1195): n is a, c, g, or t
  misc_feature (1197)..(1211): n is a, c, g, or t
  misc_feature (1213)..(1216): n is a, c, g, or t
  misc_feature (1219)..(1241): n is a, c, g, or t
  misc_feature (1243)..(1248): n is a, c, g, or t
  misc_feature (1250)..(1252): n is a, c, g, or t
  misc_feature (1255)..(1263): n is a, c, g, or t
  misc_feature (1265)..(1265): n is a, c, g, or t
  misc_feature (1267)..(1269): n is a, c, g, or t
  misc_feature (1271)..(1279): n is a, c, g, or t
  misc_feature (1281)..(1281): n is a, c, g, or t
  misc_feature (1283)..(1295): n is a, c, g, or t
  misc_feature (1297)..(1303): n is a, c, g, or t
  misc_feature (1305)..(1314): n is a, c, g, or t
  misc_feature (1316)..(1328): n is a, c, g, or t
  misc_feature (1331)..(1344): n is a, c, g, or t
  misc_feature (1346)..(1357): n is a, c, g, or t
  misc_feature (1359)..(1359): n is a, c, g, or t
  misc_feature (1361)..(1365): n is a, c, g, or t
  misc_feature (1367)..(1381): n is a, c, g, or t
  misc_feature (1384)..(1423): n is a, c, g, or t
  misc_feature (1425)..(1430): n is a, c, g, or t
  misc_feature (1432)..(1435): n is a, c, g, or t
  misc_feature (1437)..(1442): n is a, c, g, or t
  misc_feature (1444)..(1459): n is a, c, g, or t
  misc_feature (1461)..(1463): n is a, c, g, or t
  misc_feature (1465)..(1475): n is a, c, g, or t
  misc_feature (1477)..(1505): n is a, c, g, or t
  misc_feature (1507)..(1529): n is a, c, g, or t
  misc_feature (1531)..(1536): n is a, c, g, or t
  misc_feature (1538)..(1544): n is a, c, g, or t
  misc_feature (1546)..(1550): n is a, c, g, or t
  misc_feature (1552)..(1557): n is a, c, g, or t
  misc_feature (1560)..(1565): n is a, c, g, or t
  misc_feature (1567)..(1571): n is a, c, g, or t
  misc_feature (1573)..(1586): n is a, c, g, or t
  misc_feature (1588)..(1623): n is a, c, g, or t
  misc_feature (1625)..(1627): n is a, c, g, or t
  misc_feature (1629)..(1638): n is a, c, g, or t
  misc_feature (1640)..(1640): n is a, c, g, or t
  misc_feature (1642)..(1642): n is a, c, g, or t
  misc_feature (1644)..(1644): n is a, c, g, or t
  misc_feature (1646)..(1646): n is a, c, g, or t
  misc_feature (1648)..(1653): n is a, c, g, or t
  misc_feature (1655)..(1656): n is a, c, g, or t
  misc_feature (1658)..(1663): n is a, c, g, or t
  misc_feature (1665)..(1668): n is a, c, g, or t
  misc_feature (1670)..(1670): n is a, c, g, or t
  misc_feature (1672)..(1679): n is a, c, g, or t
  misc_feature (1681)..(1684): n is a, c, g, or t
  misc_feature (1690)..(1690): n is a, c, g, or t
  misc_feature (1692)..(1694): n is a, c, g, or t
  misc_feature (1696)..(1698): n is a, c, g, or t
  misc_feature (1700)..(1703): n is a, c, g, or t
  misc_feature (1705)..(1705): n is a, c, g, or t
  misc_feature (1708)..(1709): n is a, c, g, or t
  misc_feature (1711)..(1711): n is a, c, g, or t
  misc_feature (1714)..(1714): n is a, c, g, or t
  misc_feature (1716)..(1717): n is a, c, g, or t
  misc_feature (1724)..(1724): n is a, c, g, or t
  misc_feature (1732)..(1733): n is a, c, g, or t
  misc_feature (1740)..(1741): n is a, c, g, or t
  misc_feature (1743)..(1744): n is a, c, g, or t
  misc_feature (1746)..(1746): n is a, c, g, or t
  misc_feature (1765)..(1765): n is a, c, g, or t
  misc_feature (1778)..(1781): n is a, c, g, or t
  misc_feature (1800)..(1803): n is a, c, g, or t
  misc_feature (1816)..(1816): n is a, c, g, or t
  misc_feature (1819)..(1822): n is a, c, g, or t
  misc_feature (1844)..(1844): n is a, c, g, or t
  misc_feature (1861)..(1863): n is a, c, g, or t
  misc_feature (1869)..(1869): n is a, c, g, or t
  misc_feature (1883)..(1883): n is a, c, g, or t
  misc_feature (1923)..(1926): n is a, c, g, or t
  misc_feature (1964)..(1965): n is a, c, g, or t
  misc_feature (1980)..(1980): n is a, c, g, or t
  misc_feature (1983)..(1987): n is a, c, g, or t
  misc_feature (1992)..(1992): n is a, c, g, or t
  misc_feature (2021)..(2021): n is a, c, g, or t
  misc_feature (2026)..(2029): n is a, c, g, or t
  misc_feature (2386)..(2386): n is a, c, g, or t
  misc_feature (2479)..(2479): n is a, c, g, or t
  misc_feature (3109)..(3109): n is a, c, g, or t
  misc_feature (3112)..(3112): n is a, c, g, or t
  misc_feature (3513)..(3513): n is a, c, g, or t
nnngnnncnnnncnngnnnnnnnnnnnnnnnnnnnnnnngnnnnnngnnnnnnnnnnnncnnnnnnnnnnnnnnnnnngnnnntnnngnnnnnnnncntnnngnnnnncnnnnncnnggnnnnnnnnnnnnnnnnnnnnntnnnnnnnnnnnnnnnntngnnnnnnnnnnnnnnnnnnnnnnnnnnnnnnnnnnnnnnnnnnnnnnnnnnnnnnnnnnncnngnnnnnnnnnnnnnnnnnnnnnannnnnnnnnnnnnnnnnnnnnnnnnnnncnnnnnntnnnnnnnnannnncnnnnnnnnntnnnnnnnnnnnnnnnnntnnnnnnnnnnnnnnttnnnnnnnnnntnnnnntnngnnnnnnnnnnnntnnnnnnnnnnnnnnnnnnntnnnnnnngnnnnnnnnnnngnnnnnnntnnnnntnnnnnnnnnnnnnnngnnnnngnnnnngnnnnnncnnnngnnnnnnnnnnnnnnnnnngnnnnnnngnnnnnnngcnnnnnnnnnnngnnnnnnnnnnngnnnnnnnnnnnnngntnnnnnnnnnnnnnntnnnnnnngntntncnnnnngnnnnnnnncnnnnnnannnnnnnncnnnnnnnnnccnngncnnnnnnnnnnnnnncnnnnnnnnnnnnnnnnnnnncnnnnnnnnnnnnnnnnnnnnnnnnnnnnncnnnnnnnnnncnnnnnnntnnnnnnnnnnnnnnnnnnnnnnnnnnnnnnnnnnnnngnnnnnnnnnnnnnncntnnnntnnnnnnnnnnnnnnnnntnnngnnngnnnnnnnnnnnnnnnnngnnnnnnnnncnnnnnntgnnnngnnnnnnnnnnnnnnnnnnnnnnnnnnnncnnnnnnngnnnnnggnnnnnnnnnnnnnngnnnnnnnnnnnnnnnnnnnnnnnnnnnnnnngnnnnannngnnntnnnnnnnnnnnnngnnnngnnnnnnnnnnnnnannnngncnnngnncntnnnnngnnnnnnnanntnnnnnnnnncnnnnnnnnnnncnnnncngnnnnnnnnnnnnnnntnnnnnncnnnngnnnnnnnnnnnnnnnnnnnnnnnnnnnnnnnnnnnnngnnnnncnnntnngnnngnnncnnnnnnnnnnnnncgnngnnnnnnnnnnnnnngnnnnncannnngnngnnnnnncnncnnnnnnngnncnnnttgnnnncnnnnnnnnnnnnnnncnnnnggnnnnnnnnnnnnnnnnnnnnnnngnnnnnntnnnccnnnnnnnnntngnnnannnnnnnnncnannnnnnnnnnnnncnnnnnnncnnnnnnnnnntnnnnnnnnnnnnnctnnnnnnnnnnnnnncnnnnnnnnnnnntncnnnnngnnnnnnnnnnnnnnngcnnnnnnnnnnnnnnnnnnnnnnnnnnnnnnnnnnnnnnnngnnnnnngnnnncnnnnnngnnnnnnnnnnnnnnnngnnncnnnnnnnnnnngnnnnnnnnnnnnnnnnnnnnnnnnnnnnncnnnnnnnnnnnnnnnnnnnnnnngnnnnnncnnnnnnngnnnnngnnnnnnctnnnnnntnnnnngnnnnnnnnnnnnnngnnnnnnnnnnnnnnnnnnnnnnnnnnnnnnnnnnnngnnngnnnnnnnnnncnantntntnnnnnngnnannnnnncnnnngngnnnnnnnncnnnntttttntnnngnnngnnnnanccnngnggntnnagccctncttttttnnaagtganncnnanccctgagggtttagccctnctttttttcaagnnnngctgaaccctgagggtttnnnncttctttttttcnagnnnngctgacccctgagggtttagcnctactttttttcaagtnnngctganccctgagggtttgnggctactttttttcaagtagcgctgacccctgagggtttnnnnctactttttttcaagtagcgctgacccctgagggtttnnggctactttttttcnagnnnnnctganccctgagggtttggggctactttttttcnaggannnntgaaccctgaggtgccggcgctccttttcgaaaagtaagaccagcctttcgcctcgcggagtgtgcccaccttttgaggcgctcgtcaaatacgacgggacagggctcccgacgctgcgggggtcctgtccttaaaggcggttgtgacaaaagacatgagtggcgtcaacgcttcatttcttggacgtcggcgcgatgtattgcttgaggttgctgagcaccttgcgattgatcttgaccgcatacttccggtcgagctccttcagccagtcggcctccagtttagcctgttcctcgacgggatggctccagacgcgctcgttgctgatgttgaagagcaggatgccgtcacgatantccttcatcagtttttccaactcggggtggttggcgtccagctcgcggcgctcgaggttgttcgtgatgtcgcggacgaaaagctgatagacntcgctcatgaagtcgcccgaataggttttggtggagaagggatagaggcggaggtattcggcgaactcgctctgggggatgtccgtgtcgtggatgcggagcagcgtcttgtgcatctgtcgggcttgcttatggaagtccgaatcggtggggaaatagttgtcgcaaaggcgctggagctcttcgtaggcctcgggatagaagacgtagccgtacttctgcttcatcatgtcgtcatacgtcttgaagagttcgaagttgcggtcgccctgacgcatggtcgtgtagtagctcttttccatctcctcgtaagggggcatggggcgcttatccagcagcttgatgatgtggtatccgaagcgggtgcggacggggcgggtgaaatcgcccgtgtctttgagggcaaaggcggcctcctcgaaggggcgcaccatctcaccgagggagaaatagggcagaatgccgccgctgttgcgggtgcgtccgtcggtggagtaggtgttgacgagtgagctgaagctctcgccctttttcagcaagtcatagacctcattggcgcgtcggagcagggctacggtgtcctgatgatcttcgtcagatccgatcaggatatgggccacgcggcggcgnccnggattgggcgtgagttgatccaggcgcaggatgtggtatccggccggggagcgcacggggcccacgatctgtccgaccttcatattgaagacggtattctcgagcgacttcatgagctgcaaggggtagatgtactccacgtggtcgaagaagacggagtcgtcgtctcgtccgggggccagctcacgggctactttgtcgtagttctcgcctcggctgatgcggtcgtaggcggctttggcgcggcgatagacggctacggtgtctttcgataccgttttctcaggcaggggaaagacgatgtcgctgaacgaggggagcatcttgccccggttatagacggtgcggatggcttcggcctcgccccgcttgtcggagaggaagccggcacgcagctgcanctcatagtcgcgcagttcgttgcggaagttttccgtttggtcgtactgggcggcttcagcgtcggccaccttttgcttgaagtgcttgaaaagcgtcacaaagtcgtcgagcgacttcttgttgttcaggtccacgccgctgtctttttgggcgatgaagaggaactccgagacggggatgtctttccctgccacggtcatgatcgtcgggtcgtcagctgcctttttctgtgcgaacgctccgctgaggggcatggcgcaacacagggcgacccataaaagccttcttttcattctatcgttgattggttgatgattgatctgtgaggccgttagttggccatttcggagaggaacttgatgcggacaagccggatctcgtcctcggtatagtcgctaccgagctcttcgatggcctcctggaggctgtccgtggttgactccttgaagtattgatagatgtcgtccacgcgatcctcgtcgatgg

SEQ ID NO: 211 - DNA, 4000 bp, Escherichia coli
  misc_feature (794)..(794): n is a, c, g, or t
  misc_feature (2164)..(2164): n is a, c, g, or t
  misc_feature (2923)..(2923): n is a, c, g, or t
  misc_feature (3030)..(3030): n is a, c, g, or t
  misc_feature (3032)..(3032): n is a, c, g, or t
  misc_feature (3034)..(3036): n is a, c, g, or t
  misc_feature (3038)..(3044): n is a, c, g, or t
  misc_feature (3046)..(3046): n is a, c, g, or t
  misc_feature (3049)..(3050): n is a, c, g, or t
  misc_feature (3052)..(3052): n is a, c, g, or t
  misc_feature (3054)..(3054): n is a, c, g, or t
  misc_feature (3056)..(3057): n is a, c, g, or t
  misc_feature (3059)..(3059): n is a, c, g, or t
  misc_feature (3062)..(3062): n is a, c, g, or t
  misc_feature (3065)..(3065): n is a, c, g, or t
  misc_feature (3067)..(3069): n is a, c, g, or t
  misc_feature (3071)..(3073): n is a, c, g, or t
  misc_feature (3077)..(3077): n is a, c, g, or t
  misc_feature (3082)..(3083): n is a, c, g, or t
  misc_feature (3086)..(3092): n is a, c, g, or t
  misc_feature (3097)..(3098): n is a, c, g, or t
  misc_feature (3105)..(3106): n is a, c, g, or t
  misc_feature (3108)..(3109): n is a, c, g, or t
  misc_feature (3111)..(3111): n is a, c, g, or t
  misc_feature (3114)..(3114): n is a, c, g, or t
  misc_feature (3121)..(3124): n is a, c, g, or t
  misc_feature (3127)..(3127): n is a, c, g, or t
  misc_feature (3130)..(3130): n is a, c, g, or t
  misc_feature (3133)..(3134): n is a, c, g, or t
  misc_feature (3136)..(3137): n is a, c, g, or t
  misc_feature (3139)..(3139): n is a, c, g, or t
  misc_feature (3141)..(3141): n is a, c, g, or t
  misc_feature (3148)..(3152): n is a, c, g, or t
  misc_feature (3154)..(3157): n is a, c, g, or t
  misc_feature (3160)..(3160): n is a, c, g, or t
  misc_feature (3163)..(3163): n is a, c, g, or t
  misc_feature (3165)..(3165): n is a, c, g, or t
  misc_feature (3168)..(3168): n is a, c, g, or t
  misc_feature (3170)..(3172): n is a, c, g, or t
  misc_feature (3175)..(3175): n is a, c, g, or t
  misc_feature (3178)..(3179): n is a, c, g, or t
  misc_feature (3183)..(3184): n is a, c, g, or t
  misc_feature (3186)..(3187): n is a, c, g, or t
  misc_feature (3190)..(3190): n is a, c, g, or t
  misc_feature (3195)..(3195): n is a, c, g, or t
  misc_feature (3197)..(3202): n is a, c, g, or t
  misc_feature (3205)..(3205): n is a, c, g, or t
  misc_feature (3209)..(3212): n is a, c, g, or t
  misc_feature (3214)..(3214): n is a, c, g, or t
  misc_feature (3216)..(3218): n is a, c, g, or t
  misc_feature (3221)..(3221): n is a, c, g, or t
  misc_feature (3223)..(3224): n is a, c, g, or t
  misc_feature (3229)..(3229): n is a, c, g, or t
  misc_feature (3231)..(3231): n is a, c, g, or t
  misc_feature (3236)..(3239): n is a, c, g, or t
  misc_feature (3248)..(3248): n is a, c, g, or t
  misc_feature (3250)..(3257): n is a, c, g, or t
  misc_feature (3259)..(3260): n is a, c, g, or t
  misc_feature (3262)..(3274): n is a, c, g, or t
  misc_feature (3277)..(3282): n is a, c, g, or t
  misc_feature (3284)..(3286): n is a, c, g, or t
  misc_feature (3288)..(3290): n is a, c, g, or t
  misc_feature (3292)..(3295): n is a, c, g, or t
  misc_feature (3297)..(3297): n is a, c, g, or t
  misc_feature (3299)..(3300): n is a, c, g, or t
  misc_feature (3303)..(3305): n is a, c, g, or t
  misc_feature (3307)..(3315): n is a, c, g, or t
  misc_feature (3317)..(3321): n is a, c, g, or t
  misc_feature (3323)..(3330): n is a, c, g, or t
  misc_feature (3332)..(3336): n is a, c, g, or t
  misc_feature (3338)..(3345): n is a, c, g, or t
  misc_feature (3347)..(3351): n is a, c, g, or t
  misc_feature (3354)..(3356): n is a, c, g, or t
  misc_feature (3358)..(3367): n is a, c, g, or t
  misc_feature (3369)..(3370): n is a, c, g, or t
  misc_feature (3373)..(3374): n is a, c, g, or t
  misc_feature (3376)..(3386): n is a, c, g, or t
  misc_feature (3388)..(3388): n is a, c, g, or t
  misc_feature (3391)..(3392): n is a, c, g, or t
  misc_feature (3394)..(3394): n is a, c, g, or t
  misc_feature (3396)..(3401): n is a, c, g, or t
  misc_feature (3403)..(3404): n is a, c, g, or t
  misc_feature (3406)..(3407): n is a, c, g, or t
  misc_feature (3409)..(3414): n is a, c, g, or t
  misc_feature (3416)..(3417): n is a, c, g, or t
  misc_feature (3419)..(3427): n is a, c, g, or t
  misc_feature (3429)..(3432): n is a, c, g, or t
  misc_feature (3434)..(3442): n is a, c, g, or t
  misc_feature (3444)..(3447): n is a, c, g, or t
  misc_feature (3449)..(3457): n is a, c, g, or t
  misc_feature (3459)..(3462): n is a, c, g, or t
  misc_feature (3464)..(3466): n is a, c, g, or t
  misc_feature (3468)..(3470): n is a, c, g, or t
  misc_feature (3472)..(3481): n is a, c, g, or t
  misc_feature (3483)..(3485): n is a, c, g, or t
  misc_feature (3487)..(3490): n is a, c, g, or t
  misc_feature (3492)..(3492): n is a, c, g, or t
  misc_feature (3494)..(3496): n is a, c, g, or t
  misc_feature (3498)..(3505): n is a, c, g, or t
  misc_feature (3508)..(3517): n is a, c, g, or t
  misc_feature (3519)..(3519): n is a, c, g, or t
  misc_feature (3521)..(3523): n is a, c, g, or t
  misc_feature (3525)..(3532): n is a, c, g, or t
  misc_feature (3535)..(3538): n is a, c, g, or t
  misc_feature (3541)..(3544): n is a, c, g, or t
  misc_feature (3547)..(3547): n is a, c, g, or t
  misc_feature (3549)..(3550): n is a, c, g, or t
  misc_feature (3552)..(3553): n is a, c, g, or t
  misc_feature (3557)..(3560): n is a, c, g, or t
  misc_feature (3562)..(3565): n is a, c, g, or t
  misc_feature (3567)..(3570): n is a, c, g, or t
  misc_feature (3574)..(3575): n is a, c, g, or t
  misc_feature (3577)..(3577): n is a, c, g, or t
  misc_feature (3580)..(3585): n is a, c, g, or t
  misc_feature (3587)..(3587): n is a, c, g, or t
  misc_feature (3589)..(3592): n is a, c, g, or t
  misc_feature (3595)..(3602): n is a, c, g, or t
  misc_feature (3604)..(3605): n is a, c, g, or t
  misc_feature (3607)..(3616): n is a, c, g, or t
  misc_feature (3619)..(3620): n is a, c, g, or t
  misc_feature (3622)..(3645): n is a, c, g, or t
  misc_feature (3647)..(3661): n is a, c, g, or t
  misc_feature (3663)..(3666): n is a, c, g, or t
  misc_feature (3668)..(3670): n is a, c, g, or t
  misc_feature (3672)..(3673): n is a, c, g, or t
  misc_feature (3676)..(3681): n is a, c, g, or t
  misc_feature (3684)..(3685): n is a, c, g, or t
  misc_feature (3687)..(3688): n is a, c, g, or t
  misc_feature (3691)..(3696): n is a, c, g, or t
  misc_feature (3699)..(3704): n is a, c, g, or t
  misc_feature (3706)..(3711): n is a, c, g, or t
  misc_feature (3713)..(3715): n is a, c, g, or t
  misc_feature (3717)..(3721): n is a, c, g, or t
  misc_feature (3723)..(3730): n is a, c, g, or t
  misc_feature (3734)..(3746): n is a, c, g, or t
  misc_feature (3748)..(3752): n is a, c, g, or t
  misc_feature (3754)..(3758): n is a, c, g, or t
  misc_feature (3760)..(3773): n is a, c, g, or t
  misc_feature (3775)..(3777): n is a, c, g, or t
  misc_feature (3779)..(3787): n is a, c, g, or t
  misc_feature (3789)..(3792): n is a, c, g, or t
  misc_feature (3794)..(3798): n is a, c, g, or t
  misc_feature (3800)..(3800): n is a, c, g, or t
  misc_feature (3803)..(3807): n is a, c, g, or t
  misc_feature (3809)..(3810): n is a, c, g, or t
  misc_feature (3813)..(3813): n is a, c, g, or t
  misc_feature (3815)..(3815): n is a, c, g, or t
  misc_feature (3818)..(3818): n is a, c, g, or t
  misc_feature (3821)..(3822): n is a, c, g, or t
  misc_feature (3830)..(3830): n is a, c, g, or t
  misc_feature (3833)..(3833): n is a, c, g, or t
  misc_feature (3848)..(3848): n is a, c, g, or t
  misc_feature (3851)..(3851): n is a, c, g, or t
  misc_feature (3861)..(3861): n is a, c, g, or t
  misc_feature (3863)..(3866): n is a, c, g, or t
  misc_feature (3868)..(3868): n is a, c, g, or t
  misc_feature (3870)..(3874): n is a, c, g, or t
  misc_feature (3877)..(3878): n is a, c, g, or t
  misc_feature (3882)..(3885): n is a, c, g, or t
  misc_feature (3887)..(3893): n is a, c, g, or t
  misc_feature (3895)..(3896): n is a, c, g, or t
  misc_feature (3898)..(3907): n is a, c, g, or t
  misc_feature (3909)..(3910): n is a, c, g, or t
  misc_feature (3914)..(3915): n is a, c, g, or t
  misc_feature (3917)..(3919): n is a, c, g, or t
  misc_feature (3922)..(3922): n is a, c, g, or t
  misc_feature (3925)..(3926): n is a, c, g, or t
  misc_feature (3929)..(3931): n is a, c, g, or t
  misc_feature (3933)..(3936): n is a, c, g, or t
  misc_feature (3938)..(3939): n is a, c, g, or t
  misc_feature (3941)..(3948): n is a, c, g, or t
  misc_feature (3950)..(3963): n is a, c, g, or t
  misc_feature (3966)..(3968): n is a, c, g, or t
  misc_feature (3971)..(3971): n is a, c, g, or t
  misc_feature (3973)..(3978): n is a, c, g, or t
  misc_feature (3980)..(3989): n is a, c, g, or t
  misc_feature (3991)..(3996): n is a, c, g, or t
  misc_feature (3998)..(4000): n is a, c, g, or t
ccaccaatgctgatagcccaaaaacgtgctgaagttgcggggagaatcattacacctacagccatgagtgtcccaatagcgtggaagcctcctacaagattcagcactaccagtaaaagaaaggtgaaatgggtgattgcgctaagtccgcttactgaacgaaaaaactgcggatcagcgcattccaaaactagaggtcgaaataataaagagagtgttactagtgagaaacttgagattgagcagagtaagatcaacgttgcatcgtcaagcgctaaaacagtaccgaagagtacatgcattaggtctacattacttccacgcgtcgaaacaatcagcactccaatcgccagcgaaatcaagtagaatgctgccaaactggcatcttcacggagaattgtcatgcgagttacaaatccagatagtaacgcaaccagaagtccagctgttaaacctccgatagtcataggtattagagaaagaccaaaaacgagaaatcctacggctgccccaggcaaaattgcgtgagccatcgcatcacctgttaaactcatccgacgcagcataaggaaggttcctacgggcgtcgctccaacagaaatggctatacaaccgagaagtgctcgacgcataaatccaaattctgcaaagggttgaaatattgtatcccaaatcatgctacacttcgtccgcaaacatggggtggtccggcacaagcttcacacatctgtcgagcacggaattggttttctgcagttaaaacactttctgtcggtccgtgggctaccagttcncgtgctatcatcagcgtttgtggaaaatgagtacgaactgtatcatgattgtgcattacagccagaattgtccgcccttctccatgccagcgtgtgataatcttgagtaagtcagtcattgtacgggtatcgatagcgttgaaaggctcatctaataataccaattgtgcatcttggagaagcagtcttgcaaagagaacacgctgcatctgaccacctgaaagggcaccaatgattctggattcgaagccagatagtcccacagcagcaattgccttttcgacaaggctttgttgtgctgcgctgagccagccgaatgggccaatttctctccacaagcccattgcaacaaggtcaattactgtaattgggaatgaacgatcgatatcggattgctgcggcagataagctatattttcccggctgaacgagcctaaacccaaacttccctccataggaacgagcgtcccgatcacacccttaagcagcgtcgattttccagcaccgttgggccccactacagcagtcaaacttccagcagcaatttcagtatctagccgatggatagcgggttgatgatcatatcccagagtaaggttgttgaaccgaagagcgtgcactagaaccccccagggttggtagttgcccagaaaaagccaccccacaaggctacaatcaacaataaagcaactgctaatctcaaactggccccggttgtgagcaatcgaaacttcccgctaatcatgtttgattttagttttgttcatggccgcaattttcgcagactccttgcagttcgattacatgacgtgaaggggcaaaacccgaattggcaatgaccgctgaaagcgcgtcaagtacgcctgtgtcgatatgctcacttacaactccacaatcatcacaaattgttattacagcactttcatcatgtttgtcggttttgcaggcaatataggcatttagtgattcaagccggtgcgcacgccctctttcaaccaaatcagaaagtgttcggtagattgttgggggagcaattttaggatttttatccctcagttttcccagaatttcgtaagctgacattggttgttcactggtttgcaaaatttccagtacggcaacgctccatctattttttcgacccatttttcatatcctacttaatttgttatgttatgttataaaataacaatataaggatataaattagttaatgatattcaagattaatcatggccatgaattctctgcgggtttgggtatcattgcgaaacgacccgtgggtacgcatagtcaccatgctcacatctgatttttgaacgccgcgggttgtcatacattgatgagcggcctcgataacaacaccaacnccttttggctttagtatttcttggattgtatctgcgatttgggatgtgagtgcctcctgaatctgcattcgtttagcaaagatatctaccagacgtaccaacttagaaataccaacgactctttcatttggaagatagccgatatgagctttgccaataattggaacgatgtgatgctcgcagtgagattcaagtcgaatatctttgagaacaattaactcatcgtaaccagatatattttcaaacgtttttgccagcaacgattgagggtcttcattgtatccagcaaagaattcttcgtaagctctgaccacgcgatctggtgtacctaaaagaccgtctctatctggatcttctcctgaccattctatcaaagtgcgaactgcaccctcagcttcctctctggtaggctttttcttcgtttctgctaatggttctgtgaggttttttgacaacttttcctaataaaattaattaccgagggaaaatgatgatctggcgaatatcctgaaagattttcacttgccaaaagtttgaaaaattagtgtttgaaattgctaaagttttaagtttggattatctgggttcaactctgcaaatccctgttttccttgtattatcatctgaactgctatttcttccattagttcgaaagtgctgaaaagttctaactgaattgattttagattttctggtttgttacatatgagagagtaggtcgcagagaattctgagtgaatttcttttgctgaatgttgntgttcgtcctcatgatgttcgtcctcatgatgttcgtcctcatgatgttcgtcctcatgatgttcgtcctcatgatgttcgtcctcatgatgttcgtcctcatgatntncnnncnnnnnnntngcnncngnannantancancnnnannnttanaattnntannnnnnnaaatnntattttnnannanttnaagttgnnnnttngtnttnngnncntnttcaaannnnncnnnnttntangnagngnnnttnaanncaannannaantcagnannnnnnaanacannnntnannntgncnnccccntnaatgnnnncctctaacnannnnnnnncnnannnnnnnnnnnnnaannnnnnannnannnannnntnannaannnannnnnnnnnannnnnannnnnnnnannnnnannnnnnnnannnnnacnnnannnnnnnnnncnntannannnnnnnnnnnantanntntnnnnnnannanntnnnnnnanntnnnnnnnnntnnnntnnnnnnnnntnnnntnnnnnnnnntnnnntnnntnnnannnnnnnnnntnnnannnnantnnntnnnnnnnnaannnnnnnnnngntnnnannnnnnnngannnnaannnntgngnntnnaatnnnngnnnntnnnnttgnngntgnnnnnntngnnnntgnnnnnnnngnncnnnnnnnnnntgnncnnnnnnnnnnnnnnnnnnnnnnnntnnnnnnnnnnnnnnntnnnntnnnanntgnnnnnnttnnanntgnnnnnnttnnnnnngnnnnnntnnngnnnnngnnnnnnnngatnnnnnnnnnnnnnannnnnannnnnannnnnnnnnnnnnnannnannnnnnnnnannnnannnnnangannnnnannatnangangannaccatgangangaggatcaccatgangangaggatcacnannnngnannnnntcnngatnnnnannnnnnncnngnnnnnnnnnntnntcannannnggnagnncannncnnnnannannnnnnnnannnnnnnnnnnnnnatnnngangnnnnnngnnnnnnnnnnannnnnntnnn

SEQ ID NO: 212 - DNA, 4000 bp, Escherichia coli
  misc_feature (26)..(26): n is a, c, g, or t
  misc_feature (1983)..(1983): n is a, c, g, or t
  misc_feature (1985)..(1985): n is a, c, g, or t
  misc_feature (1992)..(1992): n is a, c, g, or t
  misc_feature (1997)..(1998): n is a, c, g, or t
  misc_feature (2012)..(2013): n is a, c, g, or t
  misc_feature (2048)..(2049): n is a, c, g, or t
  misc_feature (2052)..(2052): n is a, c, g, or t
  misc_feature (2057)..(2058): n is a, c, g, or t
  misc_feature (3184)..(3184): n is a, c, g, or t
  misc_feature (3214)..(3214): n is a, c, g, or t
  misc_feature (3232)..(3232): n is a, c, g, or t
  misc_feature (3238)..(3238): n is a, c, g, or t
  misc_feature (3243)..(3243): n is a, c, g, or t
  misc_feature (3279)..(3280): n is a, c, g, or t
  misc_feature (3286)..(3286): n is a, c, g, or t
  misc_feature (3301)..(3301): n is a, c, g, or t
  misc_feature (3325)..(3325): n is a, c, g, or t
  misc_feature (3329)..(3329): n is a, c, g, or t
  misc_feature (3339)..(3339): n is a, c, g, or t
  misc_feature (3342)..(3342): n is a, c, g, or t
  misc_feature (3344)..(3344): n is a, c, g, or t
  misc_feature (3346)..(3348): n is a, c, g, or t
  misc_feature (3350)..(3350): n is a, c, g, or t
  misc_feature (3352)..(3353): n is a, c, g, or t
  misc_feature (3357)..(3358): n is a, c, g, or t
  misc_feature (3361)..(3361): n is a, c, g, or t
  misc_feature (3363)..(3364): n is a, c, g, or t
  misc_feature (3366)..(3371): n is a, c, g, or t
  misc_feature (3373)..(3373): n is a, c, g, or t
  misc_feature (3376)..(3378): n is a, c, g, or t
  misc_feature (3382)..(3385): n is a, c, g, or t
  misc_feature (3387)..(3387): n is a, c, g, or t
  misc_feature (3389)..(3398): n is a, c, g, or t
  misc_feature (3400)..(3401): n is a, c, g, or t
  misc_feature (3403)..(3407): n is a, c, g, or t
  misc_feature (3410)..(3410): n is a, c, g, or t
  misc_feature (3413)..(3428): n is a, c, g, or t
  misc_feature (3432)..(3432): n is a, c, g, or t
  misc_feature (3434)..(3435): n is a, c, g, or t
  misc_feature (3437)..(3437): n is a, c, g, or t
  misc_feature (3439)..(3443): n is a, c, g, or t
  misc_feature (3445)..(3447): n is a, c, g, or t
  misc_feature (3450)..(3451): n is a, c, g, or t
  misc_feature (3454)..(3455): n is a, c, g, or t
  misc_feature (3458)..(3459): n is a, c, g, or t
  misc_feature (3461)..(3461): n is a, c, g, or t
  misc_feature (3463)..(3468): n is a, c, g, or t
  misc_feature (3472)..(3473): n is a, c, g, or t
  misc_feature (3476)..(3476): n is a, c, g, or t
  misc_feature (3478)..(3489): n is a, c, g, or t
  misc_feature (3491)..(3491): n is a, c, g, or t
  misc_feature (3494)..(3495): n is a, c, g, or t
  misc_feature (3497)..(3498): n is a, c, g, or t
  misc_feature (3500)..(3501): n is a, c, g, or t
  misc_feature (3503)..(3503): n is a, c, g, or t
  misc_feature (3505)..(3505): n is a, c, g, or t
  misc_feature (3508)..(3511): n is a, c, g, or t
  misc_feature (3514)..(3518): n is a, c, g, or t
  misc_feature (3521)..(3524): n is a, c, g, or t
  misc_feature (3526)..(3527): n is a, c, g, or t
  misc_feature (3529)..(3531): n is a, c, g, or t
  misc_feature (3535)..(3537): n is a, c, g, or t
  misc_feature (3540)..(3545): n is a, c, g, or t
  misc_feature (3547)..(3549): n is a, c, g, or t
  misc_feature (3554)..(3554): n is a, c, g, or t
  misc_feature (3556)..(3556): n is a, c, g, or t
  misc_feature (3558)..(3561): n is a, c, g, or t
  misc_feature (3563)..(3564): n is a, c, g, or t
  misc_feature (3566)..(3566): n is a, c, g, or t
  misc_feature (3568)..(3569): n is a, c, g, or t
  misc_feature (3571)..(3580): n is a, c, g, or t
  misc_feature (3582)..(3582): n is a, c, g, or t
  misc_feature (3585)..(3590): n is a, c, g, or t
  misc_feature (3592)..(3592): n is a, c, g, or t
  misc_feature (3594)..(3594): n is a, c, g, or t
  misc_feature (3596)..(3600): n is a, c, g, or t
  misc_feature (3602)..(3603): n is a, c, g, or t
  misc_feature (3608)..(3608): n is a, c, g, or t
  misc_feature (3610)..(3614): n is a, c, g, or t
  misc_feature (3616)..(3621): n is a, c, g, or t
  misc_feature (3626)..(3629): n is a, c, g, or t
  misc_feature (3631)..(3642): n is a, c, g, or t
  misc_feature (3646)..(3647): n is a, c, g, or t
  misc_feature (3650)..(3651): n is a, c, g, or t
  misc_feature (3653)..(3653): n is a, c, g, or t
  misc_feature (3656)..(3656): n is a, c, g, or t
  misc_feature (3658)..(3665): n is a, c, g, or t
  misc_feature (3667)..(3667): n is a, c, g, or t
  misc_feature (3669)..(3671): n is a, c, g, or t
  misc_feature (3673)..(3677): n is a, c, g, or t
  misc_feature (3679)..(3679): n is a, c, g, or t
  misc_feature (3682)..(3685): n is a, c, g, or t
  misc_feature (3688)..(3691): n is a, c, g, or t
  misc_feature (3693)..(3693): n is a, c, g, or t
  misc_feature (3695)..(3699): n is a, c, g, or t
  misc_feature (3702)..(3703): n is a, c, g, or t
  misc_feature (3705)..(3705): n is a, c, g, or t
  misc_feature (3707)..(3709): n is a, c, g, or t
  misc_feature (3711)..(3714): n is a, c, g, or t
  misc_feature (3717)..(3717): n is a, c, g, or t
  misc_feature (3719)..(3719): n is a, c, g, or t
  misc_feature (3721)..(3722): n is a, c, g, or t
  misc_feature (3724)..(3726): n is a, c, g, or t
  misc_feature (3728)..(3728): n is a, c, g, or t
  misc_feature (3730)..(3731): n is a, c, g, or t
  misc_feature (3733)..(3734): n is a, c, g, or t
  misc_feature (3738)..(3738): n is a, c, g, or t
  misc_feature (3742)..(3743): n is a, c, g, or t
  misc_feature (3745)..(3755): n is a, c, g, or t
  misc_feature (3757)..(3758): n is a, c, g, or t
  misc_feature (3760)..(3760): n is a, c, g, or t
  misc_feature (3763)..(3769): n is a, c, g, or t
  misc_feature (3771)..(3778): n is a, c, g, or t
  misc_feature (3780)..(3781): n is a, c, g, or t
  misc_feature (3783)..(3786): n is a, c, g, or t
  misc_feature (3788)..(3794): n is a, c, g, or t
  misc_feature (3796)..(3798): n is a, c, g, or t
  misc_feature (3800)..(3802): n is a, c, g, or t
  misc_feature (3804)..(3804): n is a, c, g, or t
  misc_feature (3808)..(3810): n is a, c, g, or t
  misc_feature (3813)..(3818): n is a, c, g, or t
  misc_feature (3820)..(3820): n is a, c, g, or t
  misc_feature (3823)..(3824): n is a, c, g, or t
  misc_feature (3827)..(3829): n is a, c, g, or t
  misc_feature (3831)..(3834): n is a, c, g, or t
  misc_feature (3836)..(3840): n is a, c, g, or t
  misc_feature (3842)..(3842): n is a, c, g, or t
  misc_feature (3844)..(3846): n is a, c, g, or t
  misc_feature (3848)..(3852): n is a, c, g, or t
  misc_feature (3854)..(3854): n is a, c, g, or t
  misc_feature (3858)..(3862): n is a, c, g, or t
  misc_feature (3864)..(3867): n is a, c, g, or t
  misc_feature (3869)..(3869): n is a, c, g, or t
  misc_feature (3871)..(3872): n is a, c, g, or t
  misc_feature (3874)..(3875): n is a, c, g, or t
  misc_feature (3877)..(3881): n is a, c, g, or t
  misc_feature (3883)..(3888): n is a, c, g, or t
  misc_feature (3890)..(3891): n is a, c, g, or t
  misc_feature (3893)..(3894): n is a, c, g, or t
  misc_feature (3896)..(3896): n is a, c, g, or t
  misc_feature (3898)..(3900): n is a, c, g, or t
  misc_feature (3902)..(3902): n is a, c, g, or t
  misc_feature (3904)..(3904): n is a, c, g, or t
  misc_feature (3906)..(3910): n is a, c, g, or t
  misc_feature (3912)..(3912): n is a, c, g, or t
  misc_feature (3914)..(3919): n is a, c, g, or t
  misc_feature (3921)..(3925): n is a, c, g, or t
  misc_feature (3927)..(3928): n is a, c, g, or t
  misc_feature (3931)..(3935): n is a, c, g, or t
  misc_feature (3937)..(3937): n is a, c, g, or t
  misc_feature (3941)..(3941): n is a, c, g, or t
  misc_feature (3944)..(3946): n is a, c, g, or t
  misc_feature (3950)..(3951): n is a, c, g, or t
  misc_feature (3953)..(3953): n is a, c, g, or t
  misc_feature (3955)..(3956): n is a, c, g, or t
  misc_feature (3958)..(3964): n is a, c, g, or t
  misc_feature (3966)..(3967): n is a, c, g, or t
  misc_feature (3969)..(3971): n is a, c, g, or t
  misc_feature (3973)..(3983): n is a, c, g, or t
  misc_feature (3985)..(3988): n is a, c, g, or t
  misc_feature (3990)..(3991): n is a, c, g, or t
  misc_feature (3994)..(3995): n is a, c, g, or t
  misc_feature (3998)..(3999): n is a, c, g, or t
ctagtaacaccacaaagttgtggtantgcaaaaaatggaaaaatgacctgattgacttcatacgtaattataattataccatggataaccgcggtaggtaccctcgttgtaccaaccaacgctgcaacccgcgcgatcgggcatggcgagcatattgtaaccatgccatgacgccttgccggtatacatcactagtagcatcagccgttcgactgcgatgcacgaatcgtcgcactgtactttttcgcagagacatatgagtcggaaatactcgatagcccaaataatcaattccaactctgactggctgtatttgtactttttttgggtgaaattgtaattgtaaatgctgctccacaaacgtagctgtcgcagtctgaaaactgtgtagctcagtgaggtcattactacagactgcaatatcgtccatgtacctaatgtaccgtttggtgcctaaggtatgttttacatactggtccagggcatttagatacacattggcaaacaactgactggtgagattgccaattggtataccaacaccagggtatgtatgactactgtcaataatcaggttgcatagtcgcaacatccgctgatcagccaagcggcgacgcagcaacatgagtaatgtcgcgtggttaatgctagcaaaatatctagaaatatctgccgtcaaaacatactgatttgtacgtacataacgttgaaacgtagtgattgcggcgattgtacccttaccccggcggcaagcatacgagtggtgcacgaaactcggctcatagattggctctagcgcagcatgtatcgcttgatgcacaacacgatcgcgaaacggtgccgcctggatgtgccttttcttggcatctttcacaataaattgctgatacgccccgtgacgataggtctcggtcaaaacttctgtttgtagttgtatcaaattaccttctagattttctgtaaatgaaaccacctgactgcgataccgcttacctcgtcgtgctcgtttataggctcgcaataacgcagcaaaagaaaaagcttcttcaaatacagcattgtgggttttcatgctaaaaaatacattcacttactacaaataatacatgcaactgtatgcagagcacagactgacactagcaatactgtgctctgtaataactgggagccactgaccaccccgtgagtattccaaagctgtactaacacacgacatagatacagctccgatattttcctgatgtgtgtgacacgacaagaaggatgatgtccgtatgtaccaagagtactggcctagcaccatgatgctactactcggacacatactggtgagtatgggtacataccgggcacaccgaaacccaatgttcgagttcacgttcgaaggcgcgttgttcaggttcaacgtgaacaccccagagttcgaaccgttgttgcggttgccaccgcggatgaacgcccgctggtgccagacatcaccctcacaccactcttaaccttttaaggaaaacagtggtgtgatgcttgatacctgattaataccgcactcatacaatacactatttaggactactactcttaatccaaccgccaagtaggcgaccaatttcggtgactttcttactgacaaattcgtactgcttggtgctcataaaacgcaattcgtgagctaatcgggtcaacactcgcaacatatcaagttcaacacttacttgttttaagtaaggtagtttttgtgtttcgacattggcccgcataatacccattgtgatacgtagagccaacgtctggatttgttgccctaagacaaaccgctgcgctttagggaaggtgttcaccatgggaaataaccataggttcagttcatacattttctcaaaaataatcagatctttatacataaagtggtataacaaatttggttgcgttagatatccagaaaccccagataccagatacctaccgggcacaccgaaacccaangntcgagtncacgnncgaaggcgcgttgnncaggttcaacgcgaacaccccagagtacgaaccgnngtngcggnngccaccgcggaggaacgcccgctgggcggtcgctgtgtcaccaacatcggtatacagtcgaccgacaccgttggcactactccagtcggtcactggtgggcgcaggtacgccaggcctttgtagttgatcccggcggtgtactctaggtattcgctggcaacactagcgatctcttctgggtgttcggctgcaaccgacacggcgtcagtccattcccacacgttgccagccacgtcccacaccacctcaccattattaagggcgtgggtacgcaactgggactggttggctgcaccagcactatagccggtggcgctccactgctgtgtagtaccatagtaccctttgtcagccgctgtagacccgccggcaccagttccccgcaactcacagttacccgcgctataggcgttgtcagcatgctcgagcggctgcatcaggttgcagccggtagtaaccggatcagccgaccctacagccgccaagttactggccgggccattgtcgctatggccggtggccagctgtaggccggcgtcactgtccaggtcgttgatcggcaaagtggcgatttgttcggctacagtcatccactcgggttcagagatcaggcggtactccgggccgattgcttcacaggtcaggcgggcgttgacttgactgataccgacccatggtgtaccagctgccgtcgaaacagcgttgttggagccgtcgtttttggcttcgtacttcatcatacaaaatccgggtagggtgccgtacttggcactgccgggcacccacacgtagcccgctgggcagtgctcacgcaggtcgcccgcgatgactgtgttctcgaccgctaggttacccgtactaccaatgtcagccggcagaccaggacaagcgccacccgcacagatgttgacgttctcatctagccaccacccgttaccaccactggcagaaaaaatcaggtcaccagtagcatccacctggaattccgcaaatgtagtagcatcataagcaatccgctgctgcgcagtagcagcagtgtcaaacacggtgagtcgagtggaggggctggtagtgccaatcccaacgttgccatcgctgcctacaaagataccttcatcatctccntctcccgagaggaagttagagccaagcgcnatgttggctagtgagccngacatngttanttgcttctttaatagcgtggtgctgtcgacactcanntgtccngcgattgctaactgngcttcgtctgggccgggtgcgccnacgntgtattcgtngangncnnngncnntagnnccnannannnnnntnttnnngccnnnngngnnnnnnnnnncnntnnnnngancannnnnnnnnnnnnnnncacnanngntnnnnncnnngcnngcnntgnngncnnnnnnggtnntgntnnnnnnnnnnnngntgnngnngnngncnctnnnnccnnnnncannnntnntnnngccnnnggnnnnnnannngagancntnnnnannantnncnnnnnnnnnnanacnnnnnntntnannnnngnnggcgntnnnnncnnnnnnggtgnnnntnnnnnnnnnnnngttnncgnngnggncnnnnnnnncnannncnnnnntnttnnnnccnnnngngnnnnnggnnanannntnnnnacnantnncnnnantnnanncacnaaanntnnnnnnnnnnntnncngtnnnnnnntnnnnnnnngnncnnnncnnnnnnncnnngnnntngtcnnnaannnnnncnacnncannnannnntnnnnngncnnngnnnnngntgannnnntnnnnantnntnncnnnnncnnnnnngnnanngntnnngncnannnnngnannnnnnannnnnanngtnnnnntnaggntgnnntcgnngncnncnnnnnnncnntnnncnnnnnnnnnnntnnnnannccnncgnng

SEQ ID NO: 213 - DNA, 4000 bp, Escherichia coli
  misc_feature (251)..(251): n is a, c, g, or t
  misc_feature (283)..(283): n is a, c, g, or t
  misc_feature (517)..(517): n is a, c, g, or t
  misc_feature (542)..(542): n is a, c, g, or t
  misc_feature (606)..(606): n is a, c, g, or t
  misc_feature (792)..(792): n is a, c, g, or t
  misc_feature (795)..(795): n is a, c, g, or t
  misc_feature (806)..(806): n is a, c, g, or t
  misc_feature (1970)..(1970): n is a, c, g, or t
  misc_feature (1989)..(1990): n is a, c, g, or t
  misc_feature (2316)..(2316): n is a, c, g, or t
  misc_feature (2409)..(2410): n is a, c, g, or t
  misc_feature (2415)..(2415): n is a, c, g, or t
  misc_feature (2421)..(2424): n is a, c, g, or t
  misc_feature (2431)..(2431): n is a, c, g, or t
  misc_feature (2433)..(2433): n is a, c, g, or t
  misc_feature (2437)..(2438): n is a, c, g, or t
  misc_feature (2441)..(2442): n is a, c, g, or t
  misc_feature (2449)..(2449): n is a, c, g, or t
  misc_feature (2451)..(2451): n is a, c, g, or t
  misc_feature (2455)..(2456): n is a, c, g, or t
  misc_feature (2463)..(2463): n is a, c, g, or t
  misc_feature (2465)..(2465): n is a, c, g, or t
  misc_feature (2470)..(2472): n is a, c, g, or t
  misc_feature (2475)..(2475): n is a, c, g, or t
  misc_feature (2481)..(2481): n is a, c, g, or t
  misc_feature (2484)..(2486): n is a, c, g, or t
  misc_feature (2491)..(2491): n is a, c, g, or t
  misc_feature (2496)..(2497): n is a, c, g, or t
  misc_feature (2500)..(2500): n is a, c, g, or t
  misc_feature (2503)..(2504): n is a, c, g, or t
  misc_feature (2515)..(2515): n is a, c, g, or t
  misc_feature (2517)..(2517): n is a, c, g, or t
  misc_feature (2519)..(2519): n is a, c, g, or t
  misc_feature (2523)..(2523): n is a, c, g, or t
  misc_feature (2528)..(2530): n is a, c, g, or t
  misc_feature (2532)..(2533): n is a, c, g, or t
  misc_feature (2536)..(2536): n is a, c, g, or t
  misc_feature (2539)..(2540): n is a, c, g, or t
  misc_feature (2543)..(2543): n is a, c, g, or t
  misc_feature (2545)..(2548): n is a, c, g, or t
  misc_feature (2550)..(2550): n is a, c, g, or t
  misc_feature (2552)..(2556): n is a, c, g, or t
  misc_feature (2558)..(2560): n is a, c, g, or t
  misc_feature (2562)..(2563): n is a, c, g, or t
  misc_feature (2565)..(2568): n is a, c, g, or t
  misc_feature (2574)..(2576): n is a, c, g, or t
  misc_feature (2579)..(2582): n is a, c, g, or t
  misc_feature (2584)..(2586): n is a, c, g, or t
  misc_feature (2590)..(2590): n is a, c, g, or t
  misc_feature (2592)..(2597): n is a, c, g, or t
  misc_feature (2599)..(2599): n is a, c, g, or t
  misc_feature (2601)..(2601): n is a, c, g, or t
  misc_feature (2603)..(2603): n is a, c, g, or t
  misc_feature (2605)..(2605): n is a, c, g, or t
  misc_feature (2608)..(2615): n is a, c, g, or t
  misc_feature (2617)..(2617): n is a, c, g, or t
  misc_feature (2620)..(2623): n is a, c, g, or t
  misc_feature (2626)..(2632): n is a, c, g, or t
  misc_feature (2634)..(2635): n is a, c, g, or t
  misc_feature (2637)..(2640): n is a, c, g, or t
  misc_feature (2642)..(2642): n is a, c, g, or t
  misc_feature (2644)..(2644): n is a, c, g, or t
  misc_feature (2646)..(2651): n is a, c, g, or t
  misc_feature (2655)..(2665): n is a, c, g, or t
  misc_feature (2667)..(2667): n is a, c, g, or t
  misc_feature (2671)..(2672): n is a, c, g, or t
  misc_feature (2674)..(2675): n is a, c, g, or t
  misc_feature (2677)..(2677): n is a, c, g, or t
  misc_feature (2680)..(2688): n is a, c, g, or t
  misc_feature (2690)..(2693): n is a, c, g, or t
  misc_feature (2695)..(2695): n is a, c, g, or t
  misc_feature (2697)..(2698): n is a, c, g, or t
  misc_feature (2700)..(2704): n is a, c, g, or t
  misc_feature (2706)..(2706): n is a, c, g, or t
  misc_feature (2708)..(2714): n is a, c, g, or t
  misc_feature (2716)..(2719): n is a, c, g, or t
  misc_feature (2721)..(2722): n is a, c, g, or t
  misc_feature (2726)..(2727): n is a, c, g, or t
  misc_feature (2730)..(2733): n is a, c, g, or t
  misc_feature (2735)..(2738): n is a, c, g, or t
  misc_feature (2740)..(2749): n is a, c, g, or t
  misc_feature (2751)..(2753): n is a, c, g, or t
  misc_feature (2755)..(2773): n is a, c, g, or t
  misc_feature (2775)..(2779): n is a, c, g, or t
  misc_feature (2781)..(2782): n is a, c, g, or t
  misc_feature (2784)..(2784): n is a, c, g, or t
  misc_feature (2786)..(2787): n is a, c, g, or t
  misc_feature (2789)..(2799): n is a, c, g, or t
  misc_feature (2801)..(2801): n is a, c, g, or t
  misc_feature (2803)..(2811): n is a, c, g, or t
  misc_feature (2813)..(2815): n is a, c, g, or t
  misc_feature (2817)..(2831): n is a, c, g, or t
  misc_feature (2833)..(2836): n is a, c, g, or t
  misc_feature (2838)..(2838): n is a, c, g, or t
  misc_feature (2842)..(2849): n is a, c, g, or t
  misc_feature (2851)..(2851): n is a, c, g, or t
  misc_feature (2853)..(2853): n is a, c, g, or t
  misc_feature (2856)..(2857): n is a, c, g, or t
  misc_feature (2859)..(2864): n is a, c, g, or t
  misc_feature (2866)..(2869): n is a, c, g, or t
  misc_feature (2871)..(2872): n is a, c, g, or t
  misc_feature (2875)..(2875): n is a, c, g, or t
  misc_feature (2877)..(2877): n is a, c, g, or t
  misc_feature (2879)..(2882): n is a, c, g, or t
  misc_feature (2884)..(2888): n is a, c, g, or t
  misc_feature (2890)..(2894): n is a, c, g, or t
  misc_feature (2896)..(2897): n is a, c, g, or t
  misc_feature (2899)..(2902): n is a, c, g, or t
  misc_feature (2904)..(2908): n is a, c, g, or t
  misc_feature (2911)..(2911): n is a, c, g, or t
  misc_feature (2913)..(2913): n is a, c, g, or t
  misc_feature (2915)..(2917): n is a, c, g, or t
  misc_feature (2919)..(2920): n is a, c, g, or t
  misc_feature (2922)..(2926): n is a, c, g, or t
  misc_feature (2928)..(2934): n is a, c, g, or t
  misc_feature (2936)..(2936): n is a, c, g, or t
  misc_feature (2939)..(2940): n is a, c, g, or t
  misc_feature (2945)..(2946): n is a, c, g, or t
  misc_feature (2948)..(2949): n is a, c, g, or t
  misc_feature (2952)..(2954): n is a, c, g, or t
  misc_feature (2956)..(2961): n is a, c, g, or t
  misc_feature (2964)..(2966): n is a, c, g, or t
  misc_feature (2968)..(2971): n is a, c, g, or t
  misc_feature (2973)..(2976): n is a, c, g, or t
  misc_feature (2979)..(2982): n is a, c, g, or t
  misc_feature (2985)..(2987): n is a, c, g, or t
  misc_feature (2989)..(2994): n is a, c, g, or t
  misc_feature (2996)..(2999): n is a, c, g, or t
  misc_feature (3003)..(3003): n is a, c, g, or t
  misc_feature (3005)..(3005): n is a, c, g, or t
  misc_feature (3007)..(3008): n is a, c, g, or t
  misc_feature (3010)..(3010): n is a, c, g, or t
  misc_feature (3012)..(3014): n is a, c, g, or t
  misc_feature (3016)..(3017): n is a, c, g, or t
  misc_feature (3019)..(3020): n is a, c, g, or t
  misc_feature (3023)..(3026): n is a, c, g, or t
  misc_feature (3028)..(3035): n is a, c, g, or t
  misc_feature (3037)..(3037): n is a, c, g, or t
  misc_feature (3039)..(3041): n is a, c, g, or t
  misc_feature (3044)..(3060): n is a, c, g, or t
  misc_feature (3062)..(3064): n is a, c, g, or t
  misc_feature (3067)..(3073): n is a, c, g, or t
  misc_feature (3075)..(3075): n is a, c, g, or t
  misc_feature (3078)..(3080): n is a, c, g, or t
  misc_feature (3082)..(3094): n is a, c, g, or t
  misc_feature (3097)..(3106): n is a, c, g, or t
  misc_feature (3108)..(3109): n is a, c, g, or t
  misc_feature (3111)..(3115): n is a, c, g, or t
  misc_feature (3117)..(3125): n is a, c, g, or t
  misc_feature (3127)..(3136): n is a, c, g, or t
  misc_feature (3139)..(3139): n is a, c, g, or t
  misc_feature (3141)..(3145): n is a, c, g, or t
  misc_feature (3149)..(3153): n is a, c, g, or t
  misc_feature (3155)..(3157): n is a, c, g, or t
  misc_feature (3160)..(3163): n is a, c, g, or t
  misc_feature (3165)..(3168): n is a, c, g, or t
  misc_feature (3171)..(3171): n is a, c, g, or t
  misc_feature (3174)..(3174): n is a, c, g, or t
  misc_feature (3176)..(3176): n is a, c, g, or t
  misc_feature (3178)..(3178): n is a, c, g, or t
  misc_feature (3180)..(3180): n is a, c, g, or t
  misc_feature (3184)..(3185): n is a, c, g, or t
  misc_feature (3187)..(3187): n is a, c, g, or t
  misc_feature (3189)..(3189): n is a, c, g, or t
  misc_feature (3191)..(3191): n is a, c, g, or t
  misc_feature (3193)..(3194): n is a, c, g, or t
  misc_feature (3197)..(3198): n is a, c, g, or t
  misc_feature (3200)..(3204): n is a, c, g, or t
  misc_feature (3207)..(3208): n is a, c, g, or t
  misc_feature (3210)..(3210): n is a, c, g, or t
  misc_feature (3212)..(3214): n is a, c, g, or t
  misc_feature (3216)..(3216): n is a, c, g, or t
  misc_feature (3219)..(3220): n is a, c, g, or t
  misc_feature (3223)..(3228): n is a, c, g, or t
  misc_feature (3230)..(3231): n is a, c, g, or t
  misc_feature (3233)..(3233): n is a, c, g, or t
  misc_feature (3235)..(3235): n is a, c, g, or t
  misc_feature (3237)..(3240): n is a, c, g, or t
  misc_feature (3243)..(3243): n is a, c, g, or t
  misc_feature (3245)..(3251): n is a, c, g, or t
  misc_feature (3253)..(3257): n is a, c, g, or t
  misc_feature (3259)..(3261): n is a, c, g, or t
  misc_feature (3264)..(3265): n is a, c, g, or t
  misc_feature (3268)..(3269): n is a, c, g, or t
  misc_feature (3271)..(3271): n is a, c, g, or t
  misc_feature (3273)..(3278): n is a, c, g, or t
  misc_feature (3280)..(3281): n is a, c, g, or t
  misc_feature (3283)..(3288): n is a, c, g, or t
  misc_feature (3294)..(3294): n is a, c, g, or t
  misc_feature (3296)..(3296): n is a, c, g, or t
  misc_feature (3298)..(3301): n is a, c, g, or t
  misc_feature (3305)..(3312): n is a, c, g, or t
  misc_feature (3314)..(3320): n is a, c, g, or t
  misc_feature (3323)..(3323): n is a, c, g, or t
  misc_feature (3325)..(3330): n is a, c, g, or t
  misc_feature (3332)..(3334): n is a, c, g, or t
  misc_feature (3336)..(3337): n is a, c, g, or t
  misc_feature (3339)..(3340): n is a, c, g, or t
  misc_feature (3343)..(3346): n is a, c, g, or t
  misc_feature (3348)..(3348): n is a, c, g, or t
  misc_feature (3351)..(3351): n is a, c, g, or t
  misc_feature (3353)..(3361): n is a, c, g, or t
  misc_feature (3365)..(3365): n is a, c, g, or t
  misc_feature (3367)..(3373): n is a, c, g, or t
  misc_feature (3375)..(3375): n is a, c, g, or t
  misc_feature (3377)..(3381): n is a, c, g, or t
  misc_feature (3383)..(3390): n is a, c, g, or t
  misc_feature (3393)..(3394): n is a, c, g, or t
  misc_feature (3396)..(3397): n is a, c, g, or t
  misc_feature (3399)..(3403): n is a, c, g, or t
  misc_feature (3406)..(3406): n is a, c, g, or t
  misc_feature (3408)..(3408): n is a, c, g, or t
  misc_feature (3414)..(3415): n is a, c, g, or t
  misc_feature (3417)..(3421): n is a, c, g, or t
  misc_feature (3423)..(3424): n is a, c, g, or t
  misc_feature (3426)..(3430): n is a, c, g, or t
  misc_feature (3433)..(3433): n is a, c, g, or t
  misc_feature (3435)..(3436): n is a, c, g, or t
  misc_feature (3438)..(3439): n is a, c, g, or t
  misc_feature (3442)..(3443): n is a, c, g, or t
  misc_feature (3445)..(3451): n is a, c, g, or t
  misc_feature (3453)..(3455): n is a, c, g, or t
  misc_feature (3457)..(3457): n is a, c, g, or t
  misc_feature (3460)..(3460): n is a, c, g, or t
  misc_feature (3462)..(3462): n is a, c, g, or t
  misc_feature (3464)..(3471): n is a, c, g, or t
  misc_feature (3473)..(3486): n is a, c, g, or t
  misc_feature (3488)..(3490): n is a, c, g, or t
  misc_feature (3492)..(3494): n is a, c, g, or t
  misc_feature (3496)..(3498): n is a, c, g, or t
  misc_feature (3500)..(3500): n is a, c, g, or t
  misc_feature (3503)..(3507): n is a, c, g, or t
  misc_feature (3510)..(3514): n is a, c, g, or t
  misc_feature (3516)..(3519): n is a, c, g, or t
  misc_feature (3522)..(3524): n is a, c, g, or t
  misc_feature (3528)..(3530): n is a, c, g, or t
  misc_feature (3533)..(3535): n is a, c, g, or t
  misc_feature (3538)..(3540): n is a, c, g, or t
  misc_feature (3542)..(3542): n is a, c, g, or t
  misc_feature (3544)..(3548): n is a, c, g, or t
  misc_feature (3550)..(3554): n is a, c, g, or t
  misc_feature (3556)..(3559): n is a, c, g, or t
  misc_feature (3563)..(3570): n is a, c, g, or t
  misc_feature (3573)..(3580): n is a, c, g, or t
  misc_feature (3582)..(3582): n is a, c, g, or t
  misc_feature (3584)..(3589): n is a, c, g, or t
  misc_feature (3592)..(3594): n is a, c, g, or t
  misc_feature (3596)..(3596): n is a, c, g, or t
  misc_feature (3599)..(3599): n is a, c, g, or t
  misc_feature (3604)..(3607): n is a, c, g, or t
  misc_feature (3609)..(3611): n is a, c, g, or t
  misc_feature (3613)..(3617): n is a, c, g, or t
  misc_feature (3619)..(3620): n is a, c, g, or t
  misc_feature (3622)..(3622): n is a, c, g, or t
  misc_feature (3624)..(3624): n is a, c, g, or t
  misc_feature (3628)..(3628): n is a, c, g, or t
  misc_feature (3630)..(3630): n is a, c, g, or t
  misc_feature (3632)..(3632): n is a, c, g, or t
  misc_feature (3634)..(3639): n is a, c, g, or t
  misc_feature (3642)..(3645): n is a, c, g, or t
  misc_feature (3647)..(3648): n is a, c, g, or t
  misc_feature (3650)..(3651): n is a, c, g, or t
  misc_feature (3656)..(3659): n is a, c, g, or t
  misc_feature (3662)..(3665): n is a, c, g, or t
  misc_feature (3667)..(3668): n is a, c, g, or t
  misc_feature (3670)..(3675): n is a, c, g, or t
  misc_feature (3678)..(3679): n is a, c, g, or t
  misc_feature (3681)..(3682): n is a, c, g, or t
  misc_feature (3684)..(3688): n is a, c, g, or t
  misc_feature (3690)..(3690): n is a, c, g, or t
  misc_feature (3693)..(3695): n is a, c, g, or t
  misc_feature (3700)..(3701): n is a, c, g, or t
  misc_feature (3705)..(3705): n is a, c, g, or t
  misc_feature (3708)..(3709): n is a, c, g, or t
  misc_feature (3711)..(3723): n is a, c, g, or t
  misc_feature (3728)..(3736): n is a, c, g, or t
  misc_feature (3738)..(3738): n is a, c, g, or t
  misc_feature (3740)..(3742): n is a, c, g, or t
  misc_feature (3744)..(3744): n is a, c, g, or t
  misc_feature (3747)..(3747): n is a, c, g, or t
  misc_feature (3752)..(3753): n is a, c, g, or t
  misc_feature (3756)..(3759): n is a, c, g, or t
  misc_feature (3761)..(3761): n is a, c, g, or t
  misc_feature (3764)..(3770): n is a, c, g, or t
  misc_feature (3773)..(3779): n is a, c, g, or t
  misc_feature (3781)..(3788): n is a, c, g, or t
  misc_feature (3790)..(3790): n is a, c, g, or t
  misc_feature (3792)..(3793): n is a, c, g, or t
  misc_feature (3795)..(3795): n is a, c, g, or t
  misc_feature (3797)..(3797): n is a, c, g, or t
  misc_feature (3799)..(3799): n is a, c, g, or t
  misc_feature (3801)..(3802): n is a, c, g, or t
  misc_feature (3806)..(3807): n is a, c, g, or t
  misc_feature (3809)..(3809): n is a, c, g, or t
  misc_feature (3814)..(3815): n is a, c, g, or t
  misc_feature (3817)..(3820): n is a, c, g, or t
  misc_feature (3824)..(3824): n is a, c, g, or t
  misc_feature (3826)..(3830): n is a, c, g, or t
  misc_feature (3834)..(3836): n is a, c, g, or t
  misc_feature (3838)..(3840): n is a, c, g, or t
  misc_feature (3842)..(3842): n is a, c, g, or t
  misc_feature (3844)..(3844): n is a, c, g, or t
  misc_feature (3847)..(3847): n is a, c, g, or t
  misc_feature (3850)..(3850): n is a, c, g, or t
  misc_feature (3852)..(3852): n is a, c, g, or t
  misc_feature (3855)..(3856): n is a, c, g, or t
  misc_feature (3858)..(3858): n is a, c, g, or t
  misc_feature (3860)..(3864): n is a, c, g, or t
  misc_feature (3868)..(3869): n is a, c, g, or t
  misc_feature (3871)..(3873): n is a, c, g, or t
  misc_feature (3876)..(3876): n is a, c, g, or t
  misc_feature (3880)..(3880): n is a, c, g, or t
  misc_feature (3883)..(3886): n is a, c, g, or t
  misc_feature (3888)..(3889): n is a, c, g, or t
  misc_feature (3892)..(3896): n is a, c, g, or t
  misc_feature (3898)..(3905): n is a, c, g, or t
  misc_feature (3908)..(3910): n is a, c, g, or t
  misc_feature (3912)..(3912): n is a, c, g, or t
  misc_feature (3914)..(3914): n is a, c, g, or t
  misc_feature (3917)..(3917): n is a, c, g, or t
  misc_feature (3919)..(3923): n is a, c, g, or t
  misc_feature (3925)..(3925): n is a, c, g, or t
  misc_feature (3927)..(3928): n is a, c, g, or t
  misc_feature (3930)..(3932): n is a, c, g, or t
  misc_feature (3935)..(3936): n is a, c, g, or t
  misc_feature (3938)..(3938): n is a, c, g, or t
  misc_feature (3940)..(3950): n is a, c, g, or t
  misc_feature (3952)..(3952): n is a, c, g, or t
  misc_feature (3954)..(3954): n is a, c, g, or t
  misc_feature (3956)..(3964): n is a, c, g, or t
  misc_feature (3966)..(3966): n is a, c, g, or t
  misc_feature (3969)..(3971): n is a, c, g, or t
  misc_feature (3973)..(3976): n is a, c, g, or t
  misc_feature (3980)..(3985): n is a, c, g, or t
  misc_feature (3987)..(3987): n is a, c, g, or t
  misc_feature (3992)..(3992): n is a, c, g, or t
  misc_feature (3994)..(4000): n is a, c, g, or t
aagtctcccacctatgctacacagaacgttccgagtaccaatatcaagatatagtaaaggtcccggggtctttccgtctttccgcgcgtaacgagcatctttactcgtactgcaatttcgccgagttcatggtggagacagcgctcaagtcgttacgccattcgtgcaggtcggaacttacccgacaaggaatttcgctaccttaggatggttatagttaccaccgccgtttactggggcttaagttctcngcttcgctccgaagagctaaccagtccccttnaccttccagcaccgggcaggcgtcagtccgtatacatcgttttgcaacttcgcacggacctgtgtttttggtaaacagtcgcttgagcctattctctgcgtctaacttatgcttcgaaggtaaacctctacacaaaaattagccccccttctcccgaagttacgggggtattttgccgagttccttcaccacgattctctcgatcaccttggtattctctacctgaccacctgngtcggtttcgggtacgggccactanaaacctcgctagaagattttcttggcagcataggatcatccacttcgccttacggctcggcatnaagtctcagagattgttctgcggattttcctacagaacctcctacactcttaccccaggtcaaccatcgcctgggttggactaccttcctgcgtctctccattgcttgactactaccaacttgggtcgtgcgctccatcagctattgctagccaacttcaaacacttagcattattgattcgtcanggncggtttattgngggtactggaatatcaaccagttgtccatcgactacgcctgtcggcctcgccttaggacccgacttaccctgagcggattagcctggctcaggaacccttggtcattcggtggacgggtttctcacccgtctttcgctactcatgtctacattctcacttgtgtaacttccacggctggattcctccgccgcttcactagttacacaacgctctcctacccatccacactcctggatcttgcgaccgggatagtgtgtgaatgacagaacttcggtgctgtgcttgagccccgttacattgtcggcgcgaaatcacttgaccagtgagctattacgcactcttttaagggtggctgcttctaagccaacctcctggttgtctatgcgacttcacatccttttccacttagcacaggctttgggaccttagttgctgttctgggttgtttccctctcgacaatgaagcttatcccccactgtctcactgccacgttctcacttactggcattcggagtttggctgacgttggtaatcttgtaggacccctcggccatccagtagctctacctccagtaagaaacacgtgacgctgcacctaaatgcatttcggagagaaccagctatcacgaagtttgattggtctttcacccctagccacaactcatcccctaaattttcaactttagtgggttcggtcctccacgcggtcttacccgcgcttcaacctggtcatggcgagatcacctcgcttcgggtttagatgatgcgacttattcgccctattcagactcgctttcgctacggcttcccctcgacgggttaaccttgccacatcacactaactcgtagactcattcttcaaaaggcacgctgtcactgcacaaggcagctccaacggtttgtatgcaaacggtttcagattctatttcactccccttgcggggttcttttcacctttccctcacggtacttgttcactatcggtcaccagagagtatttaggcttagcgggtggtcccgccagattcataccggattacacgagtccggtattacttgggatactaaaaacaagataatgaaatttcgactacaggggtctcaccttctatgccggactttcccacgtccttcatctatttcattattttctgacttgttnaattaacggcagttaattnnatttagtcccacgacaccgatcatgcaacgcctgccggcttggcacatgattggtttagcctcttccgctttcgctcgccactactaacggaatcacggttgttttctcttcctgagggtactgagatgtttcacttcccctcgttacctttgactctcctatttattcagagagaaatgactggacattactccagccgggtttccccattcggtaatcctcggatcgaagcctggttggcggctccccgaggcttttcgcagcctcctacgaccttcatcggcttctggtgcctaggcatccgccatttgcacttattaatttntttctacatttattacaaagatgctcgcgttcactgtgtagttctcaaggtacgggcgatgttaattaacattgatgagttatttttattttnnatttnttaaannnntaaaaanantttnnccnnttaattnantccnnagggttngnacccnnnggncccaanaannngcaanatttnnaanaannaaaatttaaantnantttnaaaannnanntgnggnnaanannnnantnnnnncnnnanntnnnnaaagannnctnnnnannnaggngnnnnnncngncncnccnnnnnnnncnccnnnnttnnnnnnncnncnnnncnancnnnnnncccnnnnnnnnnnncncccnncnngnggnnnnnnnnntnnnngngnntnnnnncntnnnnnnngnnnngnngggnngtnnnnannnncnnnnnnnnnntnnncnnnnnnnnnnnnnnnnnnnannnnnannancnncnnnnnnnnnnngngnnnnnnnnncnnncnnnnnnnnnnnnnnngnnnntntttnnnnnnnncncnccnncnnnnnntnnnncnnccntntnnnncnnnnntnnnnncnngnnnncnnnnnaananannngnngnnnnntnnnnnnncntcnnccccnncnnccnnngnnnnnnccnnngnnnncnnnngtnnnnccnnnannnnnngnnnncaananannangnnngnngnnctnnnngnnnnnnnncncnnnacnnnnnnnnnnnnnnnnngnnnacnnnnnnncnccnnntnnnnnnnnnnnnngcnnnnnnnnnntnncnnnnntnnnnnnnnntnnnnnnnnnnttngnnnnnttcnnnnngnnncgnnnnannnngcngcntncncngctnntngngngnnccnncnnnnnttnntntnnntnttnntcnnnnnntnntncncnnnnggngnnnnnnntnnnnngnnngcnncgnngnannnnnngnngnnnnnncccacnantnnnncccnnnnnnnncnnnnnnnacnannnnnntnnntnntnntgnnnncnccncnnnnnnnnnctcntnnnnnnnantnnnnncnnnnnnnnctnncnncnnnnntgntnttcctnntnnnnncnncnnnnnccncnncnncannannnnnnncnnncnccncnannnnnnnntnnnnnnnnnnnnnngnnngnnngnnngnggnnnnnccnnnnntnnnnacnnncgannnaannnacnnncnannnnntnnnnncnnnnaatnnnnnnnnacnnnnnnnncncnnnnnntannncngcngctgnnnncnnntnnnnngnngntncttntntngnnnnnnccnnnncnntnncttcnnnnctnnnnanngnnnnnnacnncnngnnnnncntcnnnccgcnngcgncgnngnnnnnnnnnnnnntcctnnnnnnnnnantnnncnccnctgcnnccnnnngnagnnnnnnnggnnnnnnntnnnnnnnngngnngncngncnncctnncnggccnncnnnncgtngnnnnnttgnnnannnantnccncancnacnngntnnnnngccnngnnntcntccnccnnnnannttnnnnnannnnnnnntgnnncnanttntnnnnnantnntnnntannancnnnnnnnnnnngntntnnnnnnnnngnggnnngnnnnttcnnnnnntnttccncnnnnnnn

SEQ ID NO: 214 - DNA, 4000 bp, Escherichia coli
  misc_feature (1940)..(1940): n is a, c, g, or t
  misc_feature (1943)..(1944): n is a, c, g, or t
  misc_feature (1952)..(1952): n is a, c, g, or t
  misc_feature (1958)..(1958): n is a, c, g, or t
  misc_feature (1964)..(1965): n is a, c, g, or t
  misc_feature (1973)..(1974): n is a, c, g, or t
  misc_feature (1979)..(1980): n is a, c, g, or t
  misc_feature (1983)..(1983): n is a, c, g, or t
  misc_feature (1988)..(1989): n is a, c, g, or t
  misc_feature (1997)..(1998): n is a, c, g, or t
  misc_feature (2003)..(2004): n is a, c, g, or t
gccaaagatcggcgacaaaaatacgtggctggtctacgacgacaatctcaacgcgtatgtcgatacgggtatcgaggtcggatatgcgaacctgttgtcacgctacgacggtaagtttgccgaaatcgtcgtcccgtgtaccgaggcaaccaacgcggccgcagcggccacggtcgccgcaaacaacgcggccgcagcagccaatagcgcagcaggaagtgcatcgacggagacaacagcagcgaatacagccgcaggcaaggccaacgccgcaacgacggccgcaaataacgcagcaacagcggccaacacagccacgggtaaggcaaacgaggcggcgacagcagcaaataatgcagcggaatccgcacagcgcgtcgtcgacacctacgacgacgttatcaatacgctcgcgcactccgactgcaccctcgacgagcgggtcgaggcactcgaaaaggcgcttatagccgtcttgtcgggtgctgtcgtgattcccaaattgcagatcaaggaattgaacgtatggggcaataacagccttgcccccgtcggcgacggcgcaccgacgaaagccccggacagagccgggcagttctacatcgacaagaccgcccgcgcgctctatttctcaacgggtaacgcggccgtgtcagactggaaaattcaataatgcaaacggaatatggcacaggttaacaaatacgcagatcgggccgcttatacggccgacgcgaaacgtctttcaacgaaatcggccgtttcgttcatcgaaaatgaaacgacaacgatttacgacggtgtgaataccgtcgtcggaaaatcggctgccgccatcggcgatctcgccgttttcgataaaacggacggggttatcaaatacatcaaaagcgcaacgattgccaaggcgcagattccagcaaaccttgtaccgctggccgtcgtctatgcgcgacaaggtgaacagctattgatcgtatcgctcgaccatgtttcgggcagcatccgctgggcacatacctacgaggttgcattgtcgggtttcgatctcgctgcgggcggcacaatcgtgttgaagctcggttccgaccctgccgccgcagaggtgtcgatagcgtataccgcaggcgcaacgctcgcggatgttgcatcggctatcaacgcgaaactcaaaggtgggacacccaattactcctcgacggattatggcggatgggcggcgactgcggcggacaatttcgtcgtgatgggttcgaacacgtataacgcctcccgtgcggcgattgccgttgttggcggttgtcagatcgcaaggacaccggaagacattaactaccaaacaacgttgacgggggtgttgatcgaggggtcaaccgaatatgtccgccgcaacaacggcgttaattcgtcgtttgcgggctgtaatcccgaaaaattcctgcaatactattcggccaacggaaccgataccacaggaatcaaacccggaagtagcaccataattcgggaaagcgcttttacggaagaggccaacccggaactggtcgccgcctatccaacctaccgggattatctgttcggagaacatttgctgcaatatcccgcagcctacggcgcgctgcttcgtgatggcaaggccaacacgcacctgatcggcggtctgcggttcgtcgacatccacggcgaaagcgttccccgttatccggccgctgcggccgctctcgactacggcgtcacggtcgagggcgcaactaccggactggaagcgggcgcatggtggctgccgtccgtcgatgaagtctacctgctcatgcacgaccgcgtgctaacgtccgccgaccgggaaagcgaccctgtaaaccgcacgctgtcgcgcctcggtaagacgacctgctacggatcgggttattatccgtggacatcgtgcgagtacaattccnacnncgcgttcntctacnacggcnncacgggcnncgtgnncancaacnncaagtatnncacgnncgccgtgcgtccggtttccgctttgtaaaaacagttttcagtttttaattcccgcgccgcatcgcgtcggcgtgcggtgcgggttcgcaagttagacctatggcaaagaaattatctatcctcgacaaaacgttccaactggcgttgctcctgcatcgccggacggcggaattcaatcgcaaatacaaattcactatcggcgaccgcatcgacgttgtggcagaggaagcgcaggaaatgatactgcgggcgaatcatcaaaccgacccgaaacgggccgcacaaatcatctacgatttcgtcctgcgtattgacaccctgtcgctaaaactgcggatggccgttgcgctgggtctgatgagtgacgacgcaaaagcacaatgcgatatgcttatcgcaaagattaaagacgaggcgaggggttggcgaaactattttctgcgtggcgagggtgtcgtcggcaagagcaacgggccgtcggcagagagcctataattattattttgaaaagggtttgcatactatcattcatagttataccgacaatgcaaaaaactggcgagtacaattccaacaacgcgttcatctacaacggcaacacgggcaacgtgaacaacaacaacaagtataacacgaacgccgtgcgtccggtttccgaatttcaaggtaatgtagaccctttcgcctcgttctataaatcaatgcgggcggcatatcgcctatgcttaaaaaacaaagtgcataccgctaacgcgatacgcttttggcttgatgaagaaagcgagcttgtcgcgctcgcccgcgaggtgttcaactgcgaatatgtcccgcggcaatccatcgcatttatcgttacgaaaccatgcctgcgcgaagtggtagccgccgatttccgcgaccgaatcgtgcagcactatatcgtcatgcgcctcgaagctcttttcgaggaatgcggaacactcgacgataacatgttcagttgccgcgtcgggaaaggcaaccttgcggccatacaggccctacaacagcagatattccaccagtcgaaaggttataccgccgactgttatgtggcaaaattcgacctgcaatcattctttatgagcatcgacaaacgccgtctttacgacgagttggtcgcattggtcgccaaacgctacgagggatgggataaggatacgctgttgtatcttatccgcgtcgttacgctgcataatccgcaggacaacgccgtgcggaaaactccactttgcgattgggctgacctgccgcgctcgaagagcctctacaatgtcgattggttcctcggtttagccatcgggaacctcacgtcgcaatccgacgcgaatttctacaacgcacccgcgatgcggtggatgcgctccgttggcctcgctcctgtgaactacgtcgatgatttcgcattcgtcgtccgggataaggcatcgtttcttacggccatgccttatattcgaaactatttcgccgcagaacggggactgacgatgcacccgcggaaattctacctgcaacactactcgaaaggcatcaagtttttaggtgcggttatcaaatacaaccgcgtctacacgaacaaccaaaccgtcgcacggtgtttcggaaagattcactactacaacgaagcgtgccgacacagtagccgccgcaaggcccggcatgtcgagaagctggcgacaatcctaaactcctatttggggttgatgcggcatttcgatacgttcaacattcgtaaacgcatcgccgcagaggtcggaaccgtatggtgcgactatatccgtttcgacgacgacatcacgacggcaacggtcgtcaaacatttccggcaacgggaaatctgcaaatacaacgtccgcaaacaacgcagacgcgatttattcacactcaaaaacttactcaacgatggaaacacagcagcaaattaacgaattacagtcgcgccagttggaactgcgcgcgatcatggcatcgtcggacg

SEQ ID NO: 215 - DNA, 4000 bp, Escherichia coli
  misc_feature (2016)..(2016): n is a, c, g, or t
  misc_feature (2019)..(2019): n is a, c, g, or t
  misc_feature (2578)..(2578): n is a, c, g, or t
  misc_feature (2953)..(2953): n is a, c, g, or t
aaaatttttattaaaataacaattataaaaactattatcactacaataattgagtgaaaaaatggacaaagacgatttgagcaactcttttatggaccttaagtttgaaactttatcagttagggctgggcacaatagaactcatgaaggggagcattcagaacccttatttctgacatctagttttgtttttgaaagtgcttctgaggctgcttcaaagttttctggtgaacaggagggaaatgtctattctagatatacaaatccgacggtaaacatactagaagaaagaattgcagctctcgagggagcagagaaagctgtcgctacctcatctggcatggctgctatattaagcacatgtatggctcttttaaaatcaggggatcatattatctgctctcgaagtgtatttggagcaacaactgttctcttagaaaaataccttttgaagttcaatatagaaacgacctttgtgccactaattgatgaagaaagctggaaggctgctattaggcccgaaacaaaaattttgtacttagagaccccatcaaatccattgtgtgatgttgcagatattaaatctatatcaaaaatagctaaagataataacgcaatgatgattgtagacaattgtttttgtacgcctgcgttacaacagccccttaagcttggtgcagacctaatcatacattctgcgactaaatatttagatgggcagggtagatgtcttggtggcattgtggctggaaaagaaactgtgataagtgaaatcttaggctttgttcgaacagctgggcctacaatgagtccatttaatgcatggatatttttaaaaggcctagaaaccctgaggattcggatgctggctcattctagtagtgctcttgatttagcgttatggctggagaagcaacctcaggttactaaggttttttatacggggcttgagagtcaccctgggcatacattggcatctaaacaacaactagcttttggaggtgtgctgtctttcacagtcaaaggttctagaaaagaggcatggaaggttattgatggaacaaagctgatttcgctaaccgcaaatttaggtgatacgaaaacaacaataattcatccagccacgactacacacggtaggcttacagaaaaacaaaaaatcgaagcaggaattacagaaaatctgattcgtatagcggttgggttagaagatgtaggtgatatcaagaacgatattttaaatggccttgaagttctttagagtaaaaataggttcatattactttgttagcatgtttctcgctcccacaacaaattcatctttcttagagtcttttaaaattaatgcgggagtgtttattcctttaatgaaagatgggcgttcccccaaaatatttaaccaagatgacaagttaggaaaatcacccagacctacgccagaccatttatgtagtttcacccatggccaacatgcaatatctgcaatacttagctcacttgagagataggttctgccatttaagtggacatccataacaccaaataatctcttgacttcattttgatagcggtcgatagcaggctgatattcttcatgccaataacgataaaaaacattagcttgacccatcattgggcctattccacccatctggaacatcagccattgtatagctattgatcgatcatattcattcagaggtaaaagtttgcctgttttttcagctaaatatataagaatagctccagactcgaatacaacaaaatcattattatcatgatcaataataacaggtattttcccattgggattaagctttaggtaattattttttttttgatcatttgcgccgagatttaattcatttacagtataaataagaccaagctcttctaaagctatgctaatcttgtgaccatttggcgttgctgaagtgaaaagttcaatcatcatttagaccgtaattttatatcagaatcatagttgctagaataacacataaaactaatatcccntangaaaaaatttaaagtctcatggagaaaaaaatgatagaaacttcatttaaaaaccaaattattgcccaaaataaggcattaaaaggaagacaagaaaaacaggcggtaacaaatgcgcattatgtccataaacgagcgataacaggcccttttcaagattctctcgaggatatttctctaggccttggttgcttttggggtgctgaaaaaaaattctggaatcaggatggtgtgtacactactgcagttggttattcaggtggttatacgcaaaatccaacctatgatgaggtttgctctggattaactgggcactctgaggtcgtgaaagttatatacaattcaaaaaaaataacattgaaacacttactttcaatattttgggaatcacatgatccaacacaaggcatgaggcagggcaatgattcaggcacacaatatcgttctgcgatttactgttataataaaaaacaacttaatgacgcgttattttcaaaaaatctctatcaagagcaattaaaaacatatggttacggagaaataactactgaagtatgtnttaacaaagaatttttttatgctgaagactaccatcaacaatacttagccaaaaatccaaatggctactgtggtttgggtggtacaggaatcaaatatacccatagcttacccaataaaatttgataaatattccagctcaaaagttgatcataaaacaagatatataggtgattaaagaattgcattacatgtataattgtatattaagattttttatcagactaaatgcaaattaaatcaagactattctttttataaataattgattttaatgatataatttattaaaaattataattccttaaaaaaaattgataaaggcatcatatatctatagatttgttagacaaaggtcattaaaatcgattttcgntaatagtcatatataaatttcataattgactttttgttattgaaattaaaaaaatattggcgattcagcactttttttctgaatgctgaatataagttttaaatataatttttaaaggggaatgagagaatgaatattgttaaattacttggtgtatctttactagtattagggctagtagcatgtgccgataaatcagaagaagctgaggctcctgctccagaggcgactgaatcatctactggaaatagtaatattgataaattcaatacagaaaaatttggtagctcatcagatccgtctactgctccagctccagcttttgctatttcgaaaaacttgaagccaggcgagtatgtaaatgagaaaggagaggttgttaaaaatagagatctcgctactgcaaaagaaaatccaaagttacgtgaaatccctgaaggtattgaggaaggaagcgttgaacataccatgtggttgctttctcaagaagaatagcagtcattttataaaaaaagaattttttaaatcccaacttttatactagttgggattttttttgcaacgcctaacttgttctcgtaaataacctataaagtagagcagagcatttgaagtacactcaattttcaactcttgctttaaatagcaatctaattaaaagtaccttatcactgggttatgacaagttaacatctatacaggcagaaacactacctgaaattctaaagggatacgatgtaattggacaaggagtgactggctctggtaaaacagccgctttttctttgggtattttaaacaaacttgatgctgcaaaatttaaaatccaagcactagttttatgcccaacaagagagctagccgatcaggttgctggcgaaatacgtaagctaggatgcatgatacataatgtcaaagttctcacattatgtggaggctctgcatttggtccacaaaaaggatcactcgcacacggagcgcatataatagtaggaacacctggtcgaattttggatcacctagataaaaataatttatcatttgata

SEQ ID NO: 216 - DNA, 4000 bp, Escherichia coli
  misc_feature (1691)..(1691): n is a, c, g, or t
  misc_feature (1957)..(1957): n is a, c, g, or t
  misc_feature (2989)..(2989): n is a, c, g, or t
gagaaaaatgacattgttaccggcgtgatcaacggcaaagtcaagggcggtttcacggtcgaccttaacaacatcagagcattcttgcccgggtctctggtcgatgtaagaccggttcgcgatacgctgcatctcgaggggcaggaactggagttccgcctgatcaaactggatcgaaagcgcaataacgtggtggtatcgcgcagagcagtgctggagtctgtcagcagcgaagaacgtgatgcgctgctcgaaaagctgcaggaaggtatgtcggttaagggcattgtcaagaacctcaccgactatggcgcgtttgttgatctcggaggcgtggacggcttgttgcatatcacggatatgtcgtggaagcggatcaagcacccgagtgaaatcgtcaacgtcggtgacgagatcgatgtaaaagtgctcaagtacgaccgcgagcgcaatcgcgtctccctcggtctcaagcaactgggagaggatccctgggttgctatcaaggcccgctatccggagcattcaagggtcaaggctgttgtgaccaatctaaccgattacggctgttttgccgaattggaagaaggggttgagggcctggtccatgtgtcagaaatggactggacaaacaaaaacatccacccttccaaggtagttcagttaggcgatgagatcgacgtcatggtgctggacattgatgaagagcgtcgccggatatcgctcggtatcaagcagtgtttccagaatccttgggacggttttgccgaaagatttcaaaagggtgacaagatttccggcagcattaagtcaatcaccgactttggtattttcattggtcttgacggcaatatagacggactcgttcacctgtctgacatttcgtgggatgaggcgggggaagaggctgttcgcaactacaccaagggcgatgagatcgaaacggttatcctgtcgatagacccggagcgcgagagaatctcgctgggtatcaagcagctggaagaagatccctttacggactacgtcggtcagttcgaaaaaggcagtatcgtcaagggtactgtggtgtcggtagatgccaagacggcagttctgaccttggctgatggcgttgaaggtatcctgcgcgcgtcagaaatcagtcgtgacaaggtcgaggatgcccgcaatgccttgaaagagggtgaagaagtcgaggttaaggtggtcagtgttgaccggaaaaaccgagcgctcagcctgtctatcaaagcgatcgagattgacgatgaaaaagcagcgattcaggagcataagaactccgatgccgctgacgtctcaccgggaaccatcggtgatttgattaaggctgaaatggataaaaactagttgttacaagagtttacgttctgatagtctaggctgaaaagccggccataacagcagagccggcgaccggggcaggaggataacaatgacgaagtctgagctgattgaacgcattgcggaaaaacaaactcagttatcctccaaggacgtcgagttggcggtgaaagcagtgcttgaatatatgtctcaggtattgtctgacggtggccggattgagattcgaggtttcggcagtttctcactgcactatcgggtaccgcggatcgggcggaatccgaagaccggtactcccgttgctctgagtggaaaatacgtacccnatttcaaacccggaaaggaactccgagacagggtgaacgaaagcatgctcagtgagagcgcgccgagtgagagctttttctgacgtcggcaacgccctggttcgatttctctcagttcagccagagctgtcagctctggctgatcaaccggcaaccgtcaaagcacggttcgacccaagccaagtatgtccgttccatgcgctccctgctctgtaattagtgcgtaaagcttcaagccatgcgaaatttaagcaacttgctgtctngatttgttctgctgtcagtttttgtcgctgcaatcacattcacctacttcaacaccgattcagtcactatcactttcggtactctcgtcttcgctccgcggccggtttcggcctggataatcggagcgtttgtacttgggggagcgttaggtttgctcctggggctgaatgtcttctctcagctcaaatcaagagccaagcttaagcgcatgactaaagaccttgaaaacgcccgtcgggaggttgagcaactgcgtaatttgtctttgcgggatctcgactagatggagggagttgctctttacgcgctgctgctgatcgcgatctgtataggctggttgctcggacgatctggttcacgttccataatattccggccacggcaaacgagggatatttttcacgaatatttcgccgggctgaattacttgctcaacgacgagcccgatgaggcgattgataccttcattaaggctttggaagtcaacggagaaaccgtggagacgcatcttgcgcttggtgcgctgctcaggcgaagagggaaggtcgataaagccattaaagtgcatcaggcgttgttagcccgttcaggtttggaggcgtcgctggcagatgcagcgcgccttcagcttgcaaaggactacatttccggggggcttctcgacagagcggagcgcctactgaaagagctcgcgcagggaaagtctgaagggaaatgggaagcccttccgcttcttgtcagtatttatcagctggaaaaagagtggcaccgtgcgatcacctgtacaaaagaattgctctcacattcagcgtatcgacgcagcgcagaatggaatgcgcggatggtgcactatcactgtgaaatagcggaggggctgcttgtcgaagggcagttgggtgaagctcgtcagcagctgcgaagagggggccggtttcaacgtcaccatctccgggcgagtttattaacggcgaggcttgagcatgaatccggtaattgcaatggtgctattcgggaatgcaggcgcatcgcgnaacacagcccagagtttctcccagagttggtggatgtgatggcggccagctattccgagcttggccgttcaggtgagttgattcaggttctcgatggtttccttgataaggaggcgaacccggttgcgcttcagcttatctcccgactcattgctgaagctgagggcgctgacagggcgattcaatatattcgccgtcatcttgctgcacaaccttcgcttgcaggagtcgctcagttgctggaactagaggtggaaaccaatcaattcgaccccgcaatgctcagcgatattgaaaagattcgtgaggtgctgctggctcatctggctaagcaacccggtttccggtgtggctactgcggctacgaagcgaggcagctgtactggctttgtcccgggtgtcacaggtgggatagtatccagccaaaacttgagaaggggcgctgacggttaccagagtccgagatcgcgcacagcggcgttggatcttaccgctagccatcctttactgcaggcgtttgtccgttttatgagcgtcacatgctacacatacagggggttcacttgactgaaaagagaataataattgctctggatttcccgaccgctgctgcggctgagcaattcttgtccggactagatcccgcaagctgcagggttaaaattggcaaagagctcttcacagctgcggggccagattttgtcaggcgcgtggtcgctatgggctttgatgtctttcttgatctcaaatttcatgacatcccgaataccgtagcaggggctgtcagggtcgctgctgagctgggcgtctggatgataaacgttcatgcatccggtggggtcgctatgatgagcgaggcccgggaggcgctcgaagtcgtttccggcacccggccgttgctgattgcggtgaccatcctgaccagtctggccgaggacgatctcaccaggcaggggatttcgtgtagtccggcagagcaggtgattcgcctggcggagatgacgtcggaag

SEQ ID NO: 217 - DNA, 4000 bp, Escherichia coli
  misc_feature (1313)..(1313): n is a, c, g, or t
  misc_feature (1331)..(1331): n is a, c, g, or t
  misc_feature (1871)..(1871): n is a, c, g, or t
  misc_feature (1982)..(1982): n is a, c, g, or t
  misc_feature (1988)..(1988): n is a, c, g, or t
  misc_feature (1991)..(1991): n is a, c, g, or t
  misc_feature (2003)..(2003): n is a, c, g, or t
  misc_feature (2372)..(2372): n is a, c, g, or t
  misc_feature (2381)..(2381): n is a, c, g, or t
tgctaagactctagggcctgcgagagtaggattccagaaaatctgaactcgaaccaacccccttaaagctctttagtgcctcctcgtggagcatttccatagcatgacgtttatattcataagcctgtgaagaactcagcatctccagatttctcggccgtggcaaatcaatctgcactacttctctcaccgtggctggccggtttgacagtacaaccaggctgtcagcaaggataatagcctcctcaagctcagaggtgacaaatacgttagtccgagcctcctgctcgcataagcgcatgtagaactcctgcatcaactgacgagtcatggcgtccagaccgcggaatggctcatccatgaccatcaccagcggttggttaatcaatgcccgtgcaagctcagcacgccgttgcatgccacctgacagctgcaaaggatacttgtcccgaaactctttgagtccaaccgtttcaataatactgtcggccgcctcttttaattgatcgcgaggtatatcgccgcgcaacttggggccaaaggtgacgttctggtaggtagttaaccaaggcatcaaagcggtttcctgaaagacaaccagcgtatctttgctgggacctgtaactgggcgcccatccagcaggatttgaccgctgtctggcttctcgaaccctgccaacaagttgactactgtcgatttgccacagcctgagggcccaacaatcgcggtaagttgattgcgtcgaattttgagactgagattctcaataaccatctcacgttcccagtcctccccaaatgccttggagacattatttacttgcatcatgtcaggtgcgtctgccattaaatcttccaccggttcagttcacgatttaccattttctattcttgaaattttcctgaaatactacaatcagaacatccgccgccacggcatcgatctgtagccgatataccgtataagactactggagatatatcctgccaatcctatgctgatcatgccgacgataacctgatccattacgccacccatgtaggaactccagatgaaaaagcctaatcccccgccactttgctgaccaccaccggaaatcatctcagccgctagcactacttcccatgtaattcccatacctacggcggcgccgataaaaatggatggcaaagtgccgggcagaataatcttacgaaaaagatcccactgagttgcgcccatcgactgcgccgcccgtaggtactggatatctacagcacgtgcgccgccgagtacattaatgacgatggtatagaacgctccaagaaacgtnacaaacatgatcgacaantctgtagttggccagaaaatgatggaggccggcacccatgcaagcggtggtatcggacgaaggatctcaaatggcgggaaaaacatgcctcgaaagtatttattgactgccatcgctagtccaaatgggattccaataacttgtgcaatcaaaaaacctaggaacacccgacccatactcagataccaactttcccaatatccaggcaaaagaaccacatcgctccagcgagtcgcaacgattgatggcgcatccacctttcccacaaacgggaccataactccgaaccactcgttgaatcgaaatccgatctcccacagagtaagaaatatcagtattgataaaacaccacgtctgaaagtcagatctgaaactagggctttagctctagcgcctagcgtttcctgtctcttcgatgcctttcccatcttatttcctcaactttcagttactgcgcgcgatgaacattaagcaagctctcgctcacccgcttcaaacgctttgactgcttcttcatgaaccgcttctttggtctcttgnactaaaatcctaaactcttcagaagacagtaaccgataatctcttggcctattgatttttacttcgactattttctttgtcctggcaggacgcgtcgtcataacaatgacnctatcnccnaggaaaattgcntcttccaaatcatgcgttatgaaaaagatggtaactcgagtgcggtcatatacctcaagcagagattcatgcatgattgacttggtcagcgcgtccatagcacgatagggttcatccagcagcaatactttgggatcgtttatcaacgcgcgaacgatttctgcccgtcgcgccattcccgaggacacttcgcccggatacttgtctgcgacacccgataatccagcctcagatagcatcgaaattgctttctcgcgagcatcggctttattcattaatccctgaacaatcgggccataagctacgttatcagccaacgttttccaggggaacagtgcgccattctggaatacgacaacccgatcagcnccctgatcngccagcggtttgtccggtccacagagcatttcaccatcaagatctatctgccctgatgtgatcgagtgaaaaccggcaatagcgttcagcaaggttgtcttgccacagccggatggcccaacaatcatacagacctcagccggcgctatttctaaagagcaatcgtccaccgcaaggacatttgcaccctttgggtcataaatcttggtgacattgcgtatgctgatcgcccccttagtggaagcgttcttatctgttgccggctgctgatgagctgctgtagtcatctacacacctccttggccaagcgcctttgctcgccaccgcatcatacgattgccggcagcgcgcaccattgctgaggttatccaaccaacgagtcccagcgttaacatggccataaccatggtggtgtacttgttaaccatataagaagccataatcatataacccaacccataatcaccagagatcatctctgctgccactagagaaaaccaagctaccccgatactgatctgcaaaccggtaaatataaatggcaaagagccgggcacgaccacgttgatgaagacatgtcgtttcttagagccaaggcaacctgctgcgcggaaatatgattcatcaatggactctacaccgagcattgtgtttaaagcggtcacaaaaaaagaggctaaggttgccagatagatgattggcgtctcaaaccccgagaacatcacaattgcaagcggaacccatgcgagaatcggaatcggccgtaaggtctccagcactggaaaagtataatccttaaacttctttgaccagcccataaagaggcccaggggcacaccgagaactgttgccagagcgaagccaataatgactcgcctgcaactgacccaaatattaatatagtagtcttcggtaaaaagcgaggtaccccagatcgggtctctacttagccattcggttattacctcgaccgggcccgggatcttaaaaaaggggaaaattttccaatactcatttaaaagaaaataggtcagtagccatagcccgatacccgcgaacgccaggtatggcatgggcgtcttcaatgatttccaggtcttgtacaaaaaatactgaaagcctgttggagcgtgcccgctgacaccttgattactcattcacatcttccccttttgcccatgtctctggtgaacagtaagtactactctgcataccaccgggcgagctttttacaggcaggctcgcctacggcgggtgatactttaactttgtttttacttagaaatcaaaagcgggctccgagatactctcgaggcccgcttttcaatcaatctactaaactaacatcttaattattggtatgcagaatccggctgttcacccacaaatccgatgggtgccgacaagcctcgtgatgtcagaacttcttttgctacatcatccatgatggcttctggtcgcaatatcgcattcggtaccaccttccggccattcaggaacctagttgccgcagaaaccagttgcctggccgtatcatcaaacacgtatcgcaacgtcagcttttcttctccgccaccgatcgcaggagggttcttaccatacagtgatgcccagagtac

SEQ ID NO: 218 - DNA, 4000 bp, Escherichia coli
  misc_feature (2)..(15): n is a, c, g, or t
  misc_feature (20)..(25): n is a, c, g, or t
  misc_feature (27)..(28): n is a, c, g, or t
  misc_feature (33)..(39): n is a, c, g, or t
  misc_feature (44)..(48): n is a, c, g, or t
  misc_feature (52)..(58): n is a, c, g, or t
  misc_feature (60)..(61): n is a, c, g, or t
  misc_feature (63)..(64): n is a, c, g, or t
  misc_feature (66)..(80): n is a, c, g, or t
  misc_feature (82)..(82): n is a, c, g, or t
  misc_feature (90)..(104): n is a, c, g, or t
  misc_feature (106)..(106): n is a, c, g, or t
  misc_feature (108)..(140): n is a, c, g, or t
  misc_feature (142)..(143): n is a, c, g, or t
  misc_feature (145)..(146): n is a, c, g, or t
  misc_feature (148)..(176): n is a, c, g, or t
  misc_feature (178)..(188): n is a, c, g, or t
  misc_feature (193)..(193): n is a, c, g, or t
  misc_feature (195)..(250): n is a, c, g, or t
  misc_feature (255)..(255): n is a, c, g, or t
  misc_feature (257)..(262): n is a, c, g, or t
  misc_feature (265)..(270): n is a, c, g, or t
  misc_feature (272)..(294): n is a, c, g, or t
  misc_feature (296)..(301): n is a, c, g, or t
  misc_feature (303)..(320): n is a, c, g, or t
  misc_feature (322)..(326): n is a, c, g, or t
  misc_feature (328)..(339): n is a, c, g, or t
  misc_feature (344)..(347): n is a, c, g, or t
  misc_feature (349)..(358): n is a, c, g, or t
  misc_feature (360)..(364): n is a, c, g, or t
  misc_feature (366)..(388): n is a, c, g, or t
  misc_feature (390)..(420): n is a, c, g, or t
  misc_feature (423)..(423): n is a, c, g, or t
  misc_feature (426)..(426): n is a, c, g, or t
  misc_feature (428)..(440): n is a, c, g, or t
  misc_feature (442)..(443): n is a, c, g, or t
  misc_feature (445)..(460): n is a, c, g, or t
  misc_feature (462)..(496): n is a, c, g, or t
  misc_feature (498)..(522): n is a, c, g, or t
  misc_feature (530)..(550): n is a, c, g, or t
  misc_feature (552)..(552): n is a, c, g, or t
  misc_feature (554)..(557): n is a, c, g, or t
  misc_feature (559)..(561): n is a, c, g, or t
  misc_feature (563)..(569): n is a, c, g, or t
  misc_feature (571)..(572): n is a, c, g, or t
  misc_feature (574)..(575): n is a, c, g, or t
  misc_feature (577)..(582): n is a, c, g, or t
  misc_feature (584)..(585): n is a, c, g, or t
  misc_feature (587)..(588): n is a, c, g, or t
  misc_feature (600)..(601): n is a, c, g, or t
  misc_feature (603)..(617): n is a, c, g, or t
  misc_feature (619)..(626): n is a, c, g, or t
  misc_feature (628)..(673): n is a, c, g, or t
  misc_feature (675)..(675): n is a, c, g, or t
  misc_feature (678)..(680): n is a, c, g, or t
  misc_feature (684)..(684): n is a, c, g, or t
  misc_feature (686)..(686): n is a, c, g, or t
  misc_feature (690)..(705): n is a, c, g, or t
  misc_feature (708)..(708): n is a, c, g, or t
  misc_feature (710)..(720): n is a, c, g, or t
  misc_feature (723)..(730): n is a, c, g, or t
  misc_feature (732)..(733): n is a, c, g, or t
  misc_feature (740)..(748): n is a, c, g, or t
  misc_feature (750)..(781): n is a, c, g, or t
  misc_feature (783)..(787): n is a, c, g, or t
  misc_feature (789)..(811): n is a, c, g, or t
  misc_feature (815)..(817): n is a, c, g, or t
  misc_feature (819)..(819): n is a, c, g, or t
  misc_feature (822)..(823): n is a, c, g, or t
  misc_feature (827)..(853): n is a, c, g, or t
  misc_feature (855)..(856): n is a, c, g, or t
  misc_feature (858)..(863): n is a, c, g, or t
  misc_feature (865)..(865): n is a, c, g, or t
  misc_feature (871)..(871): n is a, c, g, or t
  misc_feature (874)..(874): n is a, c, g, or t
  misc_feature (876)..(881): n is a, c, g, or t
  misc_feature (883)..(884): n is a, c, g, or t
  misc_feature (886)..(886): n is a, c, g, or t
  misc_feature (888)..(888): n is a, c, g, or t
  misc_feature (892)..(892): n is a, c, g, or t
  misc_feature (895)..(895): n is a, c, g, or t
  misc_feature (901)..(901): n is a, c, g, or t
  misc_feature (904)..(910): n is a, c, g, or t
  misc_feature (912)..(933): n is a, c, g, or t
  misc_feature (936)..(940): n is a, c, g, or t
  misc_feature (942)..(954): n is a, c, g, or t
  misc_feature (956)..(969): n is a, c, g, or t
  misc_feature (971)..(979): n is a, c, g, or t
  misc_feature (981)..(1000): n is a, c, g, or t
  misc_feature (1002)..(1003): n is a, c, g, or t
  misc_feature (1006)..(1013): n is a, c, g, or t
  misc_feature (1015)..(1032): n is a, c, g, or t
  misc_feature (1034)..(1040): n is a, c, g, or t
  misc_feature (1042)..(1042): n is a, c, g, or t
  misc_feature (1044)..(1047): n is a, c, g, or t
  misc_feature (1049)..(1049): n is a, c, g, or t
  misc_feature (1052)..(1055): n is a, c, g, or t
  misc_feature (1058)..(1060): n is a, c, g, or t
  misc_feature (1062)..(1069): n is a, c, g, or t
  misc_feature (1072)..(1099): n is a, c, g, or t
  misc_feature (1102)..(1111): n is a, c, g, or t
  misc_feature (1113)..(1120): n is a, c, g, or t
  misc_feature (1122)..(1123): n is a, c, g, or t
  misc_feature (1125)..(1135): n is a, c, g, or t
  misc_feature (1137)..(1137): n is a, c, g, or t
  misc_feature (1140)..(1140): n is a, c, g, or t
  misc_feature (1142)..(1153): n is a, c, g, or t
  misc_feature (1156)..(1158): n is a, c, g, or t
  misc_feature (1160)..(1161): n is a, c, g, or t
  misc_feature (1164)..(1166): n is a, c, g, or t
  misc_feature (1168)..(1170): n is a, c, g, or t
  misc_feature (1173)..(1175): n is a, c, g, or t
  misc_feature (1178)..(1186): n is a, c, g, or t
  misc_feature (1190)..(1190): n is a, c, g, or t
  misc_feature (1196)..(1203): n is a, c, g, or t
  misc_feature (1205)..(1205): n is a, c, g, or t
  misc_feature (1208)..(1209): n is a, c, g, or t
  misc_feature (1211)..(1213): n is a, c, g, or t
  misc_feature (1215)..(1215): n is a, c, g, or t
  misc_feature (1219)..(1219): n is a, c, g, or t
  misc_feature (1221)..(1221): n is a, c, g, or t
  misc_feature (1223)..(1225): n is a, c, g, or t
  misc_feature (1227)..(1233): n is a, c, g, or t
  misc_feature (1235)..(1241): n is a, c, g, or t
  misc_feature (1245)..(1252): n is a, c, g, or t
  misc_feature (1255)..(1255): n is a, c, g, or t
  misc_feature (1257)..(1258): n is a, c, g, or t
  misc_feature (1260)..(1260): n is a, c, g, or t
  misc_feature (1262)..(1263): n is a, c, g, or t
  misc_feature (1265)..(1277): n is a, c, g, or t
  misc_feature (1279)..(1279): n is a, c, g, or t
  misc_feature (1282)..(1283): n is a, c, g, or t
  misc_feature (1287)..(1291): n is a, c, g, or t
  misc_feature (1296)..(1296): n is a, c, g, or t
  misc_feature (1299)..(1301): n is a, c, g, or t
  misc_feature (1304)..(1305): n is a, c, g, or t
  misc_feature (1311)..(1311): n is a, c, g, or t
  misc_feature (1313)..(1315): n is a, c, g, or t
  misc_feature (1508)..(1508): n is a, c, g, or t
  misc_feature (1512)..(1512): n is a, c, g, or t
  misc_feature (1526)..(1526): n is a, c, g, or t
  misc_feature (1986)..(1986): n is a, c, g, or t
  misc_feature (2611)..(2611): n is a, c, g, or t
  misc_feature (2614)..(2614): n is a, c, g, or t
  misc_feature (2616)..(2616): n is a, c, g, or t
  misc_feature (2618)..(2620): n is a, c, g, or t
  misc_feature (2622)..(2624): n is a, c, g, or t
  misc_feature (2629)..(2631): n is a, c, g, or t
  misc_feature (2633)..(2633): n is a, c, g, or t
  misc_feature (2636)..(2638): n is a, c, g, or t
  misc_feature (2642)..(2642): n is a, c, g, or t
  misc_feature (2645)..(2646): n is a, c, g, or t
  misc_feature (2648)..(2649): n is a, c, g, or t
  misc_feature (2653)..(2654): n is a, c, g, or t
  misc_feature (2664)..(2664): n is a, c, g, or t
  misc_feature (2799)..(2799): n is a, c, g, or t
  misc_feature (2948)..(2949): n is a, c, g, or t
  misc_feature (2951)..(2951): n is a, c, g, or t
  misc_feature (2954)..(2957): n is a, c, g, or t
  misc_feature (2959)..(2961): n is a, c, g, or t
  misc_feature (2963)..(2963): n is a, c, g, or t
  misc_feature (2965)..(2968): n is a, c, g, or t
  misc_feature (2970)..(2974): n is a, c, g, or t
  misc_feature (2976)..(2976): n is a, c, g, or t
  misc_feature (2978)..(2981): n is a, c, g, or t
  misc_feature (2983)..(2992): n is a, c, g, or t
  misc_feature (2995)..(2997): n is a, c, g, or t
  misc_feature (2999)..(3000): n is a, c, g, or t
  misc_feature (3003)..(3006): n is a, c, g, or t
  misc_feature (3011)..(3011): n is a, c, g, or t
  misc_feature (3015)..(3017): n is a, c, g, or t
  misc_feature (3019)..(3021): n is a, c, g, or t
  misc_feature (3023)..(3033): n is a, c, g, or t
  misc_feature (3036)..(3039): n is a, c, g, or t
  misc_feature (3041)..(3043): n is a, c, g, or t
  misc_feature (3046)..(3046): n is a, c, g, or t
  misc_feature (3048)..(3054): n is a, c, g, or t
  misc_feature (3056)..(3057): n is a, c, g, or t
  misc_feature (3060)..(3061): n is a, c, g, or t
  misc_feature (3064)..(3067): n is a, c, g, or t
  misc_feature (3069)..(3073): n is a, c, g, or t
  misc_feature (3075)..(3077): n is a, c, g, or t
  misc_feature (3079)..(3084): n is a, c, g, or t
  misc_feature (3087)..(3089): n is a, c, g, or t
  misc_feature (3091)..(3091): n is a, c, g, or t
  misc_feature (3093)..(3095): n is a, c, g, or t
  misc_feature (3097)..(3099): n is a, c, g, or t
  misc_feature (3101)..(3101): n is a, c, g, or t
  misc_feature (3103)..(3103): n is a, c, g, or t
  misc_feature (3105)..(3108): n is a, c, g, or t
  misc_feature (3110)..(3113): n is a, c, g, or t
  misc_feature (3115)..(3116): n is a, c, g, or t
  misc_feature (3118)..(3118): n is a, c, g, or t
  misc_feature (3122)..(3124): n is a, c, g, or t
  misc_feature (3126)..(3127): n is a, c, g, or t
  misc_feature (3129)..(3130): n is a, c, g, or t
  misc_feature (3133)..(3135): n is a, c, g, or t
  misc_feature (3137)..(3137): n is a, c, g, or t
  misc_feature (3141)..(3143): n is a, c, g, or t
  misc_feature (3146)..(3157): n is a, c, g, or t
  misc_feature (3159)..(3159): n is a, c, g, or t
  misc_feature (3163)..(3164): n is a, c, g, or t
  misc_feature (3166)..(3167): n is a, c, g, or t
  misc_feature (3170)..(3170): n is a, c, g, or t
  misc_feature (3174)..(3177): n is a, c, g, or t
  misc_feature (3179)..(3180): n is a, c, g, or t
  misc_feature (3182)..(3183): n is a, c, g, or t
  misc_feature (3186)..(3186): n is a, c, g, or t
  misc_feature (3188)..(3193): n is a, c, g, or t
  misc_feature (3195)..(3198): n is a, c, g, or t
  misc_feature (3200)..(3200): n is a, c, g, or t
  misc_feature (3203)..(3203): n is a, c, g, or t
  misc_feature (3205)..(3212): n is a, c, g, or t
  misc_feature (3215)..(3216): n is a, c, g, or t
  misc_feature (3218)..(3218): n is a, c, g, or t
  misc_feature (3223)..(3227): n is a, c, g, or t
  misc_feature (3229)..(3238): n is a, c, g, or t
  misc_feature (3240)..(3241): n is a, c, g, or t
  misc_feature (3243)..(3245): n is a, c, g, or t
  misc_feature (3247)..(3247): n is a, c, g, or t
  misc_feature (3249)..(3258): n is a, c, g, or t
  misc_feature (3261)..(3268): n is a, c, g, or t
  misc_feature (3270)..(3272): n is a, c, g, or t
  misc_feature (3275)..(3275): n is a, c, g, or t
  misc_feature (3277)..(3279): n is a, c, g, or t
  misc_feature (3281)..(3281): n is a, c, g, or t
  misc_feature (3283)..(3283): n is a, c, g, or t
  misc_feature (3285)..(3285): n is a, c, g, or t
  misc_feature (3287)..(3293): n is a, c, g, or t
  misc_feature (3295)..(3296): n is a, c, g, or t
  misc_feature (3298)..(3300): n is a, c, g, or t
  misc_feature (3302)..(3304): n is a, c, g, or t
  misc_feature (3307)..(3308): n is a, c, g, or t
  misc_feature (3313)..(3315): n is a, c, g, or t
  misc_feature (3317)..(3317): n is a, c, g, or t
  misc_feature (3322)..(3323): n is a, c, g, or t
  misc_feature (3325)..(3326): n is a, c, g, or t
  misc_feature (3328)..(3328): n is a, c, g, or t
  misc_feature (3330)..(3330): n is a, c, g, or t
  misc_feature (3335)..(3335): n is a, c, g, or t
  misc_feature (3337)..(3337): n is a, c, g, or t
  misc_feature (3341)..(3342): n is a, c, g, or t
  misc_feature (3344)..(3345): n is a, c, g, or t
  misc_feature (3347)..(3347): n is a, c, g, or t
  misc_feature (3349)..(3351): n is a, c, g, or t
  misc_feature (3353)..(3357): n is a, c, g, or t
  misc_feature (3359)..(3360): n is a, c, g, or t
  misc_feature (3362)..(3363): n is a, c, g, or t
  misc_feature (3365)..(3366): n is a, c, g, or t
  misc_feature (3368)..(3368): n is a, c, g, or t
  misc_feature (3370)..(3374): n is a, c, g, or t
  misc_feature (3378)..(3378): n is a, c, g, or t
  misc_feature (3380)..(3380): n is a, c, g, or t
  misc_feature (3382)..(3382): n is a, c, g, or t
  misc_feature (3384)..(3386): n is a, c, g, or t
  misc_feature (3390)..(3391): n is a, c, g, or t
  misc_feature (3393)..(3394): n is a, c, g, or t
  misc_feature (3396)..(3396): n is a, c, g, or t
  misc_feature (3398)..(3400): n is a, c, g, or t
  misc_feature (3402)..(3407): n is a, c, g, or t
  misc_feature (3413)..(3415): n is a, c, g, or t
  misc_feature (3418)..(3421): n is a, c, g, or t
  misc_feature (3427)..(3437): n is a, c, g, or t
  misc_feature (3440)..(3441): n is a, c, g, or t
  misc_feature (3444)..(3444): n is a, c, g, or t
  misc_feature (3450)..(3451): n is a, c, g, or t
  misc_feature (3457)..(3461): n is a, c, g, or t
  misc_feature (3464)..(3468): n is a, c, g, or t
  misc_feature (3471)..(3478): n is a, c, g, or t
  misc_feature (3481)..(3481): n is a, c, g, or t
  misc_feature (3485)..(3486): n is a, c, g, or t
  misc_feature (3493)..(3494): n is a, c, g, or t
  misc_feature (3500)..(3501): n is a, c, g, or t
  misc_feature (3506)..(3508): n is a, c, g, or t
  misc_feature (3515)..(3523): n is a, c, g, or t
  misc_feature (3528)..(3529): n is a, c, g, or t
  misc_feature (3536)..(3538): n is a, c, g, or t
  misc_feature (3541)..(3541): n is a, c, g, or t
  misc_feature (3545)..(3553): n is a, c, g, or t
  misc_feature (3556)..(3558): n is a, c, g, or t
  misc_feature (3561)..(3562): n is a, c, g, or t
  misc_feature (3565)..(3565): n is a, c, g, or t
  misc_feature (3568)..(3574): n is a, c, g, or t
  misc_feature (3579)..(3579): n is a, c, g, or t
  misc_feature (3582)..(3583): n is a, c, g, or t
  misc_feature (3586)..(3587): n is a, c, g, or t
  misc_feature (3597)..(3598): n is a, c, g, or t
  misc_feature (3601)..(3601): n is a, c, g, or t
  misc_feature (3611)..(3615): n is a, c, g, or t
  misc_feature (3619)..(3626): n is a, c, g, or t
  misc_feature (3631)..(3633): n is a, c, g, or t
  misc_feature (3636)..(3636): n is a, c, g, or t
  misc_feature (3642)..(3643): n is a, c, g, or t
  misc_feature (3648)..(3650): n is a, c, g, or t
  misc_feature (3657)..(3659): n is a, c, g, or t
  misc_feature (3664)..(3664): n is a, c, g, or t
  misc_feature (3667)..(3669): n is a, c, g, or t
  misc_feature (3672)..(3672): n is a, c, g, or t
  misc_feature (3675)..(3675): n is a, c, g, or t
  misc_feature (3679)..(3681): n is a, c, g, or t
  misc_feature (3685)..(3688): n is a, c, g, or t
  misc_feature (3693)..(3693): n is a, c, g, or t
  misc_feature (3696)..(3698): n is a, c, g, or t
  misc_feature (3701)..(3701): n is a, c, g, or t
  misc_feature (3704)..(3704): n is a, c, g, or t
  misc_feature (3711)..(3711): n is a, c, g, or t
  misc_feature (3714)..(3714): n is a, c, g, or t
  misc_feature (3717)..(3717): n is a, c, g, or t
  misc_feature (3720)..(3725): n is a, c, g, or t
  misc_feature (3730)..(3730): n is a, c, g, or t
  misc_feature (3733)..(3736): n is a, c, g, or t
  misc_feature (3740)..(3741): n is a, c, g, or t
  misc_feature (3744)..(3745): n is a, c, g, or t
  misc_feature (3748)..(3748): n is a, c, g, or t
  misc_feature (3753)..(3754): n is a, c, g, or t
  misc_feature (3761)..(3761): n is a, c, g, or t
  misc_feature (3764)..(3766): n is a, c, g, or t
  misc_feature (3769)..(3774): n is a, c, g, or t
  misc_feature (3777)..(3778): n is a, c, g, or t
  misc_feature (3782)..(3782): n is a, c, g, or t
  misc_feature (3785)..(3792): n is a, c, g, or t
  misc_feature (3798)..(3799): n is a, c, g, or t
  misc_feature (3802)..(3802): n is a, c, g, or t
  misc_feature (3805)..(3809): n is a, c, g, or t
  misc_feature (3812)..(3815): n is a, c, g, or t
  misc_feature (3819)..(3821): n is a, c, g, or t
  misc_feature (3824)..(3833): n is a, c, g, or t
  misc_feature (3838)..(3838): n is a, c, g, or t
  misc_feature (3845)..(3848): n is a, c, g, or t
  misc_feature (3852)..(3852): n is a, c, g, or t
  misc_feature (3858)..(3864): n is a, c, g, or t
  misc_feature (3867)..(3867): n is a, c, g, or t
  misc_feature (3870)..(3871): n is a, c, g, or t
  misc_feature (3878)..(3881): n is a, c, g, or t
  misc_feature (3888)..(3889): n is a, c, g, or t
  misc_feature (3892)..(3893): n is a, c, g, or t
  misc_feature (3896)..(3901): n is a, c, g, or t
  misc_feature (3904)..(3904): n is a, c, g, or t
  misc_feature (3910)..(3913): n is a, c, g, or t
  misc_feature (3916)..(3924): n is a, c, g, or t
  misc_feature (3926)..(3926): n is a, c, g, or t
  misc_feature (3937)..(3938): n is a, c, g, or t
  misc_feature (3940)..(3948): n is a, c, g, or t
  misc_feature (3950)..(3959): n is a, c, g, or t
  misc_feature (3962)..(3962): n is a, c, g, or t
  misc_feature (3967)..(3969): n is a, c, g, or t
  misc_feature (3971)..(3975): n is a, c, g, or t
  misc_feature (3977)..(3977): n is a, c, g, or t
  misc_feature (3981)..(3981): n is a, c, g, or t
  misc_feature (3986)..(3989): n is a, c, g, or t
  misc_feature (3991)..(3993): n is a, c, g, or t
  misc_feature (3997)..(3998): n is a, c, g, or t
  misc_feature (4000)..(4000): n is a, c, g, or t
gnnnnnnnnnnnnnnggggnnnnnngnnggggnnnnnnnccccnnnnncccnnnnnnncnncnncnnnnnnnnnnnnnnngngggggggnnnnnnnnnnnnnnngngnnnnnnnnnnnnnnnnnnnnnnnnnnnnnnnnngnngnngnnnnnnnnnnnnnnnnnnnnnnnnnnnnngnnnnnnnnnnnggggngnnnnnnnnnnnnnnnnnnnnnnnnnnnnnnnnnnnnnnnnnnnnnnnnnnnnnnnnggggngnnnnnnccnnnnnncnnnnnnnnnnnnnnnnnnnnnnncnnnnnngnnnnnnnnnnnnnnnnnnannnnnannnnnnnnnnnnggggnnnncnnnnnnnnnngnnnnngnnnnnnnnnnnnnnnnnnnnnnnannnnnnnnnnnnnnnnnnnnnnnnnnnnnnnggnggngnnnnnnnnnnnnngnngnnnnnnnnnnnnnnnngnnnnnnnnnnnnnnnnnnnnnnnnnnnnnnnnnnngnnnnnnnnnnnnnnnnnnnnnnnnncccccccnnnnnnnnnnnnnnnnnnnnngngnnnncnnncnnnnnnncnncnncnnnnnngnngnngggggggggggnngnnnnnnnnnnnnnnncnnnnnnnncnnnnnnnnnnnnnnnnnnnnnnnnnnnnnnnnnnnnnnnnnnnnnncnccnnngggngngggnnnnnnnnnnnnnnnnccncnnnnnnnnnnnggnnnnnnnncnnccccccnnnnnnnnngnnnnnnnnnnnnnnnnnnnnnnnnnnnnnnnngnnnnngnnnnnnnnnnnnnnnnnnnnnnncccnnncnccnncccnnnnnnnnnnnnnnnnnnnnnnnnnnncnncnnnnnnangggggnggngnnnnnngnngngngggnggngggggnggnnnnnnnannnnnnnnnnnnnnnnnnnnnnggnnnnngnnnnnnnnnnnnntnnnnnnnnnnnnnntnnnnnnnnnannnnnnnnnnnnnnnnnnnngnnggnnnnnnnncnnnnnnnnnnnnnnnnnngnnnnnnncncnnnncnccnnnnccnnngnnnnnnnnccnnnnnnnnnnnnnnnnnnnnnnnnnnnngannnnnnnnnnannnnnnnntnntnnnnnnnnnnntnttntnnnnnnnnnnnnaannnannatnnnannnatnnntcnnnnnnnnnaaanaagaannnnnnnntnatnnannngngagnancnnntnnnnnnnannnnnnngaannnnnnnngcngnngnannannnnnnnnnnnnncnacnnacgnnnnntattnatnnnatnnattaantnnntttagcgacacgtggatatcccgcgggcccgatgcggtcccgcaagataccacgggcgcacggcggatgccttggcacagggagccgatgaaggacgcggcaagctgcgataatccccggcgaggagcacacatccttcgacccgggggtctccgaatgggcgaacccatgcacagcagtgtgcatatccccncccngaacacataggggnggggaggacaacccggggaactgaaacatctaagtacccggaggagaggaaatcaatctcgagactccccgagtagcggcgagcgaaaggggaccgatggccaaaccgtcgagcgggcatacccggcaggggttccgccgacggggttgcagggccgcgcatccgggggctgccgcccccgggcgcaggtccggctggggagcggaacggcatgggagggccggccgcagcgggtgacagccccgtacgcgaacccagaccggacggcgcgacgcggtccctgagtagggccgggcacgtgaaacccggtccgaacctgggtggaccaccatccaagcctgagtactaccctgtgaccgatagcgcaccagtaccgtgagggaaaggtgaaaagcaccccgggaggggagtgaaacagtacctgaaaccgtgcgcccacgagcagtcggagcaactttangttgtgacggcgtgccttttgtagaatgagccagcgagtcgctggcgcggggcgaggttaaccgaaagggagccggagcgaaagcgagccttaacagggcgacttgagtcccgcgccgcggacgcgaagccgggtgagctatccgtgggcaggctgaagcgggggtaagaccccgtggagggccgaacgcacgtcggttgaaaacggcggcgatgacctgcggataggggtgaaaggccaatcaaacccggagatatctcgttctccccgaaatagctttagggctagcgtcgcgcgttcaccgccggaggtagagcaccggatggacgagggggcttcgccgcctaccgaatccaaccgaactccgaatgccggcggcccagagcgcggcagtcagagcatgtgggctaagctgtgtgctcgagagggaaacagcccggaccgcccgctaaggtccccaagttccagccgagtggcaaaggatgtgcgtccgcccagacaaccaggatgttggcttagaagcagccatccattcaaagagtgcgtaacagctcactggtcgagtggacatgcgccgacaatacacggggctaagctggacaccgaagcggcgggattttaattnatnanannngnnnggggnnntnccnnngggnggnnannccgnngggcgaccgncggtggagcgcatgggagtgagaatgctggcatgagtagcgagagacgagagagtaactcgtccgccgtgaacccgaggtttcctgggcaaggctaatcctcccagggtcagtcgggggctaaggcgaggccggnaggcgtagccgacgcgcagcaggcagacattcctgcaccgcgcacgcggcgctacgaccgacggggcgacggatgggggtggctcggcggggttctggacgtccccgtgatggagcgcggcccgcggaccagggaaatccggtccgcannanggnnnngnnncngnnnnannnnntnannnnannnnnnnnnnccnnngnnccnnnnaaaancccnnngnnngnnnnnnnnnnnccnnnncnnnaancnnnnnnngnnggnnggnnnnannnnncnnngnnnnnnggnnnancnnngnnnangnannnngnnnnanngncccnnnanntnnggnnnangggnnnccnnnnnnnnnnnnancggnntnnccngggnnnngnngnnggncnnnnnngnnnngnccnannnnnnnnttnncnaaaannnnngnnnnnnnnnnanncnnnangnnnnnnnnnnggnnnnnnnncnnnccngnnncngnangnnnnnnngnngnnntnnncgnntcggnnnanccccnnanncnanccccngnaaanngnngncnnnannnnnanngnncnnangnnnnnaaantncntnnngggnnanntncnnncnnnnnnaaaggnnnaannnnttgggnnnnnnnnnnnccnnggncccggnnaaattnnnnnggnnnnnaannnnnnnnttncccnnggaaggnnggaaannccccnnnaaccttnnnnnnnnnttggnnttggccnnnggncccnnnnnnnnnggnnnggnnggnggnnnnnnnccggnggnnccnncccccggggnnccncccttggaannnnncccnnnnnnnnccggnnnccnaacccnnggccnnnaaccggnnnggggnccnnnccnggngggnnntttnnnnggggnggnnnccnccnaaagggnaanggnggnnnnnnaaggnccnnnngggnnggnnggnaaccnnccttttnaannnaannnnnnaanngggnttnnnnnnnnggcccnnaanccnnnnnggnnnnaaannnggnnnnnnnnnnccggnggccccnnnngggngggccnnnnnnnaanggnnaaaaggnnnnccggggnnaannggnnnnnnttncccaannnnccnnnnnnnnngnaaggtttggcnncnnnnnnnnngnnnnnnnnnnccnggggnnngnnnnngncccnagggnnnngnnnttcnncn

SEQ ID NO: 219 - DNA, 4000 bp, Escherichia coli
  misc_feature (1)..(202): n is a, c, g, or t
nnnnnnnnnnnnnnnnnnnnnnnnnnnnnnnnnnnnnnnnnnnnnnnnnnnnnnnnnnnnnnnnnnnnnnnnnnnnnnnnnnnnnnnnnnnnnnnnnnnnnnnnnnnnnnnnnnnnnnnnnnnnnnnnnnnnnnnnnnnnnnnnnnnnnnnnnnnnnnnnnnnnnnnnnnnnnnnnnnnnnnnnnnnnnnnnnnnnnnnnnnaacgtatagcgaactcgtcgaagcgctagaaactgcgctactggccatttctatacacgattgtaataactggtttcatcacgctggatacacacttccatgatccgtgcttatgaaaaccgctctaatatattgtagccttatcgggttaatcgcgactccttctcatcgataggcatattttagcgttgccttgggctcgagacccttgcttttcggctttctctcgcgctattctcacggcatgaagctcgcgcgtctgcttacgctggtggtcgcaactgcgtgtactcctccgaacgtgggttcgcgtcctttggatagggtcgaggaaaagccgaaggaacaatgtacgcttttcgaacgggatccgaccaaagagccggacttgatggcgtgggatccgacccagcgtcagaagatccatgcaaagcggacgcgaggggtggtggtggtacatatcgacttgaatggctgcgatgtgacggcgcgggtattggattgcgtgggcaaggtggaggcaagcagcgagccctacgaatttagctggtattacgcgaatgacacggtggtggcccattctcagcgcgaggcgtatatgaagctaccgttgggtgcggcgtcggtgggggcgcagcttgggtcgggtcaatcgcttcgtgtggattatgtgatggcaggctcgtatgtattgccggatgatgcgcagataagcgaatgggtgggcagcgaatgcagtgaagggacgcattatgttacggccgtggtggtgggagggtttgcgcgggcggtggggcgacggcaggaggtggagggtagcgctggtctgtttgggattggggcgggagccggtgagacgacgagccagctcaattggcgaacggagggcagcccatcggcgtgcagggaggcggagcagaaaaagagcgtgaatacgggttgtgatatgccgcttcgtttggaactgaggccgcttcgcacggcgtctgcgccagtgcccacgccgcctcagccagccaagccggaaccaactcccaccgcggtcgcgcccacgccgccacctacacagcagccagccaagccggaaccaactcccaccgcggtcgcgcccacgccgccacctacacagcagccagccaagccggaaccagttcgcacggcggcagttcccacggcgacaccgccggtttctccggcgtcgcaagggggaaattgcccgagtggcatggcgtggatccccggaggctcgttcatgatggggtccaacaagggtgataatgacgaaaaaccggtccatcgtgtggagttggacggattttgtctggacatcacgcctgtgacggtggatgcgtacgcgcgttgcagtgggtgttcgaagccgaacaccaacaacgaattctgcaactgggggaagtcgggaaaggggaatcatccgatcaattgcgtggattggggacaggcgagtgcctattgtcgttcggtgggcaagcaattgcccacggaggcgcagtgggagtatgcggcgcggggcgggtcgaggcagctcgagtatccgtggggttcggagggatccaacgggcgggcgtgttggaatcggtgggattcttgggaagggacgtgtgcggtgggaagctatgcctcgggggcgtttggattgaaggatatggctgggaacgtctgggagtgggtgcaagactggtatggggcctatccaagctctacaagcaagaatcatgccggaccttcttccggctcttcccgcgtgtgccgcggcggcggttgggacgtcaatgacccgtcgtggctgcgcggtgccttccgcggctgccgcacgcccgacattcggctcggcaacctcgggtttcgttgcgccaggaccaggtaggacggtggcataagtcttgcatataacctgtagggcatcatcaccctcaatacttgatccctcattccctcaaaaacaatgacagataagaagacgtccccaccggagaacgaacccgaaatggggaccaggggcgaagcccctggccgacaaaaaattccgccaagcttgcctcccgtcgtgctgcaaatggaagatctgaccctctggatcatgctgcgcgtcgccaagtttccccgcgatcaccgtttcaccctcggtgataggctcatcgaagcttgcctttcggtgctcgatgacctggttcatgccgcgttcagccgcgacaaggtcgccttgctcacccatgcttcccgtacgttgacccgagcccgcaccctcgtgcgccttgccaaccgcgcccatctccttgcggaaaaacagcgcacctatttcgctgagcaatccgacgaaatcggaaagaagatttctggctggacacgccatgctcgcacgcgataaactcgccaacgcgtgcggggttccgcatgcgcgtcggctggggaagctctaaccgcgtgtgccgcggcggcagttggaacaacaatgacccgtcgaggctgcgcggtgccaaccgcaacaacaacacgcccgacaatcggaacaacaacctcgggtttcgttgcgccagcaccaggaatctccccgcctttcggcccaaaacgccatcaggcgagccagagcagacgcgatgccccaacgtcgcgcctggcgtgcttgtcctggtccacccgttgccgacgcgggtcccccaagacccgatgagcatcgttggtctccgccaacgatcccccgctcgccgagtcgcctccacctcatacgagcgcgcgcggacgacgggcgggatttatccatcctcaaaacacgatgtcctccatcacagcttcgaccaatcgtcgcgtgtgtccatgcctcgcatgcgcaagccacgcttgcacccgcgaccgaacctccgatgcctcgatcgctcccgcctgaaacagcgagcgcatcaaccgcaccctttgtcgaaatcgacgcaagctatctttgcgcagatgcacgatgacgccatcgccacgacgtcgcaacacgaatcccacgaaggatactgggtccgtggtgcgatacaaccgtgttttcgatggatgcagtcgcaagcgcaggcgctgtgctgcttgctgcatctgcgccagcgcgtttcgaagcacctgcggatcgtcatgccacacgagccaatcgtcgcagtaacgaacgaagcttccgatgccgagacctgcggccagcagatgatccaaggccgacacataaaaattcgcccatatctgggaagtcagcgagccgatggcaagtccatggggccgttcgaccggagtccataaggtatcaccgggaaaccatagatgtacttgctcaccttcataaggcgcatcgatgaatcggtccgaaagccatctccaactcacaggagtcaccgaatgcagccgacgtcgcaggagttcatggtcgatactcggaaaaaactttcgaatatccaccttcaacacccagcgacgcgcgcgagtccaacccatggcttcccgcagggcgcgatgggtcccatgtccttttcggcaggcatgggattggggtgccattcgtcgttcgatggcttgcagtgtcgtgtcgatgagcagatgctgcacgacccggtcgcgaaacggaatgacgctgatcagccgacgcttcggatcttggatccacatcgggcgaacggggccgggttcgtaggtttgggctgccaattccgttcgtaagtgcagcagttccgtgtcctcatcgagcagaaagcgcgcaacctgggggcttcgtcgctttcctcgggccgcgcgcgtcaccatttcccgaagccgccc

SEQ ID NO: 220 - DNA, 4000 bp, Escherichia coli
  misc_feature (129)..(129): n is a, c, g, or t
  misc_feature (267)..(267): n is a, c, g, or t
  misc_feature (279)..(279): n is a, c, g, or t
  misc_feature (644)..(644): n is a, c, g, or t
  misc_feature (1440)..(1440): n is a, c, g, or t
  misc_feature (1463)..(1463): n is a, c, g, or t
  misc_feature (1986)..(1987): n is a, c, g, or t
  misc_feature (1989)..(1989): n is a, c, g, or t
  misc_feature (2701)..(2701): n is a, c, g, or t
  misc_feature (3067)..(3067): n is a, c, g, or t
  misc_feature (3283)..(3283): n is a, c, g, or t
  misc_feature (3355)..(3355): n is a, c, g, or t
  misc_feature (3560)..(3560): n is a, c, g, or t
  misc_feature (3579)..(3579): n is a, c, g, or t
  misc_feature (3588)..(3588): n is a, c, g, or t
ccgtgagcgcggcagcgcgaaaccgcatgctgcatggcgctgtcgatctcggcggcgttcggcgccacctggtcgccattcgacagtgcgatcgaaagatcggacggaccgacgaaaatgccgtcgatnccggcaacacccaggataccgtcgatcgcgtcgagcgccgcccgggtctcgaccatggcgatggcgacggtgagcgcgttggcgttcttcagataatcatcacccgacaggccggtataattcagcgccagcgacggnccccagctgcgntcgccggcgggcgggtatttcgtggtccgcaccagggcttgcgcgtcttcgaccgaattgatcatcggcgcgatgatgccggaggcgccggcatcgagcaggcgcgaggcggaagcaaaatcgccgaccggaatgcgcgccagcgccggcttgccggcaagccgcacctgaccgacggcgttcgccgccgatggcatgtcccacatgccatgctgcatatccagcacgacggcatcgaaggcctcctgcgccagatgattgacgagcgtggcgtcgggaatgccgacccaggcggagatcatgccgccccggtggctcctgatccgctccgcaaagccgtcgatttcagctgcgctcatgccatnctcctcacttcgacaggccgtcagcggccagatatttcacctcgaggagctcttcggtgtcgaatttcctcgaagccatgcatgttctgccggctcatcctctccggcgcagccgtgaaacgatgattgtcacggcaagcccggctgcagccgtgatgcttccccagagaatccagatgctctggttgatcatgaagctggatgacggatagggaaaatagccgcttccctgggcgacccagatcagccccgagaggatcatcagcaatcccacgacatatccgattgtgcgccacatgcttcggcaacccttcttatgaatcagtgtcacaatgtcgaccggcatcgttgatgacaaggcttctctcccaaacgcgacgatattcccgaatgtcatgtcctgccgacttcatccaccagccaggtgctgagcctttcgctatgaatatttgccgattgcggcggtatcagccagtaaccgcggtcgggcgcctcgagcggcggcccggcttccaccagcatatgcgcggagagaagcgtgtcgaccagccccatccagccgatcgccacgccctgctcgctgagagcagcctggacgaccagcgaataggtgttgaagctgatatccccgcggccggcatggagatcgcgcgtgacggagaattcggcaagatagcttcgccaatcgaaccagggtggcggcatcggcgaatcgaggtggatcaggatcgtcctggcaagctgctgcggatcgtcgaacgggccgttgcgatcgagaaatcctcgtgtgcagacnggcacgaccttttcctgcaacancagcgatccgaaggcgccgaattccgcccgcgtcccgaaaaccaccactacatctgcgtcgtcacgaaagccgggctcgagccgctgggtcgcgacgatctgtatatccgtttccggatgaagctggcgaaagccatgcatgcgcgggatcagccaaagggctgaaaaagcatagtctgttctcagcctgacgaccggtctttgagcctcggtgcggaagctgcgcgccagcgcatcgatgtcaccgacggtcttggcagcgacctggaaaagccgctcgccctccgcggtcagctcgacgccgcgatgctggcggcgcaacaggccgaccccgaattgctcttccagccgccgcatctgatagctgacggccggttgcgtgagcccgatacgtgctgccgccgacgaaaagctcccgagtgtcgcgacctcgacgaagatgcgcatccagccaagctcgggcgggcggtctgacataaaaaatcctttagtcacccatcgaaaaaagctgtctttacagccnnancaataagcgattgaataaatttctcaaatagcaaaagaggaattccatgccgcgtccgaatatcctcatcctgatggtggaccagctgaacgggaccttctttccggatggccccgcggatttccttcatgcgccgcatctgagatcattggcagagcgctccgtgcgtttcaccaacacctatacggcaagcccgctctgcgcgccggcgcgagcctccttcatgtccggacaattgccgagccggacgcgcgtctatgacaatgcggcggaattcgcctccgacatcccgacttacgcgcatcatctgcgcgctgccggataccagacggcgctatcaggcaagatgcatttcgtcggccccgaccagctgcatggcttcgaggagcgcctgacgacggacatctacccggccgatttcggctggacacccgactatagcaagcccggcgaacgcatagactggtggtatcataatctcggttcggtgaccggcgccggtgttgccgaaatcaccaaccagatggagtatgacgacgaggtcgcctaccatgccgcccgcaagctgttcgatctctcgcgtggccacgacggacgcccctggtgcctgaccgtcagcttcacccatccgcacgacccgtacgtcgcgcgccgcaaattctgggacctttatgaggattgcccggcccttgatccggcagttgcgccgatngccttcgagcggcaagacccgcattcgcagcgcctgatgaaagcctgtgaccacgatgccttcgacatcagcgatgagcaaatcaggcgggcaaggcggggctacttcgccaatatctcctatgtcgatgacaagatcggcgagattctcggcgtcctggaacggacccgcatggcggaaaatacgatcattctcttcgcctcggaccatggcgacatgctcggggatcgcggcctctggttcaagatgaacttcttcgaaggatcggcccgcgttccgctgatgatcgcagcccccggctggaagcccaaacgcatcgatcagcccgtctccacgctcgacgtgacgccgacgctcgccggtctngccgggatcgatatcgcttcgttgaaaccatggaccgagggcgaggatctggcattgcttgccgaaggcaccggcaatcgcagcccggtgccgatggaatatgccgcggagggttccgaagcaccgctcgtctgcattcgggacggacggtacaagctctcgctctgcgagaaggacccgccgatgctgtttgacctcgaggccgatccccaaganctcgacaatctggcggccgacccggcgcacgccgacatcttggcaaggcttgccgaacaggccgggcgccgntggaatcttgccgctttcgacgcagccgtgcgcgaaagccaggcgcgccgctgggtggtctatgcagcgctgcgcaacggcgcctattatccatgggactaccagccgctgcagaaagcctcggagcgctatatgcgcaaccacatggatctcaacgtgctggaggaaaaccagaggttcccgcgccaggaatgagcgaaacgcntctgattaagccgtcctgngcgccggcncctcgcgcaggaaatcctcgatgaacgccttttgcagcagaatgccgtcccattcatcggggaagaagggcgagtcgtagatcagcgtgaagggaccgtcatagccggcccgctcgcacatctccaggcacttgcgataatcgtcggcatcgaggccggtgacgccataatcggccttggcgtggcaaatttccgcccggcccatgatgtcggccaggccttcatatttcgccggcgccgcccagttgccgaggtcgccgttgaggccgaccttgccgtccagccggtccagcagccagttcatctcgatgggcgacggcagcaggtcgaaccaattctcgacgacgacgcgcacgccgctgccttctgcctttccgcccagccagctcagatgacgggcggcgcgggcaag

SEQ ID NO: 221 - DNA, 4000 bp, Escherichia coli
  misc_feature (1)..(1): n is a, c, g, or t
  misc_feature (3)..(3): n is a, c, g, or t
  misc_feature (6)..(7): n is a, c, g, or t
  misc_feature (9)..(9): n is a, c, g, or t
  misc_feature (13)..(13): n is a, c, g, or t
  misc_feature (15)..(16): n is a, c, g, or t
  misc_feature (19)..(19): n is a, c, g, or t
  misc_feature (27)..(27): n is a, c, g, or t
  misc_feature (30)..(30): n is a, c, g, or t
  misc_feature (33)..(38): n is a, c, g, or t
  misc_feature (40)..(42): n is a, c, g, or t
  misc_feature (44)..(45): n is a, c, g, or t
  misc_feature (50)..(56): n is a, c, g, or t
  misc_feature (58)..(59): n is a, c, g, or t
  misc_feature (62)..(62): n is a, c, g, or t
  misc_feature (65)..(74): n is a, c, g, or t
  misc_feature (76)..(76): n is a, c, g, or t
  misc_feature (78)..(82): n is a, c, g, or t
  misc_feature (84)..(90): n is a, c, g, or t
  misc_feature (94)..(106): n is a, c, g, or t
  misc_feature (108)..(108): n is a, c, g, or t
  misc_feature (110)..(117): n is a, c, g, or t
  misc_feature (120)..(127): n is a, c, g, or t
  misc_feature (130)..(131): n is a, c, g, or t
  misc_feature (133)..(144): n is a, c, g, or t
  misc_feature (148)..(149): n is a, c, g, or t
  misc_feature (152)..(153): n is a, c, g, or t
  misc_feature (156)..(158): n is a, c, g, or t
  misc_feature (160)..(163): n is a, c, g, or t
  misc_feature (165)..(165): n is a, c, g, or t
  misc_feature (168)..(168): n is a, c, g, or t
  misc_feature (170)..(171): n is a, c, g, or t
  misc_feature (173)..(173): n is a, c, g, or t
  misc_feature (175)..(175): n is a, c, g, or t
  misc_feature (177)..(177): n is a, c, g, or t
  misc_feature (179)..(187): n is a, c, g, or t
  misc_feature (189)..(189): n is a, c, g, or t
  misc_feature (192)..(192): n is a, c, g, or t
  misc_feature (195)..(196): n is a, c, g, or t
  misc_feature (198)..(198): n is a, c, g, or t
  misc_feature (200)..(202): n is a, c, g, or t
  misc_feature (204)..(206): n is a, c, g, or t
  misc_feature (208)..(208): n is a, c, g, or t
  misc_feature (210)..(212): n is a, c, g, or t
  misc_feature (215)..(216): n is a, c, g, or t
  misc_feature (219)..(220): n is a, c, g, or t
  misc_feature (223)..(223): n is a, c, g, or t
  misc_feature (226)..(230): n is a, c, g, or t
  misc_feature (232)..(233): n is a, c, g, or t
  misc_feature (235)..(237): n is a, c, g, or t
  misc_feature (239)..(244): n is a, c, g, or t
  misc_feature (247)..(247): n is a, c, g, or t
  misc_feature (249)..(253): n is a, c, g, or t
  misc_feature (255)..(255): n is a, c, g, or t
  misc_feature (257)..(258): n is a, c, g, or t
  misc_feature (260)..(263): n is a, c, g, or t
  misc_feature (265)..(267): n is a, c, g, or t
  misc_feature (269)..(270): n is a, c, g, or t
  misc_feature (272)..(275): n is a, c, g, or t
  misc_feature (277)..(281): n is a, c, g, or t
  misc_feature (284)..(288): n is a, c, g, or t
  misc_feature (290)..(291): n is a, c, g, or t
  misc_feature (295)..(295): n is a, c, g, or t
  misc_feature (297)..(297): n is a, c, g, or t
  misc_feature (301)..(301): n is a, c, g, or t
  misc_feature (304)..(306): n is a, c, g, or t
  misc_feature (308)..(310): n is a, c, g, or t
  misc_feature (313)..(315): n is a, c, g, or t
  misc_feature (318)..(321): n is a, c, g, or t
  misc_feature (324)..(329): n is a, c, g, or t
  misc_feature (331)..(332): n is a, c, g, or t
  misc_feature (335)..(336): n is a, c, g, or t
  misc_feature (338)..(340): n is a, c, g, or t
  misc_feature (342)..(344): n is a, c, g, or t
  misc_feature (347)..(350): n is a, c, g, or t
  misc_feature (353)..(353): n is a, c, g, or t
  misc_feature (355)..(356): n is a, c, g, or t
  misc_feature (358)..(358): n is a, c, g, or t
  misc_feature (360)..(362): n is a, c, g, or t
  misc_feature (364)..(365): n is a, c, g, or t
  misc_feature (367)..(367): n is a, c, g, or t
  misc_feature (370)..(374): n is a, c, g, or t
  misc_feature (376)..(385): n is a, c, g, or t
  misc_feature (387)..(389): n is a, c, g, or t
  misc_feature (391)..(391): n is a, c, g, or t
  misc_feature (393)..(397): n is a, c, g, or t
  misc_feature (399)..(400): n is a, c, g, or t
  misc_feature (402)..(402): n is a, c, g, or t
  misc_feature (404)..(405): n is a, c, g, or t
  misc_feature (407)..(417): n is a, c, g, or t
  misc_feature (419)..(420): n is a, c, g, or t
  misc_feature (422)..(424): n is a, c, g, or t
  misc_feature (426)..(430): n is a, c, g, or t
  misc_feature (432)..(438): n is a, c, g, or t
  misc_feature (440)..(444): n is a, c, g, or t
  misc_feature (446)..(446): n is a, c, g, or t
  misc_feature (449)..(449): n is a, c, g, or t
  misc_feature (451)..(451): n is a, c, g, or t
  misc_feature (453)..(453): n is a, c, g, or t
  misc_feature (455)..(459): n is a, c, g, or t
  misc_feature (461)..(467): n is a, c, g, or t
  misc_feature (469)..(473): n is a, c, g, or t
  misc_feature (477)..(479): n is a, c, g, or t
  misc_feature (481)..(481): n is a, c, g, or t
  misc_feature (483)..(483): n is a, c, g, or t
  misc_feature (485)..(489): n is a, c, g, or t
  misc_feature (491)..(494): n is a, c, g, or t
  misc_feature (496)..(497): n is a, c, g, or t
  misc_feature (499)..(500): n is a, c, g, or t
  misc_feature (502)..(502): n is a, c, g, or t
  misc_feature (504)..(510): n is a, c, g, or t
  misc_feature (512)..(514): n is a, c, g, or t
  misc_feature (516)..(518): n is a, c, g, or t
  misc_feature (520)..(521): n is a, c, g, or t
  misc_feature (523)..(523): n is a, c, g, or t
  misc_feature (525)..(526): n is a, c, g, or t
  misc_feature (529)..(529): n is a, c, g, or t
  misc_feature (531)..(534): n is a, c, g, or t
  misc_feature (537)..(541): n is a, c, g, or t
  misc_feature (543)..(543): n is a, c, g, or t
  misc_feature (545)..(551): n is a, c, g, or t
  misc_feature (553)..(553): n is a, c, g, or t
  misc_feature (555)..(565): n is a, c, g, or t
  misc_feature (567)..(569): n is a, c, g, or t
  misc_feature (571)..(572): n is a, c, g, or t
  misc_feature (574)..(574): n is a, c, g, or t
  misc_feature (581)..(584): n is a, c, g, or t
  misc_feature (586)..(588): n is a, c, g, or t
  misc_feature (590)..(602): n is a, c, g, or t
  misc_feature (604)..(607): n is a, c, g, or t
  misc_feature (609)..(625): n is a, c, g, or t
  misc_feature (628)..(628): n is a, c, g, or t
  misc_feature (631)..(633): n is a, c, g, or t
  misc_feature (636)..(638): n is a, c, g, or t
  misc_feature (640)..(642): n is a, c, g, or t
  misc_feature (645)..(645): n is a, c, g, or t
  misc_feature (647)..(647): n is a, c, g, or t
  misc_feature (649)..(649): n is a, c, g, or t
  misc_feature (652)..(657): n is a, c, g, or t
  misc_feature (659)..(665): n is a, c, g, or t
  misc_feature (667)..(671): n is a, c, g, or t
  misc_feature (674)..(678): n is a, c, g, or t
  misc_feature (682)..(685): n is a, c, g, or t
  misc_feature (688)..(688): n is a, c, g, or t
  misc_feature (690)..(692): n is a, c, g, or t
  misc_feature (694)..(699): n is a, c, g, or t
  misc_feature (701)..(701): n is a, c, g, or t
  misc_feature (704)..(705): n is a, c, g, or t
  misc_feature (707)..(716): n is a, c, g, or t
  misc_feature (718)..(718): n is a, c, g, or t
  misc_feature (720)..(724): n is a, c, g, or t
  misc_feature (730)..(731): n is a, c, g, or t
  misc_feature (733)..(733): n is a, c, g, or t
  misc_feature (735)..(737): n is a, c, g, or t
  misc_feature (739)..(741): n is a, c, g, or t
  misc_feature (743)..(745): n is a, c, g, or t
  misc_feature (747)..(748): n is a, c, g, or t
  misc_feature (751)..(752): n is a, c, g, or t
  misc_feature (754)..(754): n is a, c, g, or t
  misc_feature (758)..(758): n is a, c, g, or t
  misc_feature (761)..(761): n is a, c, g, or t
  misc_feature (764)..(765): n is a, c, g, or t
  misc_feature (768)..(771): n is a, c, g, or t
  misc_feature (773)..(773): n is a, c, g, or t
  misc_feature (777)..(779): n is a, c, g, or t
  misc_feature (781)..(792): n is a, c, g, or t
  misc_feature (795)..(796): n is a, c, g, or t
  misc_feature (798)..(798): n is a, c, g, or t
  misc_feature (801)..(817): n is a, c, g, or t
  misc_feature (819)..(819): n is a, c, g, or t
  misc_feature (821)..(829): n is a, c, g, or t
  misc_feature (831)..(831): n is a, c, g, or t
  misc_feature (835)..(835): n is a, c, g, or t
  misc_feature (837)..(844): n is a, c, g, or t
  misc_feature (846)..(847): n is a, c, g, or t
  misc_feature (849)..(850): n is a, c, g, or t
  misc_feature (852)..(856): n is a, c, g, or t
  misc_feature (858)..(858): n is a, c, g, or t
  misc_feature (860)..(860): n is a, c, g, or t
  misc_feature (862)..(862): n is a, c, g, or t
  misc_feature (864)..(865): n is a, c, g, or t
  misc_feature (867)..(867): n is a, c, g, or t
  misc_feature (870)..(870): n is a, c, g, or t
  misc_feature (872)..(874): n is a, c, g, or t
  misc_feature (878)..(883): n is a, c, g, or t
  misc_feature (887)..(887): n is a, c, g, or t
  misc_feature (890)..(895): n is a, c, g, or t
  misc_feature (899)..(899): n is a, c, g, or t
  misc_feature (901)..(902): n is a, c, g, or t
  misc_feature (904)..(904): n is a, c, g, or t
  misc_feature (906)..(907): n is a, c, g, or t
  misc_feature (910)..(911): n is a, c, g, or t
  misc_feature (914)..(915): n is a, c, g, or t
  misc_feature (917)..(921): n is a, c, g, or t
  misc_feature (924)..(927): n is a, c, g, or t
  misc_feature (929)..(929): n is a, c, g, or t
  misc_feature (931)..(931): n is a, c, g, or t
  misc_feature (933)..(934): n is a, c, g, or t
  misc_feature (936)..(936): n is a, c, g, or t
  misc_feature (939)..(943): n is a, c, g, or t
  misc_feature (945)..(946): n is a, c, g, or t
  misc_feature (948)..(952): n is a, c, g, or t
  misc_feature (955)..(960): n is a, c, g, or t
  misc_feature (963)..(963): n is a, c, g, or t
  misc_feature (965)..(965): n is a, c, g, or t
  misc_feature (967)..(970): n is a, c, g, or t
  misc_feature (972)..(974): n is a, c, g, or t
  misc_feature (976)..(979): n is a, c, g, or t
  misc_feature (981)..(984): n is a, c, g, or t
  misc_feature (988)..(988): n is a, c, g, or t
  misc_feature (991)..(994): n is a, c, g, or t
  misc_feature (997)..(997): n is a, c, g, or t
  misc_feature (999)..(1002): n is a, c, g, or t
  misc_feature (1004)..(1005): n is a, c, g, or t
  misc_feature (1008)..(1013): n is a, c, g, or t
  misc_feature (1015)..(1019): n is a, c, g, or t
  misc_feature (1021)..(1027): n is a, c, g, or t
  misc_feature (1029)..(1029): n is a, c, g, or t
  misc_feature (1031)..(1031): n is a, c, g, or t
  misc_feature (1033)..(1035): n is a, c, g, or t
  misc_feature (1037)..(1037): n is a, c, g, or t
  misc_feature (1039)..(1043): n is a, c, g, or t
  misc_feature (1045)..(1051): n is a, c, g, or t
  misc_feature (1053)..(1054): n is a, c, g, or t
  misc_feature (1056)..(1058): n is a, c, g, or t
  misc_feature (1060)..(1064): n is a, c, g, or t
  misc_feature (1066)..(1067): n is a, c, g, or t
  misc_feature (1069)..(1069): n is a, c, g, or t
  misc_feature (1071)..(1071): n is a, c, g, or t
  misc_feature (1074)..(1074): n is a, c, g, or t
  misc_feature (1076)..(1076): n is a, c, g, or t
  misc_feature (1078)..(1078): n is a, c, g, or t
  misc_feature (1080)..(1080): n is a, c, g, or t
  misc_feature (1083)..(1087): n is a, c, g, or t
  misc_feature (1090)..(1090): n is a, c, g, or t
  misc_feature (1092)..(1109): n is a, c, g, or t
  misc_feature (1113)..(1113): n is a, c, g, or t
  misc_feature (1115)..(1118): n is a, c, g, or t
  misc_feature (1121)..(1121): n is a, c, g, or t
  misc_feature (1123)..(1124): n is a, c, g, or t
  misc_feature (1126)..(1130): n is a, c, g, or t
  misc_feature (1132)..(1134): n is a, c, g, or t
  misc_feature (1137)..(1140): n is a, c, g, or t
  misc_feature (1145)..(1145): n is a, c, g, or t
  misc_feature (1147)..(1149): n is a, c, g, or t
  misc_feature (1151)..(1152): n is a, c, g, or t
  misc_feature (1154)..(1156): n is a, c, g, or t
  misc_feature (1158)..(1158): n is a, c, g, or t
  misc_feature (1160)..(1161): n is a, c, g, or t
  misc_feature (1165)..(1165): n is a, c, g, or t
  misc_feature (1167)..(1167): n is a, c, g, or t
  misc_feature (1169)..(1174): n is a, c, g, or t
  misc_feature (1993)..(1994): n is a, c, g, or t
  misc_feature (2008)..(2009): n is a, c, g, or t
  misc_feature (2030)..(2030): n is a, c, g, or t
  misc_feature (2036)..(2036): n is a, c, g, or t
  misc_feature (2038)..(2039): n is a, c, g, or t
  misc_feature (2043)..(2045): n is a, c, g, or t
  misc_feature (2065)..(2065): n is a, c, g, or t
  misc_feature (3667)..(3671): n is a, c, g, or t
  misc_feature (3674)..(3677): n is a, c, g, or t
ntnttnnanaaanannctntttttttnttntcnnnnnnannngnnaaaannnnnnnannttnttnnnnnnnnnnanannnnnannnnnnntttnnnnnnnnnnnnnanannnnnnnnccnnnnnnnnttnnannnnnnnnnnnncccnnaannttnnnannnntnttntnntntntntnnnnnnnnntnttntanncncnnnannntntnnnaannccnnaanatnnnnntnnannntnnnnnnaanannnnngngnnannnnannntnntnnnnannnnnttnnnnntnntctntntttntcnnnannntcnnnttnnnnttnnnnnncnnaanncnnnannncgnnnnaanannanannncnnanaannnnnannnnnnnnnnannntntnnnnntnntntnntnnnnnnnnnnngnnannntnnnnntnnnnnnnannnnnanatntntntnnnnngnnnnnnntnnnnnagannntntntnnnnntnnnnannannanannnnnnncnnnannncnnanannatntnnnnttnnnnntntnnnnnnnanannnnnnnnnnncnnntnnanatatatnnnngnnnannnnnnnnnnnnnannnncnnnnnnnnnnnnnnnnnganaannnttnnnannnttntntntannnnnnannnnnnntnnnnntcnnnnntttnnnnttntnnnannnnnnanaanntnnnnnnnnnnanannnnnaaaaanntntnnnannncnnntnngannanaaanatnttnngannnntntttnnncnnnnnnnnnnnnaanntntcnnnnnnnnnnnnnnnnntntnnnnnnnnntntctntnnnnnnnnannannannnnnananananntnttntnnnaaannnnnnatanaannnnnnaaananngngnngtnnaanncnnnnncgnnnncncncnntntgnnnnntnntnnnnnttnnnnnncananannnnannngnnnnannnngagngtnnnnatntnnnncnnttnnnnnntnnnnntnnnnnnnananannntntnnnnnannnnnnncnnannntnnnnnanntntnttntntntnttnnnnnttntnnnnnnnnnnnnnnnnnnaaanannnnttntnnannnnnannntcnnnnaaaanannntnntnnnananntttntntnnnnnncccccccaactggttttgatgtgcctttggtacataagatttgcgaggtttataaaaagatttatttactatccgcaaaaataccgaaaaaagaccgtttcggaatttatgtaaaaatagaaaatatttgtttggaaatcattaatctggcgattctagcttcgttggaaaataaaattaataaactttcaccattaaattccgctaggattaaaatagaaatcttaaaaagattattcagaattaccaatgaattaaatattatagaaactaagcactatatagatatagagttgagtttacaggaaatttccaaaatgacaaatggttggataaaatatttaaataatcactaatctaaaagacaaatcccgtattaatacgggatttgtctttttggaaacttctgacgggaacacagattgtcgttgacattgtcgggattgtaccagttgaccttgaacttgccgctgttccaattggcgttcggcacattgccgtcgtcatagcacgaacccattaattgcctgatttcttccatatcaccgataatctttacaaaattatctgcgttagccggctctctaccggattttttcacgaagcatcgcctttagaagacaaaccttctctaaaaccagacaagcagtttccttttttaatcggcaaaccgatatcccgctaagcgagaccgattgtattagccgacttaattataaaagaaaatccccgttttgaaaatttctcaacacggggataagataaaaagttagaagttaaaagattaagaaactgcctgacgggaacacagatcgtcgnngacatcgccggganngcaccagtcgacctcgaactngccgcngnnccannnggcgctcggcacattgccgncgtcatagcacgaacccagacaaaacgtccaatttttaatgtccaggtgcttgccggcggtttccttgaaaaatttgagctcaaatatctctcgctcctcaagagtgataccgatgatgccctgccgcttcaaatcgttgtaggaacgatttctcagctcttcatcggcttctacgcggtcacgaacacgaatggcatagacatctttggctgtacgctctgaaactacaacctcgtccaagtttttatccgtatatttccagcacggaaaaaacttagcgcaaaggtcatagcccgattgcggcgtgatgccctgagccatgataataactcggccgaatccgcccggatcatcgggaatgatgacgcccgacaaatcgcagtcaatgccgagaccgcaatagaatgcctgccagtcggcaattaaatcagcgtgagaattgtccaccgaaaaaatctttttcatttccgtacctagccattttttcctcccgataaaatactgggccatttcataggttaaattgttaacagggatgctttccaccacggccgaaataacatccttgatttggccgggcgttgccatgcggacggtctgattactttgctttttcatcagcaattcctcctttcttccttcaaaaagtttgattgttaaagagccgaatggccctctttactcaaaaagagcttaatttaagcaatgctaatatgctatcacaaggtggttattttgtcaataccaaatagccattatccgtaaccgccacggtgtgctcaaaatgagccgaaaaagagccatcgaccgtttcataaccaaaaccatcttctgagagttttacttctcccgatcctaaagttaccatcggctcaattgctaaaaccatcccggatttcaaaaccggtccctcgcccattttaccgtaatttgggatactcggttcttcatgaactgcatagccaacgccgtggccaaccaaaattctgacaacgtgtaacccttctctttcaacataactttctataatatgaccaatatcgccaatatggttgcccgtttttacttcattgacggctaattccaaagcgcgcttcgtgacattaattaatttatttttttcatcggtcatttttccgatgccaattgtgagcgcggcgtcagtaaaaagatttttgtatttaacaccaagatccaatttcaaaatgtcgccctctttcaaaattacttcctcggagggcaaaccatggactacaacattattcagtgacgcgcacatagcggctggataaggcctatcggaaaaactggatttatatccttcaaatgaaggcagggcgccgcgggctaaaatcatttcacgggctttttgattcaaaaagcccgtgctgataccaggcctgacaaattccgaaattttctttaaaacttcggctaaaatttccccgccttctttcagaatttctatttcttcttttgtttttattgttatcattacaatttgtttattatatctgctatagcatttataacaaactaaaatctatttcaatttagacaataatatttttaatatatctttatgaattttcattattttnnnnncgnnnngcggttaaaggcgtcaagacgttttttaataatctctctcgtgtccagttccggcaaatctttccgctggcgcttcaaattcctggcatagacttctttcgacccaattataacatggaaaaagtaaatatcttttccacataatttatcaagaagcggcaactcgtcttttaattccctcaaagttcttggcgaaccgctcatcacaatgcccttgccgcgataatccgccgacttaatttcggacttaataagagtcgacacaaattccggagtatttaaaaagccgcttatttgcaaatggcgctctttttcaagattat

SEQ ID NO: 222 - DNA, 4000 bp, Escherichia coli
  misc_feature (2144)..(2144): n is a, c, g, or t
  misc_feature (2747)..(2747): n is a, c, g, or t
  misc_feature (2771)..(2771): n is a, c, g, or t
  misc_feature (2775)..(2775): n is a, c, g, or t
  misc_feature (2778)..(2784): n is a, c, g, or t
  misc_feature (2792)..(2794): n is a, c, g, or t
  misc_feature (2797)..(2802): n is a, c, g, or t
  misc_feature (2808)..(2814): n is a, c, g, or t
  misc_feature (2817)..(2824): n is a, c, g, or t
  misc_feature (2827)..(2832): n is a, c, g, or t
  misc_feature (2837)..(2838): n is a, c, g, or t
  misc_feature (2841)..(2846): n is a, c, g, or t
  misc_feature (2849)..(2850): n is a, c, g, or t
  misc_feature (2853)..(2856): n is a, c, g, or t
  misc_feature (2859)..(2862): n is a, c, g, or t
  misc_feature (2865)..(2865): n is a, c, g, or t
  misc_feature (2868)..(2870): n is a, c, g, or t
  misc_feature (2872)..(2872): n is a, c, g, or t
  misc_feature (2875)..(2877): n is a, c, g, or t
  misc_feature (2880)..(2881): n is a, c, g, or t
  misc_feature (2886)..(2888): n is a, c, g, or t
  misc_feature (2898)..(2902): n is a, c, g, or t
  misc_feature (2905)..(2906): n is a, c, g, or t
  misc_feature (2910)..(2918): n is a, c, g, or t
  misc_feature (2921)..(2931): n is a, c, g, or t
  misc_feature (2941)..(2942): n is a, c, g, or t
  misc_feature (2947)..(2949): n is a, c, g, or t
  misc_feature (2952)..(2958): n is a, c, g, or t
  misc_feature (2962)..(2968): n is a, c, g, or t
  misc_feature (2971)..(2974): n is a, c, g, or t
  misc_feature (2981)..(2991): n is a, c, g, or t
  misc_feature (2994)..(2995): n is a, c, g, or t
  misc_feature (2998)..(3002): n is a, c, g, or t
  misc_feature (3006)..(3008): n is a, c, g, or t
  misc_feature (3011)..(3018): n is a, c, g, or t
  misc_feature (3022)..(3022): n is a, c, g, or t
  misc_feature (3029)..(3031): n is a, c, g, or t
  misc_feature (3035)..(3043): n is a, c, g, or t
  misc_feature (3046)..(3051): n is a, c, g, or t
  misc_feature (3056)..(3064): n is a, c, g, or t
  misc_feature (3069)..(3075): n is a, c, g, or t
  misc_feature (3078)..(3078): n is a, c, g, or t
  misc_feature (3082)..(3084): n is a, c, g, or t
  misc_feature (3087)..(3093): n is a, c, g, or t
  misc_feature (3096)..(3098): n is a, c, g, or t
  misc_feature (3102)..(3103): n is a, c, g, or t
  misc_feature (3107)..(3111): n is a, c, g, or t
  misc_feature (3114)..(3115): n is a, c, g, or t
  misc_feature (3122)..(3134): n is a, c, g, or t
  misc_feature (3137)..(3144): n is a, c, g, or t
  misc_feature (3149)..(3149): n is a, c, g, or t
  misc_feature (3152)..(3159): n is a, c, g, or t
  misc_feature (3162)..(3166): n is a, c, g, or t
  misc_feature (3169)..(3170): n is a, c, g, or t
  misc_feature (3175)..(3181): n is a, c, g, or t
  misc_feature (3184)..(3187): n is a, c, g, or t
  misc_feature (3190)..(3191): n is a, c, g, or t
  misc_feature (3194)..(3197): n is a, c, g, or t
  misc_feature (3200)..(3202): n is a, c, g, or t
  misc_feature (3205)..(3205): n is a, c, g, or t
  misc_feature (3208)..(3229): n is a, c, g, or t
  misc_feature (3234)..(3237): n is a, c, g, or t
  misc_feature (3242)..(3243): n is a, c, g, or t
  misc_feature (3247)..(3247): n is a, c, g, or t
  misc_feature (3250)..(3252): n is a, c, g, or t
  misc_feature (3255)..(3256): n is a, c, g, or t
  misc_feature (3261)..(3262): n is a, c, g, or t
  misc_feature (3267)..(3272): n is a, c, g, or t
  misc_feature (3278)..(3286): n is a, c, g, or t
  misc_feature (3289)..(3289): n is a, c, g, or t
  misc_feature (3293)..(3294): n is a, c, g, or t
  misc_feature (3297)..(3298): n is a, c, g, or t
  misc_feature (3304)..(3305): n is a, c, g, or t
  misc_feature (3308)..(3309): n is a, c, g, or t
  misc_feature (3312)..(3312): n is a, c, g, or t
  misc_feature (3315)..(3319): n is a, c, g, or t
  misc_feature (3322)..(3322): n is a, c, g, or t
  misc_feature (3325)..(3330): n is a, c, g, or t
  misc_feature (3333)..(3336): n is a, c, g, or t
  misc_feature (3341)..(3342): n is a, c, g, or t
  misc_feature (3347)..(3351): n is a, c, g, or t
  misc_feature (3354)..(3357): n is a, c, g, or t
  misc_feature (3364)..(3366): n is a, c, g, or t
  misc_feature (3369)..(3372): n is a, c, g, or t
  misc_feature (3375)..(3376): n is a, c, g, or t
  misc_feature (3378)..(3381): n is a, c, g, or t
  misc_feature (3384)..(3387): n is a, c, g, or t
  misc_feature (3390)..(3397): n is a, c, g, or t
  misc_feature (3399)..(3402): n is a, c, g, or t
  misc_feature (3407)..(3411): n is a, c, g, or t
  misc_feature (3413)..(3418): n is a, c, g, or t
  misc_feature (3420)..(3420): n is a, c, g, or t
  misc_feature (3422)..(3427): n is a, c, g, or t
  misc_feature (3429)..(3439): n is a, c, g, or t
  misc_feature (3441)..(3446): n is a, c, g, or t
  misc_feature (3448)..(3452): n is a, c, g, or t
  misc_feature (3455)..(3457): n is a, c, g, or t
  misc_feature (3459)..(3461): n is a, c, g, or t
  misc_feature (3465)..(3468): n is a, c, g, or t
  misc_feature (3470)..(3475): n is a, c, g, or t
  misc_feature (3477)..(3479): n is a, c, g, or t
  misc_feature (3481)..(3481): n is a, c, g, or t
  misc_feature (3483)..(3483): n is a, c, g, or t
  misc_feature (3485)..(3487): n is a, c, g, or t
  misc_feature (3492)..(3495): n is a, c, g, or t
  misc_feature (3497)..(3503): n is a, c, g, or t
  misc_feature (3507)..(3508): n is a, c, g, or t
  misc_feature (3510)..(3513): n is a, c, g, or t
  misc_feature (3515)..(3516): n is a, c, g, or t
  misc_feature (3520)..(3526): n is a, c, g, or t
  misc_feature (3530)..(3530): n is a, c, g, or t
  misc_feature (3532)..(3532): n is a, c, g, or t
  misc_feature (3534)..(3538): n is a, c, g, or t
  misc_feature (3540)..(3546): n is a, c, g, or t
  misc_feature (3549)..(3554): n is a, c, g, or t
  misc_feature (3557)..(3563): n is a, c, g, or t
  misc_feature (3566)..(3568): n is a, c, g, or t
  misc_feature (3572)..(3577): n is a, c, g, or t
  misc_feature (3583)..(3583): n is a, c, g, or t
  misc_feature (3586)..(3593): n is a, c, g, or t
  misc_feature (3595)..(3597): n is a, c, g, or t
  misc_feature (3600)..(3604): n is a, c, g, or t
  misc_feature (3606)..(3606): n is a, c, g, or t
  misc_feature (3608)..(3608): n is a, c, g, or t
  misc_feature (3610)..(3610): n is a, c, g, or t
  misc_feature (3612)..(3614): n is a, c, g, or t
  misc_feature (3618)..(3618): n is a, c, g, or t
  misc_feature (3626)..(3633): n is a, c, g, or t
  misc_feature (3636)..(3637): n is a, c, g, or t
  misc_feature (3640)..(3643): n is a, c, g, or t
  misc_feature (3647)..(3648): n is a, c, g, or t
  misc_feature (3654)..(3654): n is a, c, g, or t
  misc_feature (3657)..(3657): n is a, c, g, or t
  misc_feature (3664)..(3664): n is a, c, g, or t
  misc_feature (3667)..(3667): n is a, c, g, or t
  misc_feature (3669)..(3669): n is a, c, g, or t
  misc_feature (3676)..(3678): n is a, c, g, or t
  misc_feature (3680)..(3680): n is a, c, g, or t
  misc_feature (3683)..(3684): n is a, c, g, or t
  misc_feature (3690)..(3690): n is a, c, g, or t
  misc_feature (3697)..(3697): n is a, c, g, or t
  misc_feature (3700)..(3704): n is a, c, g, or t
  misc_feature (3706)..(3706): n is a, c, g, or t
  misc_feature (3714)..(3714): n is a, c, g, or t
  misc_feature (3719)..(3719): n is a, c, g, or t
  misc_feature (3722)..(3722): n is a, c, g, or t
  misc_feature (3724)..(3726): n is a, c, g, or t
  misc_feature (3729)..(3731): n is a, c, g, or t
  misc_feature (3737)..(3741): n is a, c, g, or t
  misc_feature (3745)..(3747): n is a, c, g, or t
  misc_feature (3753)..(3756): n is a, c, g, or t
  misc_feature (3762)..(3763): n is a, c, g, or t
  misc_feature (3768)..(3768): n is a, c, g, or t
  misc_feature (3771)..(3771): n is a, c, g, or t
  misc_feature (3774)..(3775): n is a, c, g, or t
  misc_feature (3777)..(3784): n is a, c, g, or t
  misc_feature (3786)..(3786): n is a, c, g, or t
  misc_feature (3791)..(3794): n is a, c, g, or t
  misc_feature (3797)..(3797): n is a, c, g, or t
  misc_feature (3804)..(3805): n is a, c, g, or t
  misc_feature (3808)..(3808): n is a, c, g, or t
  misc_feature (3811)..(3811): n is a, c, g, or t
  misc_feature (3813)..(3813): n is a, c, g, or t
  misc_feature (3820)..(3822): n is a, c, g, or t
  misc_feature (3824)..(3824): n is a, c, g, or t
  misc_feature (3826)..(3827): n is a, c, g, or t
  misc_feature (3830)..(3830): n is a, c, g, or t
  misc_feature (3833)..(3833): n is a, c, g, or t
  misc_feature (3836)..(3836): n is a, c, g, or t
  misc_feature (3838)..(3839): n is a, c, g, or t
  misc_feature (3843)..(3843): n is a, c, g, or t
  misc_feature (3845)..(3848): n is a, c, g, or t
  misc_feature (3851)..(3851): n is a, c, g, or t
  misc_feature (3858)..(3860): n is a, c, g, or t
  misc_feature (3864)..(3865): n is a, c, g, or t
  misc_feature (3868)..(3870): n is a, c, g, or t
  misc_feature (3876)..(3876): n is a, c, g, or t
  misc_feature (3882)..(3895): n is a, c, g, or t
  misc_feature (3899)..(3899): n is a, c, g, or t
  misc_feature (3901)..(3902): n is a, c, g, or t
  misc_feature (3907)..(3908): n is a, c, g, or t
  misc_feature (3911)..(3911): n is a, c, g, or t
  misc_feature (3914)..(3914): n is a, c, g, or t
  misc_feature (3918)..(3919): n is a, c, g, or t
  misc_feature (3922)..(3923): n is a, c, g, or t
  misc_feature (3926)..(3927): n is a, c, g, or t
  misc_feature (3929)..(3931): n is a, c, g, or t
  misc_feature (3934)..(3935): n is a, c, g, or t
  misc_feature (3940)..(3943): n is a, c, g, or t
  misc_feature (3947)..(3949): n is a, c, g, or t
  misc_feature (3953)..(3953): n is a, c, g, or t
  misc_feature (3957)..(3957): n is a, c, g, or t
  misc_feature (3960)..(3962): n is a, c, g, or t
  misc_feature (3964)..(3964): n is a, c, g, or t
  misc_feature (3967)..(3967): n is a, c, g, or t
  misc_feature (3972)..(3979): n is a, c, g, or t
  misc_feature (3985)..(3985): n is a, c, g, or t
  misc_feature (3991)..(3993): n is a, c, g, or t
  misc_feature (3997)..(3997): n is a, c, g, or t
gatgttttaaaagcaccggacaaaccggtggttggcccacttggattatccgatatcgaccggttgcgggcgcatttatcaaaatgctgggatccgcccatcggcgcggctggcagcgataccctcattgttgacataattgtgtcgttagatcgtgatggacacgtgcttagcgccaaagttgataacaatttgaggtttaacacagatcggatttttaaggttgcagctgaagaggccattcgggcaacacgcgaatgttcgcctttgccgctgccaccggaaaaatatgagcaatggaagagctttatatttgtttttgacccgcggtttttgacccggtgaaaaacccgccattgggtgacaaacccgccattgggtggcaagattacaggcaccaaaatatcggtcatatggtgtcgccatgtcgggtcgagcgaaatgaagcggaataaacgggcataaagggtaaatttatcatggtagcaaaaattttccggccgatactgtgccgctgcgttgcggttgttgcggttctggctatcgctctggggctggcccctatcgggcaagccgaggcccagctccgtattgaaatcaccgaaggacaggtggcgccgacgcccattgccatagccgaatttaccgggccggatggcaatgtcaccgctgtcgggcgtcaattaacgcagattatttctgatgatttggaaagttctggtctgtttcggccggtggatagtgcggcctttattgatccgccaaaagcgccgtcggtaaagccaaattttgccaattggtcgccgcttggggtgaaagggctgctggttggttcagcctatattgacgatgccggcatgctgcaggttgaatttgtgttatgggatgtggtgatccagcgcaatattaccgctggcggcggcaatgctgatcaatccggattgcgccggctagcccaccagattgccgattttgtatatgaagaatttaccggcgatagtggctattttgacacgcaaattgtctatgtggctgaatccggcacgcaaagccggcggttaaaacgcttggcgattatggatcaggacgggcataaccaccgctatttaacctcgggtcttgatttggtgctgacaccgcgcttttccccgacggccaatgaaattgcctatctgaattactttaatgacgagccgaatgtgtatctttttgaggtggccactggtcgcaccgagcggttgggctcattccccggcatgacatttgcgccgcgtttcgggccagatggcgataagctgatcatgagcctggcccaggacgggatgactgatatctacgaaatggacatgcgtacccaatcgattaaccaattaaccaaatcagcatcgattgacacctcgccgtcctatgcgccagatggcaatcgcattgtctttaattctgaccgtggcggcagtcagcaactctatgtgatggacgccgatggcagcaatgtcaggcgcatcagctatggtgttggccgctatgccaccccggtttggtcgccgcggggtgacatcattgccttcaccaagatggcaaatggccagttttacatcggtgtgatgaatgtcgatggcagtggcgagcgtttgttggcggacgggtttttggtcgaagggcccacctgggcgccgaatggtcgggtgttgatgtattttaaacaggaaccgtttgaagctgatgggtctggcggcgcaacacatgtttaccgcattgatatcactggatttaatgagcggcgaattgtcaccccgtcggatgcgtcggatccggcatggtcacctttgctgcgctagatgattgcggcacagaaaatcagcgctatcgatatgacaatcaccatttggcgacaaatagaaaaaaatatcagaaaatcgctatttttcgccaaatatatgtatttttaggtttcattactgtaccatatcctatatgtctcgtgttatgaattgaccggttgcccggccatggatccattcgtgcacaaatagcgctgcgttaagatagacctgttacaaggtgcgcgtagcattgttttggcaaaacagaacttaaggttcgctgaaaaaaaattaggagcatcatgatgtttcaacgcatantggcgatagttgccgcaacattcttattcgcagcttgtgaaacggcctcagaggtcggtggtgacagcgcctcgaccagttcggcgagttcggcttcatctgcatcatcatctgcttcggccgcaaagaccgaagctgacaagctggctgaagttggtaatacggtttattttgattttgacagctccgagctgtctgaaaacgcgcaaatgactttgaacaggcaggccgcatttttgaatgtgaacccaaccctggtcattgttgttgagggtcatgctgatgagcgcggtacccgtgaatacaaccttgcgctgggtgatcggcgtgcgacagcggtgcgcgattatctgctggccaaggggttgaattcggcgcgggtgcgcaccgtatcatacggcaaagaacgcccagcagttgaaggctcgacagaagctgcatgggaaaagaacagacgtgcagcaactgtgctgaactaatcctgtttgaaacaacaaaaagaggggcgggtggctcctctttttttttgcctaatttatgcctaaaatagctgttactgcttggtaactgccgtgtcattgctaggatttatctaccatgaanaaacgcttctttattgttttggcntttnttnnnnnnnttcccggnnnggnnnnnncccaannnnnnnccnnnnnnnnggnnnnnnaaaannccnnnnnnttnnttnnnnggnnnnaanaannnanggnnnttnnggaannnggtttaaaannnnnccnngggnnnnnnnnnaannnnnnnnnnnaaattaaaannaaggnnnaannnnnnnaaannnnnnnttnnnnggccggnnnnnnnnnnnccnnggnnnnnaaannnttnnnnnnnnaaanggaaaannngggnnnnnnnnnggnnnnnnccaannnnnnnnnggaannnnnnnttnaaannnccnnnnnnnccnnntttnntttnnnnnggnnggaaaannnnnnnnnnnnnttnnnnnnnnttggnggnnnnnnnnccnnnnnggnnttggnnnnnnnggnnnnaannggnnnnggnnnggnggnnnnnnnnnnnnnnnnnnnnnnccttnnnnccggnntttnaannnggnnggttnnggaannnnnnttaaannnnnnnnnggnaaannttnngggggnnaannccnccnnnnnggnaannnnnnttnnnnaaaannccggnnnnnccnnnnccggttnnnccnnnnccnnannnnccnnnnccnnnnnnnncnnnnccggnnnnntnnnnnncngnnnnnncnnnnnnnnnnntnnnnnngnnnnnaannncnnncccnnnnannnnnnannnancngnnnaaccnnnncnnnnnnncccnnannnntnncggnnnnnnncccngnannnnnannnnnnnttnnnnnnggnnnnnnnttnnnaaannnnnnggaaanggnnnnnnnngnnnttnnnnnantncngnnntttnaccaaggnnnnnnnnggnnggnnnnttcnnttttcnggnttggccnggngnaatttannngnggnnaatttnaaaaggnggnnnnnantttttctnaattnaanannnccnnnccgggnnnnncccnnnttgttnnnncgaccnngtggnttnccnngnnnnnnnngnatttnnnnccnccggaannggnttntnaaatttnnncntnnttnccncancnnattnannnnccnccggatnnntttnnggnnnaattgnccaaannnnnnnnnnnnnnaaantnngccgnntanccntttnnccnnttnngnnnccnnttttnnnngggnnntgcnggcnttnnngnttnccaannnnnnnntttttntaaccnnnttanccg

SEQ ID NO: 223 - DNA, 4000 bp, Escherichia coli
  misc_feature (313)..(313): n is a, c, g, or t
  misc_feature (376)..(376): n is a, c, g, or t
  misc_feature (484)..(484): n is a, c, g, or t
  misc_feature (736)..(736): n is a, c, g, or t
  misc_feature (871)..(871): n is a, c, g, or t
  misc_feature (883)..(883): n is a, c, g, or t
  misc_feature (1489)..(1489): n is a, c, g, or t
  misc_feature (1512)..(1512): n is a, c, g, or t
  misc_feature (1537)..(1537): n is a, c, g, or t
  misc_feature (1557)..(1557): n is a, c, g, or t
  misc_feature (1583)..(1583): n is a, c, g, or t
  misc_feature (2000)..(2000): n is a, c, g, or t
  misc_feature (2065)..(2065): n is a, c, g, or t
  misc_feature (2069)..(2069): n is a, c, g, or t
  misc_feature (2078)..(2078): n is a, c, g, or t
  misc_feature (2156)..(2156): n is a, c, g, or t
  misc_feature (2201)..(2201): n is a, c, g, or t
  misc_feature (2221)..(2221): n is a, c, g, or t
  misc_feature (2232)..(2232): n is a, c, g, or t
  misc_feature (2234)..(2234): n is a, c, g, or t
  misc_feature (2249)..(2249): n is a, c, g, or t
  misc_feature (2254)..(2254): n is a, c, g, or t
  misc_feature (2257)..(2257): n is a, c, g, or t
  misc_feature (2279)..(2282): n is a, c, g, or t
  misc_feature (2287)..(2287): n is a, c, g, or t
  misc_feature (2292)..(2293): n is a, c, g, or t
  misc_feature (2297)..(2299): n is a, c, g, or t
  misc_feature (2304)..(2305): n is a, c, g, or t
  misc_feature (2308)..(2308): n is a, c, g, or t
  misc_feature (2313)..(2313): n is a, c, g, or t
  misc_feature (2317)..(2317): n is a, c, g, or t
  misc_feature (2333)..(2333): n is a, c, g, or t
  misc_feature (2336)..(2336): n is a, c, g, or t
  misc_feature (2348)..(2348): n is a, c, g, or t
  misc_feature (2359)..(2360): n is a, c, g, or t
  misc_feature (2367)..(2367): n is a, c, g, or t
  misc_feature (2370)..(2371): n is a, c, g, or t
  misc_feature (2373)..(2377): n is a, c, g, or t
  misc_feature (2379)..(2380): n is a, c, g, or t
  misc_feature (2384)..(2385): n is a, c, g, or t
  misc_feature (2387)..(2388): n is a, c, g, or t
  misc_feature (2392)..(2395): n is a, c, g, or t
  misc_feature (2398)..(2398): n is a, c, g, or t
  misc_feature (2400)..(2400): n is a, c, g, or t
  misc_feature (2404)..(2404): n is a, c, g, or t
  misc_feature (2408)..(2408): n is a, c, g, or t
  misc_feature (2414)..(2420): n is a, c, g, or t
  misc_feature (2428)..(2428): n is a, c, g, or t
  misc_feature (2430)..(2431): n is a, c, g, or t
  misc_feature (2436)..(2436): n is a, c, g, or t
  misc_feature (2438)..(2439): n is a, c, g, or t
  misc_feature (2441)..(2444): n is a, c, g, or t
  misc_feature (2448)..(2448): n is a, c, g, or t
  misc_feature (2450)..(2455): n is a, c, g, or t
  misc_feature (2458)..(2458): n is a, c, g, or t
  misc_feature (2461)..(2462): n is a, c, g, or t
  misc_feature (2464)..(2464): n is a, c, g, or t
  misc_feature (2470)..(2470): n is a, c, g, or t
  misc_feature (2473)..(2473): n is a, c, g, or t
  misc_feature (2477)..(2477): n is a, c, g, or t
  misc_feature (2480)..(2481): n is a, c, g, or t
  misc_feature (2486)..(2486): n is a, c, g, or t
  misc_feature (2488)..(2488): n is a, c, g, or t
  misc_feature (2490)..(2491): n is a, c, g, or t
  misc_feature (2497)..(2498): n is a, c, g, or t
  misc_feature (2509)..(2511): n is a, c, g, or t
  misc_feature (2518)..(2518): n is a, c, g, or t
  misc_feature (2521)..(2526): n is a, c, g, or t
  misc_feature (2532)..(2532): n is a, c, g, or t
  misc_feature (2536)..(2537): n is a, c, g, or t
  misc_feature (2541)..(2541): n is a, c, g, or t
  misc_feature (2546)..(2548): n is a, c, g, or t
  misc_feature (2553)..(2553): n is a, c, g, or t
  misc_feature (2557)..(2557): n is a, c, g, or t
  misc_feature (2560)..(2560): n is a, c, g, or t
  misc_feature (2562)..(2562): n is a, c, g, or t
  misc_feature (2568)..(2568): n is a, c, g, or t
  misc_feature (2570)..(2570): n is a, c, g, or t
  misc_feature (2572)..(2574): n is a, c, g, or t
  misc_feature (2576)..(2576): n is a, c, g, or t
  misc_feature (2586)..(2586): n is a, c, g, or t
  misc_feature (2588)..(2591): n is a, c, g, or t
  misc_feature (2595)..(2595): n is a, c, g, or t
  misc_feature (2599)..(2599): n is a, c, g, or t
  misc_feature (2601)..(2602): n is a, c, g, or t
  misc_feature (2606)..(2608): n is a, c, g, or t
  misc_feature (2615)..(2617): n is a, c, g, or t
  misc_feature (2620)..(2620): n is a, c, g, or t
  misc_feature (2622)..(2623): n is a, c, g, or t
  misc_feature (2626)..(2626): n is a, c, g, or t
  misc_feature (2628)..(2628): n is a, c, g, or t
  misc_feature (2631)..(2631): n is a, c, g, or t
  misc_feature (2633)..(2633): n is a, c, g, or t
  misc_feature (2635)..(2636): n is a, c, g, or t
  misc_feature (2640)..(2641): n is a, c, g, or t
  misc_feature (2645)..(2647): n is a, c, g, or t
  misc_feature (2649)..(2651): n is a, c, g, or t
  misc_feature (2655)..(2657): n is a, c, g, or t
  misc_feature (2659)..(2659): n is a, c, g, or t
  misc_feature (2661)..(2661): n is a, c, g, or t
  misc_feature (2665)..(2665): n is a, c, g, or t
  misc_feature (2668)..(2668): n is a, c, g, or t
  misc_feature (2670)..(2680): n is a, c, g, or t
  misc_feature (2685)..(2685): n is a, c, g, or t
  misc_feature (2689)..(2694): n is a, c, g, or t
  misc_feature (2698)..(2698): n is a, c, g, or t
  misc_feature (2700)..(2700): n is a, c, g, or t
  misc_feature (2702)..(2702): n is a, c, g, or t
  misc_feature (2705)..(2705): n is a, c, g, or t
  misc_feature (2709)..(2711): n is a, c, g, or t
  misc_feature (2713)..(2713): n is a, c, g, or t
  misc_feature (2715)..(2716): n is a, c, g, or t
  misc_feature (2719)..(2719): n is a, c, g, or t
  misc_feature (2722)..(2723): n is a, c, g, or t
  misc_feature (2726)..(2728): n is a, c, g, or t
  misc_feature (2730)..(2731): n is a, c, g, or t
  misc_feature (2735)..(2735): n is a, c, g, or t
  misc_feature (2738)..(2738): n is a, c, g, or t
  misc_feature (2741)..(2741): n is a, c, g, or t
  misc_feature (2743)..(2747): n is a, c, g, or t
  misc_feature (2752)..(2753): n is a, c, g, or t
  misc_feature (2755)..(2761): n is a, c, g, or t
  misc_feature (2764)..(2765): n is a, c, g, or t
  misc_feature (2767)..(2767): n is a, c, g, or t
  misc_feature (2769)..(2777): n is a, c, g, or t
  misc_feature (2780)..(2785): n is a, c, g, or t
  misc_feature (2788)..(2793): n is a, c, g, or t
  misc_feature (2797)..(2797): n is a, c, g, or t
  misc_feature (2799)..(2799): n is a, c, g, or t
  misc_feature (2802)..(2803): n is a, c, g, or t
  misc_feature (2805)..(2806): n is a, c, g, or t
  misc_feature (2809)..(2809): n is a, c, g, or t
  misc_feature (2811)..(2811): n is a, c, g, or t
  misc_feature (2813)..(2814): n is a, c, g, or t
  misc_feature (2820)..(2822): n is a, c, g, or t
  misc_feature (2825)..(2825): n is a, c, g, or t
  misc_feature (2828)..(2830): n is a, c, g, or t
  misc_feature (2833)..(2834): n is a, c, g, or t
  misc_feature (2837)..(2839): n is a, c, g, or t
  misc_feature (2847)..(2850): n is a, c, g, or t
  misc_feature (2853)..(2859): n is a, c, g, or t
  misc_feature (2861)..(2861): n is a, c, g, or t
  misc_feature (2863)..(2867): n is a, c, g, or t
  misc_feature (2870)..(2870): n is a, c, g, or t
  misc_feature (2874)..(2875): n is a, c, g, or t
  misc_feature (2880)..(2883): n is a, c, g, or t
  misc_feature (2885)..(2891): n is a, c, g, or t
  misc_feature (2894)..(2894): n is a, c, g, or t
  misc_feature (2897)..(2898): n is a, c, g, or t
  misc_feature (2900)..(2902): n is a, c, g, or t
  misc_feature (2907)..(2907): n is a, c, g, or t
  misc_feature (2912)..(2914): n is a, c, g, or t
  misc_feature (2919)..(2919): n is a, c, g, or t
  misc_feature (2922)..(2927): n is a, c, g, or t
  misc_feature (2929)..(2930): n is a, c, g, or t
  misc_feature (2933)..(2933): n is a, c, g, or t
  misc_feature (2936)..(2936): n is a, c, g, or t
  misc_feature (2941)..(2942): n is a, c, g, or t
  misc_feature (2944)..(2947): n is a, c, g, or t
  misc_feature (2950)..(2956): n is a, c, g, or t
  misc_feature (2958)..(2959): n is a, c, g, or t
  misc_feature (2961)..(2961): n is a, c, g, or t
  misc_feature (2963)..(2967): n is a, c, g, or t
  misc_feature (2969)..(2972): n is a, c, g, or t
  misc_feature (2974)..(2974): n is a, c, g, or t
  misc_feature (2978)..(2981): n is a, c, g, or t
  misc_feature (2984)..(2985): n is a, c, g, or t
  misc_feature (2991)..(2992): n is a, c, g, or t
  misc_feature (2995)..(2996): n is a, c, g, or t
  misc_feature (2998)..(3002): n is a, c, g, or t
  misc_feature (3005)..(3006): n is a, c, g, or t
  misc_feature (3008)..(3008): n is a, c, g, or t
  misc_feature (3011)..(3011): n is a, c, g, or t
  misc_feature (3014)..(3015): n is a, c, g, or t
  misc_feature (3017)..(3023): n is a, c, g, or t
  misc_feature (3029)..(3029): n is a, c, g, or t
  misc_feature (3031)..(3031): n is a, c, g, or t
  misc_feature (3033)..(3038): n is a, c, g, or t
  misc_feature (3044)..(3046): n is a, c, g, or t
  misc_feature (3048)..(3048): n is a, c, g, or t
  misc_feature (3051)..(3057): n is a, c, g, or t
  misc_feature (3059)..(3059): n is a, c, g, or t
  misc_feature (3066)..(3067): n is a, c, g, or t
  misc_feature (3071)..(3071): n is a, c, g, or t
  misc_feature (3074)..(3075): n is a, c, g, or t
  misc_feature (3077)..(3077): n is a, c, g, or t
  misc_feature (3080)..(3089): n is a, c, g, or t
  misc_feature (3091)..(3091): n is a, c, g, or t
  misc_feature (3093)..(3099): n is a, c, g, or t
  misc_feature (3101)..(3101): n is a, c, g, or t
  misc_feature (3103)..(3105): n is a, c, g, or t
  misc_feature (3107)..(3107): n is a, c, g, or t
  misc_feature (3109)..(3112): n is a, c, g, or t
  misc_feature (3114)..(3114): n is a, c, g, or t
  misc_feature (3118)..(3118): n is a, c, g, or t
  misc_feature (3122)..(3123): n is a, c, g, or t
  misc_feature (3125)..(3125): n is a, c, g, or t
  misc_feature (3127)..(3130): n is a, c, g, or t
  misc_feature (3132)..(3137): n is a, c, g, or t
  misc_feature (3140)..(3144): n is a, c, g, or t
  misc_feature (3147)..(3150): n is a, c, g, or t
  misc_feature (3153)..(3153): n is a, c, g, or t
  misc_feature (3156)..(3156): n is a, c, g, or t
  misc_feature (3158)..(3159): n is a, c, g, or t
  misc_feature (3162)..(3163): n is a, c, g, or t
  misc_feature (3166)..(3167): n is a, c, g, or t
  misc_feature (3173)..(3174): n is a, c, g, or t
  misc_feature (3176)..(3177): n is a, c, g, or t
  misc_feature (3181)..(3185): n is a, c, g, or t
  misc_feature (3188)..(3191): n is a, c, g, or t
  misc_feature (3193)..(3195): n is a, c, g, or t
  misc_feature (3197)..(3197): n is a, c, g, or t
  misc_feature (3199)..(3201): n is a, c, g, or t
  misc_feature (3205)..(3205): n is a, c, g, or t
  misc_feature (3208)..(3210): n is a, c, g, or t
  misc_feature (3212)..(3213): n is a, c, g, or t
  misc_feature (3215)..(3218): n is a, c, g, or t
  misc_feature (3222)..(3225): n is a, c, g, or t
  misc_feature (3228)..(3233): n is a, c, g, or t
  misc_feature (3235)..(3236): n is a, c, g, or t
  misc_feature (3238)..(3241): n is a, c, g, or t
  misc_feature (3243)..(3244): n is a, c, g, or t
  misc_feature (3248)..(3248): n is a, c, g, or t
  misc_feature (3251)..(3251): n is a, c, g, or t
  misc_feature (3253)..(3254): n is a, c, g, or t
  misc_feature (3256)..(3256): n is a, c, g, or t
  misc_feature (3259)..(3260): n is a, c, g, or t
  misc_feature (3263)..(3263): n is a, c, g, or t
  misc_feature (3265)..(3265): n is a, c, g, or t
  misc_feature (3271)..(3275): n is a, c, g, or t
  misc_feature (3280)..(3285): n is a, c, g, or t
  misc_feature (3287)..(3288): n is a, c, g, or t
  misc_feature (3293)..(3295): n is a, c, g, or t
  misc_feature (3297)..(3298): n is a, c, g, or t
  misc_feature (3302)..(3302): n is a, c, g, or t
  misc_feature (3307)..(3316): n is a, c, g, or t
  misc_feature (3318)..(3322): n is a, c, g, or t
  misc_feature (3324)..(3325): n is a, c, g, or t
  misc_feature (3327)..(3335): n is a, c, g, or t
  misc_feature (3338)..(3338): n is a, c, g, or t
  misc_feature (3340)..(3342): n is a, c, g, or t
  misc_feature (3345)..(3345): n is a, c, g, or t
  misc_feature (3349)..(3350): n is a, c, g, or t
  misc_feature (3352)..(3356): n is a, c, g, or t
  misc_feature (3358)..(3362): n is a, c, g, or t
  misc_feature (3364)..(3368): n is a, c, g, or t
  misc_feature (3373)..(3374): n is a, c, g, or t
  misc_feature (3376)..(3385): n is a, c, g, or t
  misc_feature (3388)..(3388): n is a, c, g, or t
  misc_feature (3391)..(3393): n is a, c, g, or t
  misc_feature (3396)..(3396): n is a, c, g, or t
  misc_feature (3402)..(3402): n is a, c, g, or t
  misc_feature (3404)..(3404): n is a, c, g, or t
  misc_feature (3407)..(3409): n is a, c, g, or t
  misc_feature (3411)..(3411): n is a, c, g, or t
  misc_feature (3415)..(3416): n is a, c, g, or t
  misc_feature (3418)..(3426): n is a, c, g, or t
  misc_feature (3430)..(3433): n is a, c, g, or t
  misc_feature (3435)..(3435): n is a, c, g, or t
  misc_feature (3438)..(3447): n is a, c, g, or t
  misc_feature (3450)..(3455): n is a, c, g, or t
  misc_feature (3458)..(3461): n is a, c, g, or t
  misc_feature (3466)..(3466): n is a, c, g, or t
  misc_feature (3470)..(3472): n is a, c, g, or t
  misc_feature (3474)..(3480): n is a, c, g, or t
  misc_feature (3483)..(3490): n is a, c, g, or t
  misc_feature (3493)..(3494): n is a, c, g, or t
  misc_feature (3497)..(3497): n is a, c, g, or t
  misc_feature (3505)..(3505): n is a, c, g, or t
  misc_feature (3508)..(3509): n is a, c, g, or t
  misc_feature (3512)..(3513): n is a, c, g, or t
  misc_feature (3516)..(3518): n is a, c, g, or t
  misc_feature (3523)..(3523): n is a, c, g, or t
  misc_feature (3527)..(3531): n is a, c, g, or t
  misc_feature (3535)..(3539): n is a, c, g, or t
  misc_feature (3542)..(3546): n is a, c, g, or t
  misc_feature (3552)..(3552): n is a, c, g, or t
  misc_feature (3558)..(3560): n is a, c, g, or t
  misc_feature (3562)..(3563): n is a, c, g, or t
  misc_feature (3566)..(3566): n is a, c, g, or t
  misc_feature (3569)..(3569): n is a, c, g, or t
  misc_feature (3571)..(3572): n is a, c, g, or t
  misc_feature (3575)..(3575): n is a, c, g, or t
  misc_feature (3581)..(3581): n is a, c, g, or t
  misc_feature (3584)..(3587): n is a, c, g, or t
  misc_feature (3590)..(3596): n is a, c, g, or t
  misc_feature (3600)..(3600): n is a, c, g, or t
  misc_feature (3603)..(3611): n is a, c, g, or t
  misc_feature (3614)..(3617): n is a, c, g, or t
  misc_feature (3620)..(3620): n is a, c, g, or t
  misc_feature (3624)..(3624): n is a, c, g, or t
  misc_feature (3627)..(3633): n is a, c, g, or t
  misc_feature (3636)..(3639): n is a, c, g, or t
  misc_feature (3644)..(3646): n is a, c, g, or t
  misc_feature (3651)..(3665): n is a, c, g, or t
  misc_feature (3668)..(3668): n is a, c, g, or t
  misc_feature (3680)..(3680): n is a, c, g, or t
  misc_feature (3683)..(3685): n is a, c, g, or t
  misc_feature (3688)..(3688): n is a, c, g, or t
  misc_feature (3692)..(3697): n is a, c, g, or t
  misc_feature (3702)..(3705): n is a, c, g, or t
  misc_feature (3708)..(3708): n is a, c, g, or t
  misc_feature (3711)..(3711): n is a, c, g, or t
  misc_feature (3714)..(3714): n is a, c, g, or t
  misc_feature (3717)..(3721): n is a, c, g, or t
  misc_feature (3724)..(3727): n is a, c, g, or t
  misc_feature (3729)..(3731): n is a, c, g, or t
  misc_feature (3735)..(3735): n is a, c, g, or t
  misc_feature (3738)..(3742): n is a, c, g, or t
  misc_feature (3746)..(3746): n is a, c, g, or t
  misc_feature (3749)..(3750): n is a, c, g, or t
  misc_feature (3759)..(3759): n is a, c, g, or t
  misc_feature (3764)..(3775): n is a, c, g, or t
  misc_feature (3777)..(3778): n is a, c, g, or t
  misc_feature (3780)..(3784): n is a, c, g, or t
  misc_feature (3788)..(3790): n is a, c, g, or t
  misc_feature (3792)..(3803): n is a, c, g, or t
  misc_feature (3806)..(3809): n is a, c, g, or t
  misc_feature (3813)..(3815): n is a, c, g, or t
  misc_feature (3818)..(3818): n is a, c, g, or t
  misc_feature (3821)..(3824): n is a, c, g, or t
  misc_feature (3827)..(3841): n is a, c, g, or t
  misc_feature (3846)..(3846): n is a, c, g, or t
  misc_feature (3849)..(3860): n is a, c, g, or t
  misc_feature (3863)..(3865): n is a, c, g, or t
  misc_feature (3868)..(3871): n is a, c, g, or t
  misc_feature (3881)..(3883): n is a, c, g, or t
  misc_feature (3886)..(3892): n is a, c, g, or t
  misc_feature (3897)..(3898): n is a, c, g, or t
  misc_feature (3901)..(3906): n is a, c, g, or t
  misc_feature (3912)..(3917): n is a, c, g, or t
  misc_feature (3922)..(3926): n is a, c, g, or t
  misc_feature (3933)..(3934): n is a, c, g, or t
  misc_feature (3939)..(3940): n is a, c, g, or t
  misc_feature (3943)..(3943): n is a, c, g, or t
  misc_feature (3955)..(3957): n is a, c, g, or t
  misc_feature (3970)..(3970): n is a, c, g, or t
  misc_feature (3973)..(3973): n is a, c, g, or t
  misc_feature (3982)..(3982): n is a, c, g, or t
  misc_feature (3986)..(3990): n is a, c, g, or t
  misc_feature (3993)..(3996): n is a, c, g, or t
  misc_feature (4000)..(4000): n is a, c, g, or t
tacaatccgtaaagaaggctggcgttctatcatgattaactacaatcccgagactgtttctacagactatgatatgtgcgatcgtctttattttgatgagcttacattcgagcgagttatggatattatagagttagagaatcctcatggtgtcgttgttagtacgggaggccagattcctaacaacttagcgatgaagttagatgctcagaatgttcctattcttggtacgaaagcacaggatattgatggtgcagaagatcgtgcaaagttctctgctatgctgaccgaaaatggtattaatcaacctgantggagtgctttgacgagtatggaagatatcgatgagttcattaaacgagttggattccctgtnctcgtgcgtccttcttatgtcttatcgggtgctgccatgaatgtttgttctaacgaagaagaacttaaacgcttcctacaattggcagcaaatgtaagtgaagatcancccgttgtcgtttctaaattcatcgaacacgctaaggaaatagagatggatgccgttgcaaagaacggagagatactcgcttatgccatcagtgagcatatagagtttgcgggagttcactcgggtgacgccacgattcagttccctccacagaaactatacgtagaaacagttagacgcgttaagcgaattagtcgtcagattgctaagcaattgcatatcaacggaccattcaacatccagttcatggcncgcgataatgacatacttgttattgaatgtaaccttcgtgcaagtcgttcattcccatttgtaagtaaggttttgaagataaatcttattgagttggccacaagagtaatgttaggactgcctgttgaaaagccnaataagaacttntttgaccttgattatgttggaatcaaagccagccagttctcatttaatcgtttacagaaagcggatcctgtattgggtgttgacatgagttctacgggagaagttggctgtttggctgatgatacgaacgctgcactattaaagagtatgttagccgtagggcaaagaattcctaaaaagacgatactcctttctacaggtggagcaaagcagaaggtggagatgcttgatgcggcgcgtcaactggtagaaaatggctatgaactctatgcaacaggaggtacaagtaagttccttgatgaaaatggtataagcaatacacgagcttattggccttctgaagcagggcaaactccccaagctttagatttgttgcatgagcataagattgatatggtggttaatattccaaagaatcttactgtacatgagttgacaaatgggtacaaagtgagacgcgcggctatagatcttaatgtaccattaatcacgaatagtcgtttagccagtgcctttataaacgctttctgcacattaaaacttgacgacatagacatcaagtcatggaatgaatattaaaaaataacaacgaaaagaggcattccnggggttctgttagaactttgggngtgcctttttctttatcaaattttngagtgaaagaaaaggtgttnttttgttaacaatattttgcagtttntaaattactaataatcagtaacttaataaaaagttacagacggagtaaaaaaaagtagttaaaagatgaatgtgaattaaaaaaaatagttacctttgcatcgttttaataaacaaatgattgttttacagatttaaaaagcaaagaaaatgaagaaattagttttagcactcgtagctgttgcagctatctcattcgcatcttgtggtaacaaaactgcagcaaatgcaaacaatggtgattcagactctgtagctcaggttgacactgctgatactgctgctgttgatactgctgctgctgacactgcaaagtaattttgcaaacgagtagaaaaatgagagattgccgctgaactttaattgttcagcggttttttttgtttcatttctgagctgagagagtggatctcttggnatggttcattgattttctttgtaaaatctattatgaatgaaattgcgtaatgaattccaacatgngttntctgcatantgtatgtcgaattcattctatttaggtttattgtttttgatagtactatataaggtttgaaagctgaatttgtgttantgatgattttgattctttcataaattgatttctacttcacaaatnaaaactatcttttttcttgnttatccttttncngttttgtaaaatatngcctnatnttctatcacttctattccattnnnnttatnataannaaannncattnnaantaatntttnggcattctattataanttnatattgaatttnttttttataannaattttnttnngnnnnnanntaanncnntttnnnnttntntttnaatnaaattnnnnnnnaaaaaggnannttttntnntnnnntttnannnnnnttnttnntnattttnttntttntgnnaaganananngaaggnntttatttaagnnnttgattnatnnnnnnttatanttcnntaanaagtnnngtttntttnaantnaaattntntnnngntttgaaaatntnnnntttntaantnntttnnnaaatttnnntanannttngnaancntnntttnnttannntnnntttnnngnanaatnaantnnnnnnnnnnnttaantttnnnnnntttnangnttnaatnnntnannaanaannttnnnannaaanttnaanannnnnttaannannnnnnnaannangnnnnnnnnnaannnnnncgnnnnnnaaangnccnntnnttntnannaaaagnnnatnttnnnaannttnnnttttcccnnnnttnnnnnnngntnnnnnttntttnnttaannnntnnnnnnnttnttnncnnnatttnttttnnnttttnttnnnnnnannccnttntttgnncnnnnggnnnnnnntnntnannnnntnnnntngggnnnnttnncttaannttnnannnnnttnngnaanttnntnnnnnnnaatttnancnnnnnntttttnnngnttnnnnnnntnccatttnngaanccnntnaannnnnnnnnngncnnnnnnncnannncnannnnanggantttnntncnnnnannnnnnatnnnnnaannnncgnaancnnggnnggnnaaaatnncnnattnnnnnttnnnnannncntnnntttnttnnntnntnnnnaagnnnnttnnnnnngnnannnntnntttnttntnnanttnnttnantttttnnnnnttccnnnnnntnnaaaannnanntccnttccnnnnnnnnnngnnnnnanncnnnnnnnnnttnannnccnaaannannnnntnnnnnannnnnttttnncnnnnnnnnnnttnttnnnttnggaaancnaannntnaaannannnnnnnnntttnnnntnccnnnnnnnnnnaannnnnnaannnnttggnaaannncnnnnnnnttnnnnnnnnggnnaanaaattttnggnnttnnttnnnaaaantttnnnnncccnnnnnaannnnnttaaantttaannngnnaanttnannggnaaattnttnnnnaannnnnnngggnttnnnnnnnnnggnnnnttntttnaannnnnnnaannnnccccnnnccttnnnnnnnnnnnnnnnaanttggtttaattnttnnnaanaaannnnnnttggnnnnccnccnccnaannnnnttnnnngnnntttnttnnnnnaatnggnnttaaggttnaaaannnnnnnnnnnngnngnnnnntttnnngnnnnnnnnnnnnaannnntttnnnttnaannnnttnnnnnnnnnnnnnnnaaaanccnnnnnnnnnnnnccnnnttnnnnaaaaaggaannnggnnnnnnnggccnnccnnnnnntttttnnnnnnaaaannnnnaattttnnaaaannttnttggttggtttnnnttttttttttaanttnggggccaanaaannnnnaannnntttn

SEQ ID NO: 224 - DNA, 4000 bp, Escherichia coli
  misc_feature (1932)..(1932): n is a, c, g, or t
  misc_feature (1939)..(1939): n is a, c, g, or t
  misc_feature (1943)..(1943): n is a, c, g, or t
  misc_feature (1954)..(1955): n is a, c, g, or t
  misc_feature (1963)..(1963): n is a, c, g, or t
  misc_feature (1975)..(1976): n is a, c, g, or t
  misc_feature (1984)..(1984): n is a, c, g, or t
  misc_feature (1989)..(1989): n is a, c, g, or t
  misc_feature (3618)..(3618): n is a, c, g, or t
  misc_feature (3623)..(3623): n is a, c, g, or t
  misc_feature (3628)..(3628): n is a, c, g, or t
  misc_feature (3633)..(3633): n is a, c, g, or t
  misc_feature (3674)..(3674): n is a, c, g, or t
  misc_feature (3705)..(3705): n is a, c, g, or t
  misc_feature (3734)..(3734): n is a, c, g, or t
  misc_feature (3737)..(3740): n is a, c, g, or t
  misc_feature (3743)..(3743): n is a, c, g, or t
  misc_feature (3745)..(3745): n is a, c, g, or t
  misc_feature (3748)..(3750): n is a, c, g, or t
  misc_feature (3752)..(3752): n is a, c, g, or t
  misc_feature (3756)..(3756): n is a, c, g, or t
  misc_feature (3760)..(3762): n is a, c, g, or t
  misc_feature (3764)..(3766): n is a, c, g, or t
  misc_feature (3768)..(3769): n is a, c, g, or t
  misc_feature (3772)..(3772): n is a, c, g, or t
  misc_feature (3776)..(3776): n is a, c, g, or t
  misc_feature (3780)..(3782): n is a, c, g, or t
  misc_feature (3786)..(3788): n is a, c, g, or t
  misc_feature (3791)..(3791): n is a, c, g, or t
  misc_feature (3793)..(3794): n is a, c, g, or t
  misc_feature (3796)..(3796): n is a, c, g, or t
  misc_feature (3798)..(3799): n is a, c, g, or t
  misc_feature (3801)..(3801): n is a, c, g, or t
  misc_feature (3804)..(3805): n is a, c, g, or t
  misc_feature (3809)..(3809): n is a, c, g, or t
  misc_feature (3812)..(3817): n is a, c, g, or t
  misc_feature (3822)..(3823): n is a, c, g, or t
  misc_feature (3825)..(3826): n is a, c, g, or t
  misc_feature (3828)..(3829): n is a, c, g, or t
  misc_feature (3831)..(3831): n is a, c, g, or t
  misc_feature (3833)..(3837): n is a, c, g, or t
  misc_feature (3841)..(3841): n is a, c, g, or t
  misc_feature (3844)..(3844): n is a, c, g, or t
  misc_feature (3848)..(3848): n is a, c, g, or t
  misc_feature (3851)..(3852): n is a, c, g, or t
  misc_feature (3857)..(3862): n is a, c, g, or t
  misc_feature (3864)..(3864): n is a, c, g, or t
  misc_feature (3866)..(3866): n is a, c, g, or t
  misc_feature (3868)..(3870): n is a, c, g, or t
  misc_feature (3872)..(3874): n is a, c, g, or t
  misc_feature (3881)..(3882): n is a, c, g, or t
  misc_feature (3884)..(3884): n is a, c, g, or t
  misc_feature (3886)..(3893): n is a, c, g, or t
  misc_feature (3895)..(3900): n is a, c, g, or t
  misc_feature (3903)..(3907): n is a, c, g, or t
  misc_feature (3909)..(3910): n is a, c, g, or t
  misc_feature (3912)..(3912): n is a, c, g, or t
  misc_feature (3915)..(3916): n is a, c, g, or t
  misc_feature (3918)..(3918): n is a, c, g, or t
  misc_feature (3922)..(3924): n is a, c, g, or t
  misc_feature (3926)..(3926): n is a, c, g, or t
  misc_feature (3930)..(3930): n is a, c, g, or t
  misc_feature (3935)..(3937): n is a, c, g, or t
  misc_feature (3939)..(3942): n is a, c, g, or t
  misc_feature (3945)..(3945): n is a, c, g, or t
  misc_feature (3948)..(3948): n is a, c, g, or t
  misc_feature (3951)..(3951): n is a, c, g, or t
  misc_feature (3953)..(3954): n is a, c, g, or t
  misc_feature (3958)..(3958): n is a, c, g, or t
  misc_feature (3965)..(3965): n is a, c, g, or t
  misc_feature (3967)..(3968): n is a, c, g, or t
  misc_feature (3970)..(3970): n is a, c, g, or t
  misc_feature (3974)..(3974): n is a, c, g, or t
  misc_feature (3976)..(3977): n is a, c, g, or t
  misc_feature (3979)..(3980): n is a, c, g, or t
  misc_feature (3988)..(3989): n is a, c, g, or t
  misc_feature (3991)..(3991): n is a, c, g, or t
  misc_feature (3995)..(3996): n is a, c, g, or t
  misc_feature (4000)..(4000): n is a, c, g, or t
acaaatttttcatatccaacggggtaaacataattcctccaccaaccactcaggtttttaaaaatcattgtttttcgtagtttgtagcttttgtaatgcttcattattcctaaatatgagttcatgctgctttggaaggattgttgttcttcttttgtcggcttatggtcacgggctattgggttttgtttttctatggcattgtaaaagttacctttggtgcggttggctatgtaaattcggtttggtaaaatgaccgttccaagaaattttacgcctttgctgtaatgctgcaaataaattttcttaggatggattgtaacgtgtaattccgtttgcagatactccgccaattttggaatgagtttcttcaaatactccttatcttcatgcactatcacaaaatcgtcaacatagcgtccgtaatgccgtatttttaaatcgtgttttacaaaatggtcgaaactgtccatataaaaattggcaaatacctgactggtaaggttgcctattggcaaaccgcattggggttggctgtgaaaaaggcttttgttcaggggcaaattgttccagtcgcttttattgcctttaatgatgcaattttttgtagggtcgttgaatattacttgcttgcaaagttttattatcaaatctttgtcggtttcattatatttctctttgataaaatgttcaagttttgcaaaaagtatgtttttgtttatgctcataaaaaagccctgcaagtcgagttttagtatgtagcaatctttggtatagtttgccgagcattggcggataaatctatcaatacgcccgatgccaaaatgcgtgcctttgcccactctgcaactgtaactatcgtgtataaactgtttttcaaacagatggtttaatttaccgatgattaaatgatgaactactctatctttgaaatcagcagcaaaaatctctctctttacaggtttatctacaataaacgcaatggaacgacctatttggtatgtaccgctgtttatttcttcacatagttgcactaaattattttcgtagtcaatttcaaacgccaacgcattagctgtatttcgtttgtttttgcgacattcaaaataagcagtgaatagttcttcaagttcaattttcgctggttgtatgtcaaataatgataactgcatatttcttttttctttttttaaaaaacactgacaggcttttttcctgccagtgttaaaattgttttgctgaagaatcccgaacggcacgcacactataagtatttgtcttattgttgttgttcgtgttgccgttgttgaagttgaagttgaatgcgtttgttgcattgtactccgtactactccaatagttggcatttgcaaccaagttttgatgcttttgccgattggcatggcatacaattttaccccgtacaactggggtctggttgccctttttcaacaaaaccttgctcgccttttaccaccttagcaataaaagttccggctatgcagggttggcattgcgccaccctacaatttgtttgccgatactatccattaattggcttaactctgcctgcttttttatcgatagtatcttcatatcaacacaaaggcgtatctcaaattttaacaactcaaaatcatctaaaaatgcttcaagatacacccttttttcttttgctttattggctatatagatactccttaccaattgtatgctgtctcgcttcatatcttgccccaaagtatgcttatactcccgtggaaaatctttggtataatcaaaaatcttcaacacgagtttatacacatctttaaaaacaggtaaatcataatacaaagccattcttcaaaaataaaatcgaccgcttcgcggtaaatagttaaatagataaatagttaaaaagcccgaacggcacgcacactataagtatcngtcttanggtngtggtacgtgnngccgtagncgaagtcgaagnngaatgcgnttgtngcactgtactccgtactactccaatagatggcagtacttgaaagcaaagtagctcccacatcatttaaccctttattagcgtgaaaacgattgtgccataaaatagaaagttcgtctattgaaggtagataccaatccgctcctaaactggtaacccatgtttttgcagggctgttggtcatcaagttcatgttataaacaccatcccaactacgggttgcatcggttgtgcttgttgtgctttgccattgagccgttgtttctgtttttgaaacaattaaaccgtgttgattgccattagcatctaaatagatataaaatacaatgccacctaaagtatcttgtcctaagtagaaatcgtttgaagcaccaccgcctgttgcacttatggtattaccaactatggtaatgttagtgccggctattaattggtcttgtttattgttccagttggtggtatctgttcctgttattccactggctaccgatgccccaaaaattgggtcggtttcagtataactgtcaagtttattgttccaattagcagtgtcggttgctgtaataccactggctaccgatgctccaaaaattgggtcggtttcggttattgttcctgtaactgtttccgctgtttttgcatgcaaggcataaggcacacttaataattgactaacgcttgtaatggtgtagtttgctccaccgtttaaatcgatttctgttttaatgaaataaggtccatttgcccagtcaatagtggtaaaatttccacttacaacggttcctgctccaatttcaatacttactaatccattggcgttggttgttgggaattgtctttctacatacatcgccgtaccgtttgatgaaccttgcaatatgcttatttgcataccaacagtttgatttgttactaattggttactactgttacggattactgcctgatagctcattttttcaggtgattgagcgaacacacttgccgttaataatacggctactaaaattgttaataattttctcattgttttgtcctccttaatttttaatgattttaaacgtttttacttctttgtttccttgtgttacttttacaaaataattggcaggaacaagattgctcataacaatgcttgtttggttgccggtgattttttcgctttgtaaaagttttccgctcatatcatacagttggaatgataaatttgaaatttcaaactcatcaatacgcaatgtaagataatcggtagttgggttgggataagccgtaaccgaaagcgtaatgcctttggcttcttctaatccggttactaccgaaatttcgtagggttgttgtacgccttgtgccaccgaaccatttgtccctgtgttggtggtgtaaacaacctgtcctacggaatagcttacagatcctccgctacccgaagcatctccgcctgtggcgttaacgcttgtttgagcctgtagtcctgtcagtccaagtcctaacaagagtatggcacttaattttaactttttgtgtcgcatttttgacctcctttttgatttgttaatactcattttatttatctgtttttgatactgcttcatgctgttgctgggttttctccactgaatgctaacggctgngggtntggcnagtgngggagagcgtgttacgttttcgtcccccgacgaaaacgccngagcgggcgaaaccgctccgaagttccaatntcaacccacattggctacaccccttgttngcnnnnggnanttnnntntttngttnnntnnncnntcnttcnatannntttnnngcntnntntnncngtnncatnttnnnnnntgcgnnanngnntngnnnnntatntgncaanatnngcttnnnnnntngntnnntnnnttttgcnnangnnnnnnnnannnnnnggnnnnngnntnganntntgcnnngntttntattnnncnnnnttntanttncnnccantcttggntnnantttntnnannttattcgnntnttanntttn

SEQ ID NO: 225 - DNA, 4000 bp, Escherichia coli
  misc_feature (40)..(40): n is a, c, g, or t
  misc_feature (45)..(45): n is a, c, g, or t
  misc_feature (47)..(50): n is a, c, g, or t
  misc_feature (53)..(53): n is a, c, g, or t
  misc_feature (55)..(56): n is a, c, g, or t
  misc_feature (60)..(60): n is a, c, g, or t
  misc_feature (65)..(66): n is a, c, g, or t
  misc_feature (69)..(69): n is a, c, g, or t
  misc_feature (74)..(75): n is a, c, g, or t
  misc_feature (86)..(87): n is a, c, g, or t
  misc_feature (91)..(92): n is a, c, g, or t
  misc_feature (101)..(101): n is a, c, g, or t
  misc_feature (170)..(170): n is a, c, g, or t
  misc_feature (232)..(232): n is a, c, g, or t
  misc_feature (254)..(254): n is a, c, g, or t
  misc_feature (303)..(303): n is a, c, g, or t
  misc_feature (442)..(442): n is a, c, g, or t
  misc_feature (499)..(499): n is a, c, g, or t
  misc_feature (796)..(796): n is a, c, g, or t
  misc_feature (838)..(838): n is a, c, g, or t
  misc_feature (862)..(862): n is a, c, g, or t
  misc_feature (1163)..(1163): n is a, c, g, or t
  misc_feature (1238)..(1238): n is a, c, g, or t
  misc_feature (1259)..(1259): n is a, c, g, or t
  misc_feature (1313)..(1313): n is a, c, g, or t
  misc_feature (1361)..(1361): n is a, c, g, or t
  misc_feature (1487)..(1487): n is a, c, g, or t
  misc_feature (1511)..(1511): n is a, c, g, or t
  misc_feature (1556)..(1556): n is a, c, g, or t
  misc_feature (1640)..(1640): n is a, c, g, or t
  misc_feature (1787)..(1787): n is a, c, g, or t
  misc_feature (1989)..(1989): n is a, c, g, or t
  misc_feature (1998)..(1998): n is a, c, g, or t
  misc_feature (2002)..(2002): n is a, c, g, or t
  misc_feature (2028)..(2028): n is a, c, g, or t
  misc_feature (2030)..(2030): n is a, c, g, or t
  misc_feature (3001)..(3001): n is a, c, g, or t
  misc_feature (3127)..(3127): n is a, c, g, or t
  misc_feature (3334)..(3334): n is a, c, g, or t
  misc_feature (3337)..(3337): n is a, c, g, or t
  misc_feature (3364)..(3364): n is a, c, g, or t
  misc_feature (3433)..(3433): n is a, c, g, or t
  misc_feature (3664)..(3664): n is a, c, g, or t
  misc_feature (3673)..(3673): n is a, c, g, or t
  misc_feature (3709)..(3709): n is a, c, g, or t
  misc_feature (3745)..(3745): n is a, c, g, or t
actgtgaaaaaagctttgatgagatgataaatttaaaaanagaanannnnatnannttanctggnntanagatnnaagatgagctnntaannagcatcaanatatcaattagtggctacgatgaaagcagcgatagcttggactttgatctaaatttactatctcttagngtgccatatagatacgctatatcaaatggttgttttgagatgagtatctttttaaaagaagncaaagaagtggttgagaaattnttatccacttttagttataaatttgaggcaaatagtggcaaggagcgcnacttgatcgttttcgtaaatgagtcaaaaatttacgagcaaacctatatgtgatataaggaaatatggttatgaatgtggttttttttactcaaaatggttcgcttaataatctttggcgagggtatttttcagatgangatgtgaaatttactcacaataaaaaggatttttttgcaaatttaaacgacgaggtngatatcgtcggtatcgatacaaatgcttttaaagatagccttgatgaaaatattaaaaccattcatgaaagttttccaaatataaaatgtctaatccttgcaaacgaaccaaaatttagtgaaggcaaacatctgctggctcttggtgtcaaaggatatgcaaactcacacatgagaaaaacacactttgaagatgcctttgagacgattttaaatggcaaagtttggctttatccagaatttatccaagcgatgatcggagaactaactggctcatatataaataatgaaagtganactttagagaaaaagtctgatctaagcgagcttagctcacgngaaaaagagatcgcaaacttaatntaccaaggtctaacaaacaatgaaatttcagagcaaacaggcattactttaaggacggtaaaggcgcacactacgtcgatttacagcaagctaaatgtgaaagatagaataggtcttgtgcttttgatgaagcagctgcatgcgtaaaattttgcttcttttcttttttgtctcttctctttttgcaaataattttgaaatttctccaaaaaatatatctcaatgtaaaaatcaaatttgcaaaaatatcctaaatcactatgcaaattttatgaaaaaaatagaacacgaaagctttatnagaaagctagagctcataaattcatacttaaattctttgatgccaagatatgatgatttttacaatacaaatgtngatgtgtggagcactaggggngagtttttaaggcgaggtggcggagactgcgaagagtacgcgatatcaaagcgngatagcctaaaagatcttggcgtggataatcaaaaatgccttctagtngttcaggaaaaaaatacaaaaaaatatcatatggtgctagctgtttgggaaaatttacacaaagagcctttgatactggataatctaagctttagagttttgccactttcgaagcgctacgacttngtgccagagtattgcttgatggangggaaatattttaagataaaaaaagatggcataaatttagagccngtaaatataagaatgcaaacttacgaaaatttgataaaaaaggaaaaagaagagaaattttggaagaattaatcttccaagtcnatgtctattttttcaacatttgttgtaatatctttagtatttttctcaatgttgtgtttatttttctcgattagtgatctgttttgacctataaggtctctattttctttgataccatcactgttttgctcgatcattttgcttagngtcgctatctttttttcatagcggatcattaagaagtagatcacgtaaattagcagtaaaattaccgcccaaggtaaaaattgcatattaaatcctttgtaatttttcgtaattatagaaattttagcttttaaaaaaaataaaactatgaaaatatgaaattttatatatgtaaaatttatctttgttttttggtaaaagnggctcagtntagngggtgtttttgaaattttttataaantntatagatttttgattgcaaaaaaattagataaaatatttttcaaaatctccttgacttttattttattttgggctataattgccacttcacaaaacaggtgctggtgtagctcagttggtagagctactgccttgtaagcagtgggtcggcggttcaagtccgttcaccagctccattttgtaacagtgtttgaccagaaaataccaaaataacttattaatgtttaaggtgagatactcaagcggccaacgagggcagactgtaaatctgctgactatgtcttccgtggttcgaatccacgtctcaccaccattgttatgcgggagtagctcagttggctagagcatcagccttccaagctgagggtcgcgggttcgagccccgtttcccgctccaaaatttgggaaagtaaactgggagctgtatctagattttactaaacacagttattccatctttattttcatgaatttttagttgtttgtatgttgattaaaatcatctcagccaagcgtttttcgctcatatggctcagaggtagagcacttccttggtaaggaagaggtcgcgggttcaagtcccgctatgagctccactggtttatatgattttatattactatacgaatttgaattagataaagacacatatcataacggaggaaaagatggctaaagaaaaattttcacgcaacaagccacacgtaaacataggcactatcggtcacgttgaccatggtaaaactactttaacagctgcaatatctgctgttctttcacgcaaaggtcttgctgagctaaaagattatgataatattgataatgctccagaagagaaagagcgtggtattacaattgctacttcacacattgagtatgagacagaaaaacgtcactatgctcacgttgactgcccaggccacgccgactatgtaaaaaacatgattacaggtgctgctcaaatggacggngctattctagttgtttctgcagcagacggcccaatgccacaaacaagagagcacatcttgctatctcgccaagttggtgttccttatatcgttgttttcatgaacaaagcagatatggttgatgangctgagttacttgaactagttgaaatggaaattcgcgaactacttaacgagtacaacttcccaggtgatgatactccaatagtttctggttcagcacttaaagctcttgaagaggcaaaagctggacaagatggcgaatggtcagcaaaaattatggaactaatggatgcggttgatagctatatcccaactccagttcgtgctacnganaaagatcttcttatgccaatcgaagangttttctcaatttcaggtcgtggtacagttgtaacaggtagaattgagaaaggtgttgttaaagttggngacacaatagaaatcgttggtatcaaacctacacaaacaacaacagttactggtgttgagatgtttagaaaagagatggatcaaggtgaagctggcgataacgttggtgttcttcttcgtggtactaaaaaagaagacgttgaacgtggtatggttctttgcaaacctaaatcaattactcctcacacaaaatttgagggtgaggtttatattctaactaaagaagagggnggtcgccanactcctttctttaacaactatagaccacaattctangtaagaacaactgacgttactggttctattacattnccagaaggcacagagatggttatgccaggtgataacgtaagaatttctgttgagcttatcgctccagttgcacttgaagaaggtactcgttttgctatccgtgaaggtggtagaactgttggttcaggtgttgtttcaaaaatacttggttaatttataaaattatgccaaaggggaaaccctttggctttctataaggaatatatatgagaattaaaatcggtttaaaatgctctgagtgtggtgatatcaatt

SEQ ID NO: 226 - DNA, 4000 bp, Escherichia coli
  misc_feature (1943)..(1943): n is a, c, g, or t
  misc_feature (1948)..(1948): n is a, c, g, or t
  misc_feature (1959)..(1959): n is a, c, g, or t
  misc_feature (1962)..(1963): n is a, c, g, or t
  misc_feature (1965)..(1966): n is a, c, g, or t
  misc_feature (1972)..(1972): n is a, c, g, or t
  misc_feature (1978)..(1978): n is a, c, g, or t
  misc_feature (1980)..(1981): n is a, c, g, or t
  misc_feature (1986)..(1987): n is a, c, g, or t
  misc_feature (1992)..(1993): n is a, c, g, or t
ccccgttccttatccttgctttgagctgttcccggctcttataccgtttctttattatcagccttgagaacttaccatccatcatgatgtatttccaccattccttgtgtagcatatacatcaccttcttgcggatattgtagctttcaaaatgaatcatcataccgaggtatgaattgatggactgaacaaagtgttccaagttctcaagtgctttcccttcctcggccagcttgttgtacttctgtatgctatcgtacatcttacctcgcgtcctgttgctgatatacgttcgccccggcaatatcattgccccgacaaacagcacaccgttccgtacaggctggatgtatattttctttgggtgtaaccgtacaagcagctgctcggcgaggaacagcctcatttcgggcacaagtttggcaaaatcctctttcgttggaagcagtatcgttatatcatcgacaaagcgaatataacaatcaatttgcttgacttccttaatccaatggtcgaacacgctaccgaggaagttagcgttgagttgggagggcaaattgcctatagcgcatcctttacctttaggctgtccgaacagagttttcctcggtggtatattgtcccacaattcaacagggcttttgcggatacaatcatcctgcggacaatggaatgttatcacacgtgtaatgtataacagacattccaaatcatcacccttgtagttgtcccggatgaagatgtcgagcatttcgtacagaagggctttatccatactcataaaatagccctcaaggtcaaaatgacctacccaccaattcgggtgttcatccaccatcttacgcacggccttcacagctgacagcgtaccctcgcccttacgacagttctttgatacgttaccctgtgcagtgaatcgttcctcgtacataggattcactctcaaagcccaccaatggtggattatacggtcagcaaaatcagcagcaaagacttctcgataaacaggccacttgacaacaaagcatttggacgttccgggatagtatctgccagtacggacttcgttccacaggcgtttgagttccgtttgataggtgcaaaagaaagtaagacaatccttacttgacatcttttcccttatacagtcctcaaaagcagctacaattgacgaaaaaggtatgtcataggtgacaggttcacttgcggaagacacaacgggacaacacacagaacgaaccctatttgtattattcctattgttgttgttcgaattaccgttgttcatatttacgttccacgaagacaccgaagtctgtattcacttttgtttctttcctcgtttttaggcaaggggaatacccaaataaaccttgtttcactgctcactcctaaccagcgtaccaattaggattccggctgacgggctaacgctgacttgcgccaacccgtggcttgcgctcctatctctccagcaagggagagaatatcacagaacttgccctcgtcaattatacgacggtctcggcataacctaatcatcaattgcagactgccaaacttgatagagaactcttccaataacgacactcgccgggcttgcgacatatttgcggcctgtatcagttcgcaacattctaacgcaaccatcatcatacgttcaccaaaggcatatttgaaagccttcggaaagtgttcccttgcatccaatataagattgagcaaggtgtacatttgtttatatatttgtaaatcttgtgcgagtgccatatcacatctttttcgaatcggcggcaaagatactgaaaatgcgccaaaaatcgacaaaaaaatcccccttacgggggaaagaaataaagaattaaagaggtaaagagataaagaggtacaaggtttatcctgcggaagacacaacgggacaacacacagaacgaaccctaccngtatnattcctaccgntgnngnncgaacnaccgtngnncatanntacgnnccacgaagacaccgaatcgtactctgtggaactccagtaccaatcaccaacaattgtgccaccagcaaagtatttggtaaggaatgcgtttatctcagtcttgaactcacaaatcaagcgcagttccgttacgctgggtagataccattgcattgtgtcgtagctgttggccttgtagttccatgctgcttcagcagctggtgcgcccgttatattctgcgagtcggtctttccggctgtctgctcaatgatggcttttgtatcttcatatccagtgttcacatcaaatagtccagtgttcccggctgcatagttcttcacgttcttaaagtccgttccataacctccgaacttgaacgtataaccacccgaagcattgacacaatcggcagcagcgacaatgaactctctttttcgggcacgtacactgacaccgagcttgctgtactgtgccttaccgttcgctgacagcgcactccattcgtcacctgtgaagtaagccagactgccgtccgaaatctttatacaagcgatacggaggtcacgcaggcctcctgcccatttaatgtactctgccatctcggacaacggtgtgttgtatgttacttccgaaaatcccaactcctgaagagcctttacttggtcttccttgttaatgcgaagcaatatcgcgtctttgtttgcactcatatcatttgggttttaatgttagacttcctcacagaccgcacggacacggttcttgacttccttatattgtgcaccggagatgtatccataatggaatgacaatccgaatgcgtattcactggtgtactctgtactgctccaataataatggtttgtagtggccttacaaagcaaactctcggaactccaaaagtattccaacgcctcttgtatttcggtcttgcacttgtagatgataagtaacacaccaagaccgggaagatgccagtcgctggtgtcttcgataccgtcatactcttctgtgtatgccttatatgctttggcggcttctgctgccggagcacctgtcacaccctcattgcctgttatgccggacaaggatgcaaggataagctctgtattctcagctccggcaaaatcattataggcagcaccacaagtgcgctggtcgaggtcttcaacgttcttacggttgccccatgacatggtaacgtttccgtccccatcgtaacagtcacccggtgcgaggacgaatgaatgaccataagcacggacacggagacctcgcttgatgaacttcattttattctcgttggtcagactgtcccattcatctttggtaaagtaccaatagctcttgtcactgtaccgttgtactgcaaggcatatatcaagcaggccaccagcccacttgatacgctttgcaaattccgaggcacgactggcttctgtaacatcagtcatacccacagcattgaatgctgccacctgtgcctgcttgtttctgcgtagcagggttacgctttgttctttcgtgctcatattatgaattgattaggtcgttaatatctgcattctcgttggcatatccggcaaggtattcctcataggtctcaccgttgtagtaaaggagatgctcatcaatgttgtcgagtgtaacatcatccacttcctcctcaccaccgtagccttcactgttaacttcatcgatgaggtcaatgtacgcttctatgacaacaaggattgttagttctgaaatcccgttctctatcgcttctatttcgtagtcctcaaggattacagtcagttgatacgtgccgttgatgactggcttgcttaccttgtttccgtcagcatcctgtccggcgacaccacgctcgatgatagccaacagttcggatgcatcccccttcaatgtttgccctacaatacgaagcagggtcaataccgcactcgctgactgtgaggcaagcacatcggtcagcatacggatagcatccaatttggggctggtctctatacgcaaacgctgtactg

SEQ ID NO: 227 - DNA, 4000 bp, Escherichia coli
  misc_feature (65)..(65): n is a, c, g, or t
  misc_feature (127)..(127): n is a, c, g, or t
  misc_feature (160)..(160): n is a, c, g, or t
  misc_feature (906)..(906): n is a, c, g, or t
  misc_feature (1427)..(1427): n is a, c, g, or t
  misc_feature (1659)..(1659): n is a, c, g, or t
  misc_feature (1752)..(1752): n is a, c, g, or t
  misc_feature (1766)..(1766): n is a, c, g, or t
  misc_feature (1987)..(1987): n is a, c, g, or t
  misc_feature (2903)..(2903): n is a, c, g, or t
  misc_feature (3580)..(3580): n is a, c, g, or t
cggcgatgtcacgtgctggatttgctctaaacctcattggagccgtccttgtgacaacactcgcnctccttcttattcaagctctctttttgtagtgtttccttgagtttcactgactagaaatagnggtagaaaaaaatctccaaaaatttttatattncattgtcgtatttaagaagagttttaatgaaaactatttcaagatcagtagaacaaaaatagtggttcctaaatattttctaagagagttctgacctttctggtttccatctaagctttgggttgcgggcggccgtgatttcatctgggcgagaaacgacaggcatatgaggggcattgtgaaaaacttccggtttggtctctgcgagttcagctatttttttcatggttacgataaagtcatcgagtgtttcctttgattcagtttcagtcggctcgatcatcaatgcacccttgacgaccaaaggaaagtaaactgtgggaggatgaaacccatagtcgatgagcatttttgcgatatccatagtactcactttgtttttgagttgaagcttgtcgttgaatacgcactcatgcagactgggtccgttatagggtagatgatagtgtttatagagcgaggctttgatatagttggcgttgagaaccgccatttctgctacctgtttaattccttctggtcctagcgatctgatgtaggtataggctcgaacgaggatgccaaaattcccataaaaagctttcatttttccaatactatcagggcggtcatggttaagcgtgtatttcccgtcagcatgttcgatgataggctttggaagaaaaggtgatagtttttcggcgacccctataggaccagctccgggtcctccccctccgtgaggtgtggaaaatgttttatgtagnttaaagtgtaaaacatctacacccatgcggttcaattttgtttttcccattatcgcatttaggtttgccccatcacagtaaaccaggccccctttactgtgaacaatttcactgatttttaatatgtcagtttcaaatattcctagagtatttggattggtcagcattatggctgcagtttcttcatccattatcgactctaattttttgggatcgatgaggccacgttcgtcggactgtatttgaataacgctgtatccacataacgctgcgctagctggattagttccatgggcagagtcgggcaggatgactttttttcgctgtgtcccttgagtcgaatgatacgcatgaatcatgagcatgcctgccaattcaccgtgtgctccggctgcaggttgcaggcttacatgcgccataccgcttatttctttgaggtattcttgcagttcaaacataagttgaaggcttccctgcgaaagagtctcaggtgtgtatggatggtgctgtgcaaatccggnaaggttggcggtttcgttgttgacctttggattgtatttcatcgtgcaggagccaagcgggtaaaaattggtgtctatactaaagttccattgtgagagccttgtgaagtgtcgaacaacatcgagttccgttagttcgggaaggttgtcgatgggattacgaatttctgtggcaggaagaattgcttcaagttccacttcagggacatcacattttgggagtgagtaggcngtgcgacccggggatcccatttcaaagagtaacggttcgttaaaaaccagtcctttgattcctgttagcgaattgtgtaatgcctgaggtttnttcatcatgggtcnctaagtgatagtacctgtgaaattttttatgcgtatgtagtgttaagtaattttaaaatatacttacagcggtctaatttaaaatagttaggttacttgccaatggagaaatttcttaaaaaacaggttaacagaacaagtggatattatatagttttgcgagcctgggtgttagttagtaattggttgatttgatctaccactatttttggtgagagaanatccgagtttttttcttcgagaatgatatgaggagtattggttggtccccatcgtgctgtttcgccatgtttgaagatcactgccacaggtgtttctactgccgaagcaaaatgcattatgcctgtgtgattgcaaaacagcaggtcgcttttttttatagctagcgctaactcttttatcgaaagaactggcaaacgatcaatggttgagtttgcctgtttattgatacggtctattaatggttcttcgcctggaccacaaatgaataaaacttctccttttttcgaactggatagtttttcagctacgacttgaaagttttcgactttccatccccattttccgatacgtgttcctggttttattagtatgagtgggagttctgggtatttgcgtagtgcgtttagtatcgtggagacctttttttcctctgcttcattgaaatacaggcgtggagattttgaaatttttgtcaatcccgcatagcttagcagttcaaggttatttaagctttcgtggcgagattggttgtctataggtaaacggatatcgtagagccagattgtttcatcgtgggcgtaacttatcttatattgagctttactgattagagcaagaaacgaagcaatgacgctaaactttttatttaatgtaaatgcgatatcaaacctattgcataggagttgtttgatgatggttccgaggtttttggggctaaaggggattattttgtctacatttgggttgtcagtcaggataggcatgttgctgcggttcactattacacttactcgaagatgcggaaatgattttttgatggattcgtaaacgggtgttgataaaacgacgtctcccagacgatcggttcttattaccaatatagaagaggcagatgtgaaatttataggaagaggnggagatttttttttaccaaaaaaaaatccaatgatagcccacagagtatgctttgcgagacgttctattttgcgagccagttcggccatggtttttttcgccaagtggcagtgcgtttaaggcaatggttgtgcttgatcgatgagcatgataggaatgtcatcctggatgagatattttagtttgcatgcgttgcagtcaagcccgtcttcttcgggagttaactctaattctcctttgcattttgggcaaaccaggatttctaaaagttctttgtcaaaagccattgaattacctttatgtttaatgagttgagtgttgaggagagattagcatcttaatatgtccggaggctatttttttcgtagcatcaaacatgttttgcacggttactttattcatgcattcggttgtccctaaaggacactgacgtttccagcagaaactacaatttaatttatgaaaaactgcttcatggttttttgagtaggccccgttgcggtttggatcagttggtccccatgccgaaaccgttgggatgcctaatgcccagcaaatatgaaacggtcccgagtcgcttcccacaaataaagagagttttttatatagtccaatagactcggcaatcgtggtcgcaggtgctatccacgacttttgtttcatgctctcggcgatantgcggaccatttcttcttctcctggtccccaggtcaggaggatagagaagcccagctcttctgttagtttgtcggctaatcgggcgtaccgttctatgctccacagtttggttgggaacccggctcctggattgattccagctatgggcttttcggtgagcttgctatttttcaccatgaaagctttagaaataatttcatccttctcaccgatgggtaggggaaactctatttgaggatgaaaatctcccaagatggaaagctgtgatagacaacggtctactatatgactatcggtagaaatatatttactacgttgattattaaaccaggcatttattttttctcggcagttactgcgatgaaacccagctctattgggtgcgctcgtcatgctagcaatgaacccagttttaatga

SEQ ID NO: 228 - DNA, 4000 bp, Escherichia coli
  misc_feature (37)..(37): n is a, c, g, or t
  misc_feature (121)..(121): n is a, c, g, or t
  misc_feature (600)..(600): n is a, c, g, or t
  misc_feature (911)..(911): n is a, c, g, or t
  misc_feature (1173)..(1173): n is a, c, g, or t
  misc_feature (1392)..(1392): n is a, c, g, or t
  misc_feature (1988)..(1988): n is a, c, g, or t
  misc_feature (1999)..(1999): n is a, c, g, or t
  misc_feature (2005)..(2005): n is a, c, g, or t
  misc_feature (2238)..(2238): n is a, c, g, or t
  misc_feature (2274)..(2275): n is a, c, g, or t
  misc_feature (2277)..(2277): n is a, c, g, or t
  misc_feature (2279)..(2281): n is a, c, g, or t
  misc_feature (2284)..(2284): n is a, c, g, or t
  misc_feature (2287)..(2288): n is a, c, g, or t
  misc_feature (2290)..(2291): n is a, c, g, or t
  misc_feature (2293)..(2293): n is a, c, g, or t
  misc_feature (2295)..(2297): n is a, c, g, or t
  misc_feature (2299)..(2301): n is a, c, g, or t
  misc_feature (2304)..(2306): n is a, c, g, or t
  misc_feature (2308)..(2308): n is a, c, g, or t
  misc_feature (2310)..(2315): n is a, c, g, or t
  misc_feature (2317)..(2317): n is a, c, g, or t
  misc_feature (2319)..(2320): n is a, c, g, or t
  misc_feature (2322)..(2322): n is a, c, g, or t
  misc_feature (2324)..(2324): n is a, c, g, or t
  misc_feature (2327)..(2334): n is a, c, g, or t
  misc_feature (2337)..(2340): n is a, c, g, or t
  misc_feature (2342)..(2345): n is a, c, g, or t
  misc_feature (2347)..(2347): n is a, c, g, or t
  misc_feature (2350)..(2350): n is a, c, g, or t
  misc_feature (2352)..(2354): n is a, c, g, or t
  misc_feature (2356)..(2356): n is a, c, g, or t
  misc_feature (2358)..(2358): n is a, c, g, or t
  misc_feature (2363)..(2366): n is a, c, g, or t
  misc_feature (2369)..(2369): n is a, c, g, or t
  misc_feature (2373)..(2375): n is a, c, g, or t
  misc_feature (2377)..(2377): n is a, c, g, or t
  misc_feature (2379)..(2382): n is a, c, g, or t
  misc_feature (2385)..(2385): n is a, c, g, or t
  misc_feature (2387)..(2387): n is a, c, g, or t
  misc_feature (2389)..(2389): n is a, c, g, or t
  misc_feature (2392)..(2395): n is a, c, g, or t
  misc_feature (2397)..(2399): n is a, c, g, or t
  misc_feature (2401)..(2401): n is a, c, g, or t
  misc_feature (2403)..(2403): n is a, c, g, or t
  misc_feature (2406)..(2408): n is a, c, g, or t
  misc_feature (2414)..(2414): n is a, c, g, or t
  misc_feature (2416)..(2422): n is a, c, g, or t
  misc_feature (2426)..(2432): n is a, c, g, or t
  misc_feature (2434)..(2439): n is a, c, g, or t
  misc_feature (2441)..(2444): n is a, c, g, or t
  misc_feature (2446)..(2446): n is a, c, g, or t
  misc_feature (2448)..(2450): n is a, c, g, or t
  misc_feature (2452)..(2455): n is a, c, g, or t
  misc_feature (2457)..(2459): n is a, c, g, or t
  misc_feature (2461)..(2463): n is a, c, g, or t
  misc_feature (2466)..(2466): n is a, c, g, or t
  misc_feature (2469)..(2470): n is a, c, g, or t
  misc_feature (2474)..(2475): n is a, c, g, or t
  misc_feature (2477)..(2480): n is a, c, g, or t
  misc_feature (2482)..(2482): n is a, c, g, or t
  misc_feature (2485)..(2486): n is a, c, g, or t
  misc_feature (2489)..(2489): n is a, c, g, or t
  misc_feature (2497)..(2497): n is a, c, g, or t
  misc_feature (2501)..(2502): n is a, c, g, or t
  misc_feature (2504)..(2506): n is a, c, g, or t
  misc_feature (2509)..(2509): n is a, c, g, or t
  misc_feature (2512)..(2514): n is a, c, g, or t
  misc_feature (2516)..(2518): n is a, c, g, or t
  misc_feature (2520)..(2521): n is a, c, g, or t
  misc_feature (2523)..(2523): n is a, c, g, or t
  misc_feature (2525)..(2525): n is a, c, g, or t
  misc_feature (2527)..(2530): n is a, c, g, or t
  misc_feature (2533)..(2533): n is a, c, g, or t
  misc_feature (2535)..(2537): n is a, c, g, or t
  misc_feature (2539)..(2542): n is a, c, g, or t
  misc_feature (2545)..(2545): n is a, c, g, or t
  misc_feature (2548)..(2551): n is a, c, g, or t
  misc_feature (2555)..(2555): n is a, c, g, or t
  misc_feature (2558)..(2558): n is a, c, g, or t
  misc_feature (2560)..(2560): n is a, c, g, or t
  misc_feature (2562)..(2565): n is a, c, g, or t
  misc_feature (2569)..(2570): n is a, c, g, or t
  misc_feature (2577)..(2577): n is a, c, g, or t
  misc_feature (2580)..(2581): n is a, c, g, or t
  misc_feature (2583)..(2583): n is a, c, g, or t
  misc_feature (2588)..(2590): n is a, c, g, or t
  misc_feature (2592)..(2592): n is a, c, g, or t
  misc_feature (2594)..(2594): n is a, c, g, or t
  misc_feature (2598)..(2599): n is a, c, g, or t
  misc_feature (2602)..(2602): n is a, c, g, or t
  misc_feature (2607)..(2607): n is a, c, g, or t
  misc_feature (2609)..(2610): n is a, c, g, or t
  misc_feature (2612)..(2612): n is a, c, g, or t
  misc_feature (2616)..(2617): n is a, c, g, or t
  misc_feature (2619)..(2623): n is a, c, g, or t
  misc_feature (2625)..(2627): n is a, c, g, or t
  misc_feature (2629)..(2630): n is a, c, g, or t
  misc_feature (2638)..(2639): n is a, c, g, or t
  misc_feature (2643)..(2644): n is a, c, g, or t
  misc_feature (2647)..(2648): n is a, c, g, or t
  misc_feature (2653)..(2653): n is a, c, g, or t
  misc_feature (2655)..(2657): n is a, c, g, or t
  misc_feature (2660)..(2660): n is a, c, g, or t
  misc_feature (2662)..(2662): n is a, c, g, or t
  misc_feature (2665)..(2667): n is a, c, g, or t
  misc_feature (2670)..(2670): n is a, c, g, or t
  misc_feature (2672)..(2672): n is a, c, g, or t
  misc_feature (2676)..(2676): n is a, c, g, or t
  misc_feature (2678)..(2678): n is a, c, g, or t
  misc_feature (2680)..(2681): n is a, c, g, or t
  misc_feature (2683)..(2684): n is a, c, g, or t
  misc_feature (2686)..(2686): n is a, c, g, or t
  misc_feature (2691)..(2691): n is a, c, g, or t
  misc_feature (2693)..(2694): n is a, c, g, or t
  misc_feature (2697)..(2697): n is a, c, g, or t
  misc_feature (2699)..(2699): n is a, c, g, or t
  misc_feature (2702)..(2702): n is a, c, g, or t
  misc_feature (2705)..(2705): n is a, c, g, or t
  misc_feature (2707)..(2707): n is a, c, g, or t
  misc_feature (2710)..(2710): n is a, c, g, or t
  misc_feature (2713)..(2714): n is a, c, g, or t
  misc_feature (2716)..(2718): n is a, c, g, or t
  misc_feature (2720)..(2723): n is a, c, g, or t
  misc_feature (2726)..(2728): n is a, c, g, or t
  misc_feature (2730)..(2731): n is a, c, g, or t
  misc_feature (2735)..(2739): n is a, c, g, or t
  misc_feature (2745)..(2746): n is a, c, g, or t
  misc_feature (2748)..(2749): n is a, c, g, or t
  misc_feature (2753)..(2757): n is a, c, g, or t
  misc_feature (2759)..(2761): n is a, c, g, or t
  misc_feature (2764)..(2765): n is a, c, g, or t
  misc_feature (2767)..(2769): n is a, c, g, or t
  misc_feature (2773)..(2778): n is a, c, g, or t
  misc_feature (2780)..(2780): n is a, c, g, or t
  misc_feature (2782)..(2782): n is a, c, g, or t
  misc_feature (2784)..(2784): n is a, c, g, or t
  misc_feature (2788)..(2789): n is a, c, g, or t
  misc_feature (2791)..(2791): n is a, c, g, or t
  misc_feature (2793)..(2793): n is a, c, g, or t
  misc_feature (2796)..(2797): n is a, c, g, or t
  misc_feature (2801)..(2801): n is a, c, g, or t
  misc_feature (2803)..(2803): n is a, c, g, or t
  misc_feature (2805)..(2806): n is a, c, g, or t
  misc_feature (2809)..(2811): n is a, c, g, or t
  misc_feature (2815)..(2820): n is a, c, g, or t
  misc_feature (2825)..(2825): n is a, c, g, or t
  misc_feature (2827)..(2829): n is a, c, g, or t
  misc_feature (2831)..(2834): n is a, c, g, or t
  misc_feature (2839)..(2839): n is a, c, g, or t
  misc_feature (2841)..(2842): n is a, c, g, or t
  misc_feature (2844)..(2844): n is a, c, g, or t
  misc_feature (2847)..(2849): n is a, c, g, or t
  misc_feature (2851)..(2851): n is a, c, g, or t
  misc_feature (2856)..(2858): n is a, c, g, or t
  misc_feature (2860)..(2862): n is a, c, g, or t
  misc_feature (2866)..(2869): n is a, c, g, or t
  misc_feature (2874)..(2877): n is a, c, g, or t
  misc_feature (2879)..(2880): n is a, c, g, or t
  misc_feature (2886)..(2887): n is a, c, g, or t
  misc_feature (2891)..(2891): n is a, c, g, or t
  misc_feature (2894)..(2896): n is a, c, g, or t
  misc_feature (2898)..(2899): n is a, c, g, or t
  misc_feature (2905)..(2905): n is a, c, g, or t
  misc_feature (2908)..(2908): n is a, c, g, or t
  misc_feature (2911)..(2911): n is a, c, g, or t
  misc_feature (2915)..(2916): n is a, c, g, or t
  misc_feature (2920)..(2921): n is a, c, g, or t
  misc_feature (2924)..(2924): n is a, c, g, or t
  misc_feature (2926)..(2927): n is a, c, g, or t
  misc_feature (2929)..(2929): n is a, c, g, or t
  misc_feature (2934)..(2934): n is a, c, g, or t
  misc_feature (2936)..(2938): n is a, c, g, or t
  misc_feature (2942)..(2942): n is a, c, g, or t
  misc_feature (2945)..(2945): n is a, c, g, or t
  misc_feature (2947)..(2948): n is a, c, g, or t
  misc_feature (2950)..(2950): n is a, c, g, or t
  misc_feature (2953)..(2955): n is a, c, g, or t
  misc_feature (2957)..(2957): n is a, c, g, or t
  misc_feature (2959)..(2961): n is a, c, g, or t
  misc_feature (2963)..(2963): n is a, c, g, or t
  misc_feature (2965)..(2973): n is a, c, g, or t
  misc_feature (2977)..(2979): n is a, c, g, or t
  misc_feature (2983)..(2989): n is a, c, g, or t
  misc_feature (2993)..(2993): n is a, c, g, or t
  misc_feature (2996)..(2996): n is a, c, g, or t
  misc_feature (3000)..(3001): n is a, c, g, or t
  misc_feature (3004)..(3004): n is a, c, g, or t
  misc_feature (3010)..(3012): n is a, c, g, or t
  misc_feature (3014)..(3014): n is a, c, g, or t
  misc_feature (3016)..(3019): n is a, c, g, or t
  misc_feature (3021)..(3021): n is a, c, g, or t
  misc_feature (3023)..(3024): n is a, c, g, or t
  misc_feature (3027)..(3027): n is a, c, g, or t
  misc_feature (3030)..(3030): n is a, c, g, or t
  misc_feature (3032)..(3032): n is a, c, g, or t
  misc_feature (3034)..(3034): n is a, c, g, or t
  misc_feature (3037)..(3038): n is a, c, g, or t
  misc_feature (3041)..(3041): n is a, c, g, or t
  misc_feature (3043)..(3045): n is a, c, g, or t
  misc_feature (3047)..(3049): n is a, c, g, or t
  misc_feature (3051)..(3055): n is a, c, g, or t
  misc_feature (3057)..(3061): n is a, c, g, or t
  misc_feature (3063)..(3063): n is a, c, g, or t
  misc_feature (3065)..(3066): n is a, c, g, or t
  misc_feature (3068)..(3068): n is a, c, g, or t
  misc_feature (3075)..(3075): n is a, c, g, or t
  misc_feature (3077)..(3077): n is a, c, g, or t
  misc_feature (3079)..(3082): n is a, c, g, or t
  misc_feature (3086)..(3086): n is a, c, g, or t
  misc_feature (3088)..(3089): n is a, c, g, or t
  misc_feature (3092)..(3092): n is a, c, g, or t
  misc_feature (3094)..(3095): n is a, c, g, or t
  misc_feature (3097)..(3100): n is a, c, g, or t
  misc_feature (3103)..(3104): n is a, c, g, or t
  misc_feature (3106)..(3109): n is a, c, g, or t
  misc_feature (3111)..(3111): n is a, c, g, or t
  misc_feature (3113)..(3114): n is a, c, g, or t
  misc_feature (3116)..(3116): n is a, c, g, or t
  misc_feature (3118)..(3121): n is a, c, g, or t
  misc_feature (3124)..(3127): n is a, c, g, or t
  misc_feature (3130)..(3135): n is a, c, g, or t
  misc_feature (3140)..(3143): n is a, c, g, or t
  misc_feature (3145)..(3147): n is a, c, g, or t
  misc_feature (3152)..(3152): n is a, c, g, or t
  misc_feature (3156)..(3156): n is a, c, g, or t
  misc_feature (3158)..(3166): n is a, c, g, or t
  misc_feature (3169)..(3170): n is a, c, g, or t
  misc_feature (3172)..(3172): n is a, c, g, or t
  misc_feature (3175)..(3179): n is a, c, g, or t
  misc_feature (3181)..(3184): n is a, c, g, or t
  misc_feature (3187)..(3187): n is a, c, g, or t
  misc_feature (3189)..(3191): n is a, c, g, or t
  misc_feature (3193)..(3194): n is a, c, g, or t
  misc_feature (3196)..(3199): n is a, c, g, or t
  misc_feature (3203)..(3209): n is a, c, g, or t
  misc_feature (3211)..(3212): n is a, c, g, or t
  misc_feature (3214)..(3219): n is a, c, g, or t
  misc_feature (3222)..(3225): n is a, c, g, or t
  misc_feature (3227)..(3230): n is a, c, g, or t
  misc_feature (3232)..(3236): n is a, c, g, or t
  misc_feature (3239)..(3239): n is a, c, g, or t
  misc_feature (3242)..(3245): n is a, c, g, or t
  misc_feature (3248)..(3251): n is a, c, g, or t
  misc_feature (3253)..(3255): n is a, c, g, or t
  misc_feature (3257)..(3257): n is a, c, g, or t
  misc_feature (3259)..(3259): n is a, c, g, or t
  misc_feature (3261)..(3262): n is a, c, g, or t
  misc_feature (3264)..(3265): n is a, c, g, or t
  misc_feature (3267)..(3271): n is a, c, g, or t
  misc_feature (3273)..(3273): n is a, c, g, or t
  misc_feature (3278)..(3279): n is a, c, g, or t
  misc_feature (3282)..(3284): n is a, c, g, or t
  misc_feature (3287)..(3290): n is a, c, g, or t
  misc_feature (3292)..(3292): n is a, c, g, or t
  misc_feature (3294)..(3296): n is a, c, g, or t
  misc_feature (3298)..(3300): n is a, c, g, or t
  misc_feature (3302)..(3302): n is a, c, g, or t
  misc_feature (3304)..(3304): n is a, c, g, or t
  misc_feature (3306)..(3308): n is a, c, g, or t
  misc_feature (3310)..(3310): n is a, c, g, or t
  misc_feature (3312)..(3313): n is a, c, g, or t
  misc_feature (3318)..(3319): n is a, c, g, or t
  misc_feature (3321)..(3321): n is a, c, g, or t
  misc_feature (3323)..(3326): n is a, c, g, or t
  misc_feature (3329)..(3330): n is a, c, g, or t
  misc_feature (3332)..(3334): n is a, c, g, or t
  misc_feature (3336)..(3337): n is a, c, g, or t
  misc_feature (3339)..(3343): n is a, c, g, or t
  misc_feature (3345)..(3347): n is a, c, g, or t
  misc_feature (3349)..(3349): n is a, c, g, or t
  misc_feature (3351)..(3354): n is a, c, g, or t
  misc_feature (3357)..(3361): n is a, c, g, or t
  misc_feature (3363)..(3363): n is a, c, g, or t
  misc_feature (3367)..(3370): n is a, c, g, or t
  misc_feature (3372)..(3375): n is a, c, g, or t
  misc_feature (3377)..(3378): n is a, c, g, or t
  misc_feature (3380)..(3384): n is a, c, g, or t
  misc_feature (3386)..(3386): n is a, c, g, or t
  misc_feature (3388)..(3391): n is a, c, g, or t
  misc_feature (3393)..(3393): n is a, c, g, or t
  misc_feature (3395)..(3406): n is a, c, g, or t
  misc_feature (3408)..(3408): n is a, c, g, or t
  misc_feature (3410)..(3412): n is a, c, g, or t
  misc_feature (3414)..(3416): n is a, c, g, or t
  misc_feature (3419)..(3429): n is a, c, g, or t
  misc_feature (3432)..(3435): n is a, c, g, or t
  misc_feature (3437)..(3438): n is a, c, g, or t
  misc_feature (3440)..(3440): n is a, c, g, or t
  misc_feature (3442)..(3449): n is a, c, g, or t
  misc_feature (3451)..(3455): n is a, c, g, or t
  misc_feature (3457)..(3457): n is a, c, g, or t
  misc_feature (3459)..(3459): n is a, c, g, or t
  misc_feature (3461)..(3463): n is a, c, g, or t
  misc_feature (3465)..(3470): n is a, c, g, or t
  misc_feature (3473)..(3478): n is a, c, g, or t
  misc_feature (3480)..(3481): n is a, c, g, or t
  misc_feature (3483)..(3488): n is a, c, g, or t
  misc_feature (3490)..(3492): n is a, c, g, or t
  misc_feature (3494)..(3499): n is a, c, g, or t
  misc_feature (3501)..(3510): n is a, c, g, or t
  misc_feature (3512)..(3516): n is a, c, g, or t
  misc_feature (3518)..(3529): n is a, c, g, or t
  misc_feature (3531)..(3532): n is a, c, g, or t
  misc_feature (3534)..(3535): n is a, c, g, or t
  misc_feature (3537)..(3547): n is a, c, g, or t
  misc_feature (3549)..(3551): n is a, c, g, or t
  misc_feature (3553)..(3553): n is a, c, g, or t
  misc_feature (3555)..(3559): n is a, c, g, or t
  misc_feature (3561)..(3564): n is a, c, g, or t
  misc_feature (3567)..(3568): n is a, c, g, or t
  misc_feature (3570)..(3570): n is a, c, g, or t
  misc_feature (3572)..(3581): n is a, c, g, or t
  misc_feature (3583)..(3583): n is a, c, g, or t
  misc_feature (3585)..(3590): n is a, c, g, or t
  misc_feature (3592)..(3596): n is a, c, g, or t
  misc_feature (3598)..(3598): n is a, c, g, or t
  misc_feature (3600)..(3603): n is a, c, g, or t
  misc_feature (3605)..(3610): n is a, c, g, or t
  misc_feature (3612)..(3615): n is a, c, g, or t
  misc_feature (3617)..(3618): n is a, c, g, or t
  misc_feature (3620)..(3620): n is a, c, g, or t
  misc_feature (3622)..(3636): n is a, c, g, or t
  misc_feature (3638)..(3639): n is a, c, g, or t
  misc_feature (3641)..(3642): n is a, c, g, or t
  misc_feature (3644)..(3644): n is a, c, g, or t
  misc_feature (3646)..(3647): n is a, c, g, or t
  misc_feature (3649)..(3655): n is a, c, g, or t
  misc_feature (3657)..(3660): n is a, c, g, or t
  misc_feature (3662)..(3665): n is a, c, g, or t
  misc_feature (3667)..(3667): n is a, c, g, or t
  misc_feature (3670)..(3675): n is a, c, g, or t
  misc_feature (3679)..(3681): n is a, c, g, or t
  misc_feature (3683)..(3687): n is a, c, g, or t
  misc_feature (3689)..(3693): n is a, c, g, or t
  misc_feature (3695)..(3699): n is a, c, g, or t
  misc_feature (3701)..(3709): n is a, c, g, or t
  misc_feature (3711)..(3715): n is a, c, g, or t
  misc_feature (3717)..(3721): n is a, c, g, or t
  misc_feature (3723)..(3733): n is a, c, g, or t
  misc_feature (3736)..(3736): n is a, c, g, or t
  misc_feature (3739)..(3742): n is a, c, g, or t
  misc_feature (3746)..(3750): n is a, c, g, or t
  misc_feature (3752)..(3758): n is a, c, g, or t
  misc_feature (3760)..(3760): n is a, c, g, or t
  misc_feature (3762)..(3763): n is a, c, g, or t
  misc_feature (3766)..(3769): n is a, c, g, or t
  misc_feature (3773)..(3776): n is a, c, g, or t
  misc_feature (3779)..(3783): n is a, c, g, or t
  misc_feature (3785)..(3785): n is a, c, g, or t
  misc_feature (3787)..(3790): n is a, c, g, or t
  misc_feature (3793)..(3796): n is a, c, g, or t
  misc_feature (3798)..(3805): n is a, c, g, or t
  misc_feature (3808)..(3815): n is a, c, g, or t
  misc_feature (3817)..(3819): n is a, c, g, or t
  misc_feature (3821)..(3832): n is a, c, g, or t
  misc_feature (3834)..(3839): n is a, c, g, or t
  misc_feature (3841)..(3856): n is a, c, g, or t
  misc_feature (3858)..(3858): n is a, c, g, or t
  misc_feature (3860)..(3873): n is a, c, g, or t
  misc_feature (3875)..(3879): n is a, c, g, or t
  misc_feature (3881)..(3886): n is a, c, g, or t
  misc_feature (3888)..(3888): n is a, c, g, or t
  misc_feature (3890)..(3892): n is a, c, g, or t
  misc_feature (3894)..(3897): n is a, c, g, or t
  misc_feature (3901)..(3902): n is a, c, g, or t
  misc_feature (3906)..(3907): n is a, c, g, or t
  misc_feature (3910)..(3912): n is a, c, g, or t
  misc_feature (3914)..(3931): n is a, c, g, or t
  misc_feature (3933)..(3937): n is a, c, g, or t
  misc_feature (3940)..(3944): n is a, c, g, or t
  misc_feature (3947)..(3956): n is a, c, g, or t
  misc_feature (3958)..(3958): n is a, c, g, or t
  misc_feature (3960)..(3965): n is a, c, g, or t
  misc_feature (3967)..(3975): n is a, c, g, or t
  misc_feature (3977)..(3978): n is a, c, g, or t
  misc_feature (3980)..(3981): n is a, c, g, or t
  misc_feature (3987)..(3992): n is a, c, g, or t
  misc_feature (3996)..(4000): n is a, c, g, or t
catcgcataaggcgacaaacgctgtgcaccacgatantcacgacccgtaccatatggcaggaagttatattcgtatgcaaagcctacatcaaccaatgaattgtcgaatgtatagggagcngaggcaaaacgtggatagtaagtcttgacatcagccgatgaacctttcatctttccaaacgatacgttcatctttaatcccatataaggactgagattatatcttgccagcaccgttcccatcggctgtaggtctttaaacaacgactcgttaaagtcgcctaagtaacccatcataccaacaccggcgcctatctccatcttatactccggatccgactgcgcccatagaggcgtagcagcaaggaaaaggaggaggttgatgaagatacgtttcattgttgtcctgtttgaatagcttattcagccaatcgactaaggttcaatgcccagcctactcgattgagtctaccacgccaaacctttgtaccactgattacccagaggtattcgtcgctatcaactgttgctgcaaaagctgttgcagcctgtacacctgttggataagtgaagctcttatcactcttccatgtgataccnccatcacgagagagaagcatagaagccaacttaccactgctattaagacctaatgcaagggctgccttatcatagtttacaactgaaagactcttgtaaagagggagctggaacttgtcagcattgctctctacataactccactgctcattctgacgataagaaagtttcgtccatgcagcattctttgtaccgcttgccagtgtaccaacaagcagtacgcgatacaagtcagatgaaactgctgtaagtgaagaaccaatattgcttactggaaggagtgaagcattgctatctaatgactcgttagnccaagtaacaccattgttctttgaagccaacaacgtacctgacgttgatagcgcaaacaactctgctggtgacgctgccaccaactgcttcaaactgctatttgtagccactgtagtccaactgctgccgtctgtagagctataaaccgtaccattgtcgataacgaagagcttagtaccctgcactgccacactcttataagcatttgcagtgaaggtcttgctgagctttgtccagctgttgccattgtcctttgacgcngcataaacaacagtctgactgccattcgttccgaatacaaacaccttgctacccgcactaacagccttcattgctgtgaacgaagcgaaattgctgttcgcctgcagtgcctgccagctaaacacgttgcccttctgcttgtgaacattcacagaaaccttgtaatctctgtactcacttcccttgtttgagtaaacacggaaaacgcgtggagtgctnaagtcaatagaatcattactgctgtaataagtgaacttctcctctgtagttgacttgataacaacagttccgctattctttgccacaatcttagccaaagcacttgctggctttgtaccatatggcaaagagtcaggattataaatcaaaccctgtgcctgatcgatatagaacttaaccttagcaccattgaagttgctaacataagtactatcgctaccattcttggcaacggtatcacgcacttgctttaattgtcccaaagaaaagctcaaaatagccgtgtctttgtaacttacactatttttctcgtcgtcgtccttaagacaagatgttattgtcaaagtagccaccattaaagctacgagagtatatatcttattacgcatcagatactaataattgaatttagctgcaaatttaatcagaattcttcagaatcaacgtctttaacgaggttaattatgtaaaatatcgaaaataactgcgtttttttaagtttgtttagtaagtattgccaaagtaacgataaacttgaagaaaaatgacctataaatcacatctgataaacttctgctatcttccttaccttcacntgaacttttcnactganactattgtcttttcacacgccttttctcgacttaaaaccttatcattcttctacttttctacgcctttatttgtctacttattttacattacatcacactaccatttgccctcattgcgaaaaaaaatcgtataagaagcaaaaaagaccctaacaatactgagaagtgttttttatttgttacttttgctgatataataactaaaaatatgaatacatcaaagaagataacngtacagagtacagaaatatctgtgctgataggaaannanannnacnacnntnncntnnnannnatnnnanannnnnnanannangnaannnnnnnntannnnannnngnacngnnnangnacaannnncanaatnnnanannnnggngnanggnnnnannntnanaannntaattntnnnnnnnccgnnnnnnntnnnnnnannnntngnnnannnntnnncnnnttnacnntaanngnnnngnaannganacaaaagncaanngnnntangtnnnannncnnangntnnnnggnannntnnnnctnacnnnnacanggntntnnnntttnnttttggnatnngnctaannncnanattnnaantttananngnaaannannnnnannngnnaaaagaannaganngcnntccgntnnngtnanagnnnaangnaaancnannannanccaanannaantntanacntnatnctnntnnnannnnaannntnnttannnnnaaaatnnannttannnnnannnagnntnnnattnnnnnngnancngaanntnanatnntaantntnnttnnntttnnnnnnaaagnannngnnnnggctnanncnaannngnatttnnnannnaaannnntaaannnnanngaaacnncaancannnannagttantantantatnnaatnnggnanntnctaantnnnaaangananngnaannngnannnanannnnnnnnntttnnnattnnnnnnnaaanggnaaannaanagttannngnannnnanannaanaanananaannaanannnannnannnnntnnnnnanannanaaagaananannnnaatnannatngnnannnnttnnannnntnannantnnnnttnnnnttnnnnnnctacnnnnannnaaatnaatntnnnnnnnnnctnntnctnnnnntnnnngtnannntnntnnnncctnnnnnnncnngnnnnnngcnnnngnnnngnnnnngcngannnngannnngnnngntncnnannannnnncncattnnccnnnatnnnnantnnnannntnanannnanannaaaannanannnnaanncnnnannannnnnannnanannnngannnnnanggannnngnnnntnnannnnnanannnntntnnnnnnnnnnnnantnnnannnatnnnnnnnnnnntannnntnngncnnnnnnnnannnnnananannnannnnnnggnnnnnnannannnnnnannnannnnnntnnnnnnnnnnannnnnannnnnnnnnnnnanngnnannnnnnnnnnntnnnantnnnnntnnnnatnnanannnnnnnnnntnannnnnnannnnnantnnnnannnnnncnnnncnncncnnnnnnnnnnnnnnncnncnncncnncnnnnnnntnnnntnnnncnccnnnnnntctnnntnnnnntnnnnntnnnnntnnnnnnnnntnnnnntnnnnntnnnnnnnnnnnaanaannnnaaannnnnannnnnnntntnnatnnnnaaannnnaannnnnanannnnaannnnannnnnnnnaannnnnnnntnnntnnnnnnnnnnnnannnnnnannnnnnnnnnnnnnnntnannnnnnnnnnnnnnannnnnannnnnnanannnannnnaaannaaanntannntnnnnnnnnnnnnnnnnnntnnnnnttnnnnntannnnnnnnnntntnnnnnntnnnnnnnnnannannaaaaannnnnncccnnnnn

SEQ ID NO: 229 - DNA, 4000 bp, Escherichia coli
  misc_feature (1)..(6): n is a, c, g, or t
  misc_feature (10)..(11): n is a, c, g, or t
  misc_feature (15)..(17): n is a, c, g, or t
  misc_feature (474)..(474): n is a, c, g, or t
  misc_feature (579)..(579): n is a, c, g, or t
  misc_feature (586)..(586): n is a, c, g, or t
  misc_feature (591)..(591): n is a, c, g, or t
  misc_feature (600)..(600): n is a, c, g, or t
  misc_feature (654)..(654): n is a, c, g, or t
  misc_feature (719)..(719): n is a, c, g, or t
  misc_feature (724)..(725): n is a, c, g, or t
  misc_feature (746)..(746): n is a, c, g, or t
  misc_feature (748)..(750): n is a, c, g, or t
  misc_feature (761)..(761): n is a, c, g, or t
  misc_feature (782)..(782): n is a, c, g, or t
  misc_feature (788)..(788): n is a, c, g, or t
  misc_feature (797)..(797): n is a, c, g, or t
  misc_feature (806)..(806): n is a, c, g, or t
  misc_feature (881)..(881): n is a, c, g, or t
  misc_feature (887)..(887): n is a, c, g, or t
  misc_feature (964)..(964): n is a, c, g, or t
  misc_feature (1262)..(1262): n is a, c, g, or t
  misc_feature (1265)..(1265): n is a, c, g, or t
  misc_feature (1334)..(1334): n is a, c, g, or t
  misc_feature (1385)..(1385): n is a, c, g, or t
  misc_feature (1397)..(1397): n is a, c, g, or t
  misc_feature (1652)..(1652): n is a, c, g, or t
  misc_feature (1655)..(1655): n is a, c, g, or t
  misc_feature (1691)..(1691): n is a, c, g, or t
  misc_feature (1739)..(1739): n is a, c, g, or t
  misc_feature (1956)..(1956): n is a, c, g, or t
  misc_feature (1962)..(1963): n is a, c, g, or t
  misc_feature (1973)..(1973): n is a, c, g, or t
  misc_feature (1977)..(1978): n is a, c, g, or t
  misc_feature (1980)..(1981): n is a, c, g, or t
  misc_feature (1984)..(1984): n is a, c, g, or t
  misc_feature (1986)..(1987): n is a, c, g, or t
  misc_feature (1992)..(1992): n is a, c, g, or t
  misc_feature (2025)..(2025): n is a, c, g, or t
  misc_feature (2063)..(2063): n is a, c, g, or t
  misc_feature (2114)..(2114): n is a, c, g, or t
  misc_feature (2230)..(2230): n is a, c, g, or t
  misc_feature (2235)..(2235): n is a, c, g, or t
  misc_feature (2426)..(2426): n is a, c, g, or t
  misc_feature (2516)..(2518): n is a, c, g, or t
  misc_feature (2660)..(2660): n is a, c, g, or t
  misc_feature (2666)..(2666): n is a, c, g, or t
  misc_feature (2694)..(2694): n is a, c, g, or t
  misc_feature (2723)..(2723): n is a, c, g, or t
  misc_feature (2732)..(2732): n is a, c, g, or t
  misc_feature (2750)..(2751): n is a, c, g, or t
  misc_feature (2781)..(2781): n is a, c, g, or t
  misc_feature (2829)..(2829): n is a, c, g, or t
  misc_feature (3450)..(3450): n is a, c, g, or t
nnnnnngccnnccannntgtagcgcgacaaaatttttgagaaactcggacagcgaaaatgagaaaaaatagcggatttcttagaagtaattctaagcccgcccgcttgcggcgacggcccccagaatggggagcggcccccgcaggagggcgggcgttatagggcccccggagaagcggcacacgccgccctccggggccgttttcattgtgggtggccggttactcgccctcgggctccccgggcccgtcctgggcttcctggggggcttcctgggccggttccggctcctggtattcctcccagccgtaaacgcccggctcccagacgttggaggctgcgctggagacccacctcttgccgttgtgggtcaccttcgccccctggtcgtaggcgtcatgcgccccgataggctgaatccactccgggaactcctccagggggttgccgatgcgcgtccacatggagggcgtngccgagggcttggtattctggccagcgtccttgacgtcgtggatggagcgatagagctggccctcgtcctggacgatgtcgcccgccttgccccgccagttttcntcccacngggtnaagaggtcngggtactcggagatcgttgtctcgtcgagctgctgctcctgggccatcttgacnaacatgatctccgcgacggcctgggcggagctgctccggcgagccgcccggttcaattccccganagacnncttcggggtcagatactgcangnnnctcattcgtangcacctccaaagccagaaatngaaacntcgccctcntagccctcnttcttggtgatggtgaagcggatgttgacgccccacttgtccgccgtcttggtcttgttggtgaagttatagacncggttnatcgccaccatgggggtgatgtcctcccaggtgggctcggcgtcgaaggcgttgttacaagcctccaccagagccgncgcgccctcgatatgccatgtcggggtgaccagcaccttggatgcggcctcgtccgtctcctccggctcattgagctggaaacagatgacgctctccttcttggagaatgtccagacccgcaccgaggtggcgaagttgccgtccacggcctccacccggagctggtggttgccattggtaagcatgagccacctctcccgagtgagctcgatggtctcctcttgccccagggtagcctgatagctcctgatctgcacgtcgtccacgaactcggtgacgaccacgttgtcgccctcnatntcggtgacggtgtacttctcggcgaagctgcctgtcttgtggcccagggccatatcctggccggagatngccggtgcgctgttggtgcgtttgaaggtgagcctccggtagctggtgccncccttgccgtcngtgaccatgatggtgatggtgttgacggagttgaggtcgagggtgtagagcttctcagaggtgatcgccacgccaaggggctcgcccttgggggcgttgttgatcgtgcggatggtctcatcgttgagctgctccgtcacggtgagggtgtcgccgtccgcgtcgttgacggtataatcgtaggtgaagcccaggtttttatctcccaggttgccatcgacgccgctgatggtgggtgcgctgttggttctggtnaangtccacgtcctggtggccgtcccgcccttgccgtcngtgaccacgaccttcacggtatgcgtcccaagggacaattcatcgacngggacggaaatggtatatacaaaatttcgcgtcgggccgaacgacttcgtcgttcggccatcgatcgactccgtcgccgttagcacgtcgccggagtcggggtcgtcgacgctgtactgtatcgtgaagttggtgttcttatcacccagattgcggtcactgtcagagatcagagggtcagtgttcaggatttcaaggacggggcgaaaaccgacgnacacgnnccgatacgtngcanngnngtngnnccagnagcgggccgacacccagccgcgaaccgcacgantcgacgaatttccagaatatacctcttgacaccaagantagcagcccatccaattccagaactgattgtgggcactcgtcttgtcggcngcggcgagggaggcgtccaggtcggacgatgtgggggccgggaggccggtgataacctcctcgcgggtgatgaacctgtcccactcgttattggtgggcgagcctcccgcatatgngtcgnttcccctataagtgctgccacccgtcagaacgcggcacttataggtcgccccgtcgatggtgacggtcttgccggtgatgtagccctgttcgttcagatcgttccaggaaacagagaccaggatgttccggtcgcagatcaggagggtcttgctgccgtccttgatcttgtgccactggagcttgttggcntccgctgccggggtgctgccgagtgtgtagtttgccatgctcccgctcatttgcgggatgtcgccgacgccgcagccgctatacggctcnnngtcaggacgccagggctttgtgggccttttcagtatcgtaccgttgttgtaaaatccgccgagcttgacgaggccgagatattgcgccataaggtagctctccttccactttgatgaagcggtagggcgcgaatatcttcgncgccanattgtaggcacttgcccagcgggcaaanccgagccaggagttgacttcttgctgtanctccttgcncgtcttcttgccctcccnnagcttcgcaatcatagccttgacccgtcgnttctgcttccgcttggattgcgtccgaagctccaggtgcgtggctttnattttgtagccgtaggcgttcacgccctgccgcaaatagaatattttcgtcttgctgttgagatcaagatgcagcttgtctttgacgaactgcttgatcttcgcaagccactccctcgcggtctctttgttcggcgcaatgatgacggcgtcgtcggcgtatcgcctatagagctttgccccgaggaagcggatgcagaactgatcgagctcattgagggtaatatttgcgaagtcctgggagctgacattccccagggggacgcccttttctccttcagggctggagtcgatcactttgcaaagaaggcgataaaagcggaggaggtcttcgtaacgctccgggtgcttctttcgtagcttcttgaaccgcttcgccaggagccttttcaagacttggcggtcgatagaatagaaaaactttttcacgtcgatctttatgacggcagcttcgtcgccccacttcatccgggcgaccctcatgtcgtgctgcacatccagcgcggcccggatgggccctttcccgtaaagacacgcataggagcggtctacaaatacgggccggtagatgtcctgcaaggcttcatggacggtagtctgcacgatcttgtcccggagcttnggaatgtggaggctgcgctcctttggctccgtgatcgtcctgtgacgataggagccagggatatactccttctttcgttgatctgggtctggccgcgctttgatcgccgtgagctcacgccatagttggacattattcacttcggagaagaggtcgtataagaccgcctcccgagtgtatttccgctgccctcggagcgcgtttttatagctggccccgatagtatcccacccaaccatctcctcgtatggtctgagcggcataattggcggaattatagggtgcttgaccttctgcgctgtctttactaaaatggggaatttcgtcattgtggcatcctttccttttgagaacggcttggcacctatgacgcgggttgttacccacattgtagacctccccccaccttcccaatacgagagggccgggcagagcttggtcactgtttttacgccgtcaaagacaaggcgaaggattacctctcccttgaagtataacaaggactcgccagtaaagccgtagccgtaccagacgaaataaacctacaagg

SEQ ID NO: 230 - DNA, 4000 bp, Escherichia coli
  misc_feature (316)..(316): n is a, c, g, or t
  misc_feature (439)..(439): n is a, c, g, or t
  misc_feature (2349)..(2349): n is a, c, g, or t
tccgcagacgacgatgcgcggattcgcgataccaaattttgcagtgagatcggcgtcgagaatgtcgattatctgcgtgagggactcctgcgtgattgctgcaggcacctcggcgagcggaagatgagtagtcgccaaggccacgcgaagaccttcggttgcgagcatcataacagtcaggtcacagccgcagcgctctgctagaaattcggtatggccgctaaatgctatgcctgagtcattgataacacctttgtgcacggggcctgtgacaaaggcatcgaagtcgccggcaagggttgcatcggttgcaatncgcagtgtctctaaaacgtaagcagcgttacgacggtcgagttctcccgcgtgcacagggacgattaacgacacgggtaaaatgctcaaagtgccgggttgggtagggcgctcaggcgtcgangcgtcgaaagggaagagcgttaggcttaaaccaagatcggctgcgcggtcgcgaaggagttgtggatcggcgacaacaaccagctctgtgtcagcaggcggctgctgacagagctgaatgcaaagatcggggccaatgcccgcgggctcccccggggtgagcgcgattcgttgagtcacttaggcgctccaaactagtcgattaactcgacgaaggcgtcttcgcgaatttcgataagccagttctcgagttcgagctcgaactttcgattgcgcagcgcgttagccgcttgattgcgcgtgaactcgcggctgaggtcttgcaaacggcgaccttcgacacgggcaacgtgccagcctacctgagagcgaaaaggctcgcttacgccatcgatttcgagtgcatcaactacctgttccatctcgggcggcatgccgccttcgtttacccagtcgaggtcaccgccgcccacgaccgacgacgcgtcgtcggaattttggcgcgcaattgttgcaaagtcttcgccgtcgaggatgcgctggtgaattttgcgggcttcggcttctgtctgctcctcgtttcggatttcgtttggcgacagcatgatatggcgcacgcgagtctgatttacaaactgctcagtacctccctgcatgtcaacgagctggattatatgcaggccattgcctgcctcgataggcccctcgacttggcctatttccatgtcgaccacgatgtcggcgaaaaggctcggcagctgtttggctttgcgccagcccaattcggcgccgccgatttcgatcgcggtattctgccgtgctgcggcgcgtgccgcagcaagcgggaaatcatcgtcgatgcgggagattaaatcagccgcaaggcgctgcttctctgctttgatttcaggggtatcggcagcgctgaacgggataagcagatcgtcgacaaagtagtcggctgccatcagttcgcgccccatttcggagttaaggaaattgtcgatttcttgctctgtaattttgatgcggcgattaaccatcccgcgctgcaattcttgcatggtcatctgcttgcgtacttgctcgcgagtttgcagatagacgccgttttcttcgagcgcatcgacatactgatcgaaggtgaggttattgttgcttgccatattgccgagcacgcgattgatcgtgtcatcgtcgtagcggatgctgacgcggttagcgagttgcatctgaatattctcaacgatgagcgcctccattatgtcggattcgaactgctctaggtcgtctggcagcggctggccattgcgctgcgctgccgccgtaatttcgacaatgcgctcatcgagttcactttttagcactacgtcgtcgtcgacaatggcgataattttgtcgagcagcacacgctgcgcactcgcgaaaggtgcagcgagaagcaggaggagaagcgcgccaataacgaagaggacgcggcgattcacattgttatcattcatagggtaaccatttgtaaagtagtctcgcaggctttctgatctcgtaggcagcctagtgtaccgtattggcggttgctacgcggccgcaatttagcgctcagcgtcgtagccttgaatcccttcggtgagaaggctgtctaggccgccgcctgtgaggttgcctaagcctactaaggtgaactgaacgaaaacgccgcggttgggctcaaaattgcgcacaaacagctcgttttcgttaatccattcgcgggcaactaggcgaattttcgcacagcagttgctgtattcgaccccggcaaagctctctaggttccgcgcattgctgtgatcgtagttccagcgcgccagtatcttccaatttgtcgcgagaggccagactgccgaaaaatcggtctgccgtatatgcggntcgattgcgccatctatcgctggcggcaacacgagattcggcgagctgacgaggttgcgctcgcggtaggcaaggttaactaagtgcgacgcgtcgcggcggtagcgaacctgcgcgcgtccttcgatcacctgctgtgtctcctcgtcccactgcacatcggtaatgaagcgccagcggtcgtttggtgcgtaaaaggcctcggcggcgatggctgagccgtcggcagtggttgagtaacgtggcgcccagttttggagaggattggcgaggtcaacgaggcgatcttcaaagtaggttatctgacccaggcttgcgcgggcgcgctcgcggcctgtgttgtcgagcagtcttgtggtaatcgctgcacttacttgtcgggcgttgcttaccctatcgccgccggcgaagcgctcgtcgcgaaacagttgggcgaaactaaaattgagttcggacgagtcgaagagcgggatgtcgccttgctcagcaaagccactgtcgagagcgaaaatgcgtggctctagtgtctgtgtccaaccctttcgcgtggcgcgttcgaaaataaggccggtgtcgaggctattcaccgacacgccgaagtcgggtgcctcggccgtgccaagcgcctgtttgtcgaggctgtagctacgctgcagatatttgcttttggcgcgaacaaaccagcccgggcgctcgatgctccagcttacctctggttcgagattcactcgggtgccggtaacaagggctccggcatcgattttggcttggcttagcaatccttcttcgagggtgcgatcgaaggctgttgcctcgcctgcaaaggctgctcggaaaccggcgccaagggggatctgtgaagccagtgtgaactgaggtaagcgatcgaagggcttgttaatgtcgagcgctgcggcaaacggatcgataatctgcaggcgttgggcattaatccccgcgcgcagatagtcgtttctgaaatctatgcgagcctggcgattgaggtgtgtttggctagaaagattgaggccgccgttaccaaaatcgaagaaatagtcattgtcgctcaccgcattatagtcgacataagttgagaatccgcgaccaaaacgtccctgatgctcgaagccaacaaaccatcgatcttcttgcgagggtgactccgaaccgagggtgtcggcggtggcggggtcgaagaatttatcgccggccaaatgcgagacgttgagagtattcatcgacgtttcggcgagataacggaactcagctccaagcattacgccacgatcgctcagcaggcgcgggcttaatgtcgcatccatctgtggcgcgagattaaggtagtaaggcacctcgatatctactccgccggtacggctagagccaatactgggcggcaatagtccgctgaggcgttgatcgccgatggggaactgcaccgtgccagggtaataaaaaaccggaatatcgcgaatgcgcaggctcatcgccttcgcacgaccgcggccgattgcttgatcgagttcgaaggcgttcgcacgcagcacccaaaactcattgcctggctcgcagcggctaaattcgccgttgtcgagcatgatgaggccggtggctgagtcgtagtcgattgtctgcgcagcgccatgaatgc

SEQ ID NO: 231 - DNA, 4000 bp, Escherichia coli
  misc_feature (1)..(463): n is a, c, g, or t
  misc_feature (514)..(520): n is a, c, g, or t
  misc_feature (522)..(524): n is a, c, g, or t
  misc_feature (526)..(528): n is a, c, g, or t
  misc_feature (532)..(534): n is a, c, g, or t
  misc_feature (536)..(536): n is a, c, g, or t
  misc_feature (539)..(540): n is a, c, g, or t
  misc_feature (542)..(546): n is a, c, g, or t
  misc_feature (548)..(550): n is a, c, g, or t
  misc_feature (552)..(562): n is a, c, g, or t
  misc_feature (564)..(566): n is a, c, g, or t
  misc_feature (568)..(571): n is a, c, g, or t
  misc_feature (573)..(573): n is a, c, g, or t
  misc_feature (576)..(579): n is a, c, g, or t
  misc_feature (581)..(581): n is a, c, g, or t
  misc_feature (583)..(583): n is a, c, g, or t
  misc_feature (585)..(590): n is a, c, g, or t
  misc_feature (592)..(607): n is a, c, g, or t
  misc_feature (609)..(609): n is a, c, g, or t
  misc_feature (613)..(614): n is a, c, g, or t
  misc_feature (616)..(617): n is a, c, g, or t
  misc_feature (619)..(619): n is a, c, g, or t
  misc_feature (622)..(622): n is a, c, g, or t
  misc_feature (625)..(625): n is a, c, g, or t
  misc_feature (627)..(633): n is a, c, g, or t
  misc_feature (635)..(635): n is a, c, g, or t
  misc_feature (638)..(643): n is a, c, g, or t
  misc_feature (645)..(650): n is a, c, g, or t
  misc_feature (652)..(654): n is a, c, g, or t
  misc_feature (657)..(662): n is a, c, g, or t
  misc_feature (666)..(666): n is a, c, g, or t
  misc_feature (668)..(669): n is a, c, g, or t
  misc_feature (671)..(672): n is a, c, g, or t
  misc_feature (675)..(677): n is a, c, g, or t
  misc_feature (679)..(679): n is a, c, g, or t
  misc_feature (681)..(685): n is a, c, g, or t
  misc_feature (687)..(689): n is a, c, g, or t
  misc_feature (691)..(691): n is a, c, g, or t
  misc_feature (905)..(908): n is a, c, g, or t
  misc_feature (911)..(912): n is a, c, g, or t
  misc_feature (915)..(919): n is a, c, g, or t
  misc_feature (921)..(921): n is a, c, g, or t
  misc_feature (923)..(927): n is a, c, g, or t
  misc_feature (929)..(930): n is a, c, g, or t
  misc_feature (933)..(933): n is a, c, g, or t
  misc_feature (935)..(935): n is a, c, g, or t
  misc_feature (937)..(941): n is a, c, g, or t
  misc_feature (945)..(949): n is a, c, g, or t
  misc_feature (951)..(956): n is a, c, g, or t
  misc_feature (958)..(960): n is a, c, g, or t
  misc_feature (962)..(969): n is a, c, g, or t
  misc_feature (971)..(971): n is a, c, g, or t
  misc_feature (973)..(974): n is a, c, g, or t
  misc_feature (977)..(979): n is a, c, g, or t
  misc_feature (982)..(982): n is a, c, g, or t
  misc_feature (984)..(984): n is a, c, g, or t
  misc_feature (986)..(987): n is a, c, g, or t
  misc_feature (990)..(992): n is a, c, g, or t
  misc_feature (994)..(1000): n is a, c, g, or t
  misc_feature (1002)..(1007): n is a, c, g, or t
  misc_feature (1009)..(1010): n is a, c, g, or t
  misc_feature (1012)..(1013): n is a, c, g, or t
  misc_feature (1015)..(1015): n is a, c, g, or t
  misc_feature (1017)..(1021): n is a, c, g, or t
  misc_feature (1023)..(1026): n is a, c, g, or t
  misc_feature (1028)..(1032): n is a, c, g, or t
  misc_feature (1034)..(1035): n is a, c, g, or t
  misc_feature (1037)..(1042): n is a, c, g, or t
  misc_feature (1044)..(1047): n is a, c, g, or t
  misc_feature (1050)..(1052): n is a, c, g, or t
  misc_feature (1054)..(1056): n is a, c, g, or t
  misc_feature (1058)..(1061): n is a, c, g, or t
  misc_feature (1063)..(1063): n is a, c, g, or t
  misc_feature (1065)..(1068): n is a, c, g, or t
  misc_feature (1070)..(1070): n is a, c, g, or t
  misc_feature (1075)..(1080): n is a, c, g, or t
  misc_feature (1082)..(1089): n is a, c, g, or t
  misc_feature (1093)..(1094): n is a, c, g, or t
  misc_feature (1096)..(1097): n is a, c, g, or t
  misc_feature (1100)..(1104): n is a, c, g, or t
  misc_feature (1106)..(1106): n is a, c, g, or t
  misc_feature (1109)..(1111): n is a, c, g, or t
  misc_feature (1113)..(1114): n is a, c, g, or t
  misc_feature (1116)..(1117): n is a, c, g, or t
  misc_feature (1119)..(1121): n is a, c, g, or t
  misc_feature (1123)..(1124): n is a, c, g, or t
  misc_feature (1126)..(1128): n is a, c, g, or t
  misc_feature (1130)..(1132): n is a, c, g, or t
  misc_feature (1134)..(1137): n is a, c, g, or t
  misc_feature (1139)..(1145): n is a, c, g, or t
  misc_feature (1148)..(1152): n is a, c, g, or t
  misc_feature (1157)..(1159): n is a, c, g, or t
  misc_feature (1161)..(1162): n is a, c, g, or t
  misc_feature (1164)..(1165): n is a, c, g, or t
  misc_feature (1167)..(1168): n is a, c, g, or t
  misc_feature (1171)..(1172): n is a, c, g, or t
  misc_feature (1174)..(1174): n is a, c, g, or t
  misc_feature (1176)..(1178): n is a, c, g, or t
  misc_feature (1180)..(1181): n is a, c, g, or t
  misc_feature (1183)..(1183): n is a, c, g, or t
  misc_feature (1185)..(1185): n is a, c, g, or t
  misc_feature (1187)..(1188): n is a, c, g, or t
  misc_feature (1191)..(1203): n is a, c, g, or t
  misc_feature (1205)..(1209): n is a, c, g, or t
  misc_feature (1211)..(1213): n is a, c, g, or t
  misc_feature (1215)..(1216): n is a, c, g, or t
  misc_feature (1218)..(1221): n is a, c, g, or t
  misc_feature (1223)..(1223): n is a, c, g, or t
  misc_feature (1225)..(1226): n is a, c, g, or t
  misc_feature (1228)..(1228): n is a, c, g, or t
  misc_feature (1231)..(1232): n is a, c, g, or t
  misc_feature (1234)..(1234): n is a, c, g, or t
  misc_feature (1237)..(1238): n is a, c, g, or t
  misc_feature (1240)..(1240): n is a, c, g, or t
  misc_feature (1242)..(1243): n is a, c, g, or t
  misc_feature (1246)..(1246): n is a, c, g, or t
  misc_feature (1248)..(1250): n is a, c, g, or t
  misc_feature (1252)..(1252): n is a, c, g, or t
  misc_feature (1254)..(1259): n is a, c, g, or t
  misc_feature (1261)..(1274): n is a, c, g, or t
  misc_feature (1276)..(1290): n is a, c, g, or t
  misc_feature (1292)..(1292): n is a, c, g, or t
  misc_feature (1294)..(1297): n is a, c, g, or t
  misc_feature (1299)..(1299): n is a, c, g, or t
  misc_feature (1301)..(1302): n is a, c, g, or t
  misc_feature (1304)..(1312): n is a, c, g, or t
  misc_feature (1315)..(1315): n is a, c, g, or t
  misc_feature (1317)..(1325): n is a, c, g, or t
  misc_feature (1327)..(1333): n is a, c, g, or t
  misc_feature (1335)..(1340): n is a, c, g, or t
  misc_feature (1342)..(1344): n is a, c, g, or t
  misc_feature (1346)..(1348): n is a, c, g, or t
  misc_feature (1351)..(1354): n is a, c, g, or t
  misc_feature (1356)..(1358): n is a, c, g, or t
  misc_feature (1360)..(1366): n is a, c, g, or t
  misc_feature (1368)..(1379): n is a, c, g, or t
  misc_feature (1381)..(1381): n is a, c, g, or t
  misc_feature (1385)..(1392): n is a, c, g, or t
  misc_feature (1394)..(1394): n is a, c, g, or t
  misc_feature (1396)..(1401): n is a, c, g, or t
  misc_feature (1403)..(1408): n is a, c, g, or t
  misc_feature (1410)..(1412): n is a, c, g, or t
  misc_feature (1415)..(1416): n is a, c, g, or t
  misc_feature (1419)..(1419): n is a, c, g, or t
  misc_feature (1421)..(1422): n is a, c, g, or t
  misc_feature (1426)..(1427): n is a, c, g, or t
  misc_feature (1429)..(1433): n is a, c, g, or t
  misc_feature (1436)..(1436): n is a, c, g, or t
  misc_feature (1438)..(1438): n is a, c, g, or t
  misc_feature (1440)..(1440): n is a, c, g, or t
  misc_feature (1442)..(1448): n is a, c, g, or t
  misc_feature (1450)..(1452): n is a, c, g, or t
  misc_feature (1454)..(1455): n is a, c, g, or t
  misc_feature (1459)..(1460): n is a, c, g, or t
  misc_feature (1463)..(1463): n is a, c, g, or t
  misc_feature (1465)..(1468): n is a, c, g, or t
  misc_feature (1470)..(1471): n is a, c, g, or t
  misc_feature (1473)..(1473): n is a, c, g, or t
  misc_feature (1475)..(1491): n is a, c, g, or t
  misc_feature (1493)..(1494): n is a, c, g, or t
  misc_feature (1496)..(1496): n is a, c, g, or t
  misc_feature (1498)..(1499): n is a, c, g, or t
  misc_feature (1503)..(1507): n is a, c, g, or t
  misc_feature (1509)..(1509): n is a, c, g, or t
  misc_feature (1512)..(1523): n is a, c, g, or t
  misc_feature (1525)..(1527): n is a, c, g, or t
  misc_feature (1531)..(1538): n is a, c, g, or t
  misc_feature (1540)..(1540): n is a, c, g, or t
  misc_feature (1542)..(1552): n is a, c, g, or t
  misc_feature (1554)..(1559): n is a, c, g, or t
  misc_feature (1561)..(1561): n is a, c, g, or t
  misc_feature (1563)..(1565): n is a, c, g, or t
  misc_feature (1567)..(1570): n is a, c, g, or t
  misc_feature (1574)..(1576): n is a, c, g, or t
  misc_feature (1578)..(1580): n is a, c, g, or t
  misc_feature (1582)..(1582): n is a, c, g, or t
  misc_feature (1584)..(1594): n is a, c, g, or t
  misc_feature (1597)..(1598): n is a, c, g, or t
  misc_feature (1600)..(1612): n is a, c, g, or t
  misc_feature (1616)..(1619): n is a, c, g, or t
  misc_feature (1621)..(1626): n is a, c, g, or t
  misc_feature (1629)..(1631): n is a, c, g, or t
  misc_feature (1634)..(1637): n is a, c, g, or t
  misc_feature (1639)..(1650): n is a, c, g, or t
  misc_feature (1652)..(1654): n is a, c, g, or t
  misc_feature (1656)..(1660): n is a, c, g, or t
  misc_feature (1663)..(1665): n is a, c, g, or t
  misc_feature (1667)..(1673): n is a, c, g, or t
  misc_feature (1675)..(1679): n is a, c, g, or t
  misc_feature (1681)..(1687): n is a, c, g, or t
  misc_feature (1690)..(1692): n is a, c, g, or t
  misc_feature (1694)..(1694): n is a, c, g, or t
  misc_feature (1697)..(1703): n is a, c, g, or t
  misc_feature (1706)..(1706): n is a, c, g, or t
  misc_feature (1710)..(1711): n is a, c, g, or t
  misc_feature (1713)..(1713): n is a, c, g, or t
  misc_feature (1715)..(1720): n is a, c, g, or t
  misc_feature (1722)..(1728): n is a, c, g, or t
  misc_feature (1730)..(1732): n is a, c, g, or t
  misc_feature (1735)..(1736): n is a, c, g, or t
  misc_feature (1738)..(1738): n is a, c, g, or t
  misc_feature (1740)..(1742): n is a, c, g, or t
  misc_feature (1744)..(1744): n is a, c, g, or t
  misc_feature (1746)..(1746): n is a, c, g, or t
  misc_feature (1748)..(1750): n is a, c, g, or t
  misc_feature (1753)..(1756): n is a, c, g, or t
  misc_feature (1758)..(1763): n is a, c, g, or t
  misc_feature (1766)..(1767): n is a, c, g, or t
  misc_feature (1769)..(1777): n is a, c, g, or t
  misc_feature (1780)..(1781): n is a, c, g, or t
  misc_feature (1784)..(1785): n is a, c, g, or t
  misc_feature (1789)..(1789): n is a, c, g, or t
  misc_feature (1791)..(1793): n is a, c, g, or t
  misc_feature (1795)..(1796): n is a, c, g, or t
  misc_feature (1798)..(1798): n is a, c, g, or t
  misc_feature (1801)..(1802): n is a, c, g, or t
  misc_feature (1804)..(1807): n is a, c, g, or t
  misc_feature (1809)..(1811): n is a, c, g, or t
  misc_feature (1813)..(1813): n is a, c, g, or t
  misc_feature (1972)..(1972): n is a, c, g, or t
  misc_feature (1975)..(1975): n is a, c, g, or t
  misc_feature (1980)..(1980): n is a, c, g, or t
  misc_feature (1995)..(1996): n is a, c, g, or t
  misc_feature (1998)..(1999): n is a, c, g, or t
  misc_feature (2025)..(2026): n is a, c, g, or t
  misc_feature (2029)..(2029): n is a, c, g, or t
  misc_feature (2034)..(2034): n is a, c, g, or t
nnnnnnnnnnnnnnnnnnnnnnnnnnnnnnnnnnnnnnnnnnnnnnnnnnnnnnnnnnnnnnnnnnnnnnnnnnnnnnnnnnnnnnnnnnnnnnnnnnnnnnnnnnnnnnnnnnnnnnnnnnnnnnnnnnnnnnnnnnnnnnnnnnnnnnnnnnnnnnnnnnnnnnnnnnnnnnnnnnnnnnnnnnnnnnnnnnnnnnnnnnnnnnnnnnnnnnnnnnnnnnnnnnnnnnnnnnnnnnnnnnnnnnnnnnnnnnnnnnnnnnnnnnnnnnnnnnnnnnnnnnnnnnnnnnnnnnnnnnnnnnnnnnnnnnnnnnnnnnnnnnnnnnnnnnnnnnnnnnnnnnnnnnnnnnnnnnnnnnnnnnnnnnnnnnnnnnnnnnnnnnnnnnnnnnnnnnnnnnnnnnnnnnnnnnnnnnnnnnnnnnnnnnnnnnnnnnnnnnnnnnnnnnnnnnnnnnnnnnnnnnnaccgccccgtatgggtgcgcgccattcttcccgctcatatcatccccttgnnnnnnncnnngnnngacnnntngcnncnnnnngnnngnnnnnnnnnnncnnncnnnntntgnnnngnanannnnnngnnnnnnnnnnnnnnnncncatnnanntnacnttntnnnnnnncngcnnnnnntnnnnnngnnncgnnnnnngtcncnnanngcnnncngnnnnnannntnggtctatgagcattttctcgatggaattgcagcggcacaagcagaatatgtcgaagtcaaacggagtgatgtcatctcgctgggcggcattgacttccgagtcctcaacccagcaaacaataaccatcctgatctcaacgaaaactctgtggttttacagtttacgtatggtcagaccacctttttaatgatgggagacagcggcgcagatacnnnngcnnccnnnnngncnnnnngnntgncntnnnnngcannnnntnnnnnngnnngnnnnnnnngntnnacnnntgncncnncannngnnnnnnnannnnnngnncnncngnnnnnannnntnnnnncnncnnnnnncnnnnacnnntnnngnnnncngnnnncncagannnnnncnnnnnnnncaanngnnggnnnnncngtnnntnngnnannnannannngnnngnnnntnnnnnnngcnnnnntgaannnanntnnanncannancnnnanngntntnnccnnnnnnnnnnnnntnnnnntnnngnntnnnncncnnangcnncnagnntntnncgngnnngngnnnnnntnnnnnnnnnnnnnngnnnnnnnnnnnnnnnangnnnncntnncnnnnnnnnnatntnnnnnnnnnannnnnnncnnnnnngnnnannncannnntnnngnnnnnnnannnnnnnnnnnngngccnnnnnnnncngnnnnnngnnnnnngnnntcnnggncnngganngnnnnngcnanancnnnnnnngnnncnnggannatngnnnnanntngnnnnnnnnnnnnnnnnnanncnanncatnnnnngnaannnnnnnnnnnntnnntgannnnnnnnangnnnnnnnnnnngnnnnnntngnnngnnnngatnnncnnnanannnnnnnnnnnagnnannnnnnnnnnnnncaannnngnnnnnngannnggnnnnannnnnnnnnnnnannngnnnnngtnnncnnnnnnntnnnnnannnnnnngannntncannnnnnnaanaaannancnnnnnnannnnnnnannnttnngncnnngngntnnnctnnnnannnnnntanntnnnnnnnnncannttnntttntnnncnngntcnntnnnngnnnanttttcgcacgaccctgcttcgcagggaggttgtcttctaaagaactttgttgtcttgcgcaatcagagtacaaagactccagagccccagagtacagagcgccagagatcagagtcgtcatgatggaagaactggggagaccacaactcggaaaccgtngtncctgnacctgtagcctgggnngnnccagtagcggaaggcgcaacgcgcgnngtnggatncatcgaagaaggaaccgccgcgaagtgaacgagactctacttttttactgaggtcttccctgccatcacttgcgagatatggatagtctttatattcgctgcgcgtccattcccagacattgccgctcatgtcctgcaaaccgtaaggacttcggccctgcgggaaacaacccagggccgaagtggttccaattcctgtttctgccatattcgcaaaattcgagttgaactttccttcccaggggtattccctggcatccaaaccgcgtgaggccttctcccattcggcttcgctgggcagggtaattttcaatttgcgattgacgattaacgattgcagattatcgtctgtgtaaatagcgtcattcttgatatcgtacacctgcaacttgcaaccctggccctgagcggagccgaaggattcaacttttaactgttcttcgagccagcgcgtaaaggccagcgcttcataccaggaaacgcccacaaccggatgattggagaaattgaagggcgcaccattatcgtccggcgcgtttctggccgcatcgtcccacctgcccttaaaacctgccgcgttccaatacccagcctgttttgcttcctgccagtatttttcctgtctgtatccttcggctttcacaaactggtcaaactgcgcgttggagatgggaaagcgagagatgtgatactcaggcagtttaactttgtgttcttcctttccttcgcccatcctaaattcaccggcgggcacacagcagaaaactaatttctcgatttgcaaaacttcttcacgcgggtcgcccaggctcgccaggacgcgcccggcttcggcgcgctcgaggggaggtaacgcgtcgctgcccaaaatatttaccagtccaggcaggaggcggtttagataggcagatccgccgttgggatgtgtatcgcgctcggtgacttcctttcccaccagcgcaacgatctgccccgcccacagtcggacgcgctcgcattgttcgccctttccatttggcttgtccagttgataagcaagatccagcaattcgttttcaccacggcggttgtagtacatttcctcgaatgccatccgcgcggcaagatcccaactgtcaccttctgccgcgtggtcgtggaaggtgcgcacgcggtcacgctgtcccgcaaggaaggagccagccaggtattcctgaaaggtgcgatgcggaaaactgtacgaggtgggcctggccaattcaccgccgtagccaaccagaagcccggcgcgttgatccacgtagtccaaaaaatcggcggccaatttcacatcaccaagatgttcatctttttcgagcaaatccagcgcgtccttccgcagaagcgtacccgttccgccttgcccggcgctggcgcgatgcgcctgatatgcgagggcttccatcacggcacgcagttttaaatcgtttttgagaaattcagccagggcggcatcgcccactttatgtttttgccagcggcgcaggagcacttccacagccaggtgatataagcgcacgcgctcacgcggcaagcctacctcacgctggtggatgatcgccatcgtggtcaggagcatcgggttgctggaaagttcgcgcatatcggcttccagcgcggcgcgggacagatcgtccatgcgcgctttggtttgctcttcattgaattttccgagttcgtgctgggtgttgtaccagtgctgaataaagttgccgatctgttcttcgttgaaaggcgcgagcgtgcggctggtaaagttgggcaaaacagaatcgcccacatacgagcgcacccggcaggtgaggatcacacgctggagatgatattgtttgagcaaggcatccactgcctggcgaacgcggacgcgcaggtcatgcggaacttcgtcaaggccatccagcacgagcaggcaatgcccgctttgcagggcttcatgcaaagtaccgca

SEQ ID NO: 232 - DNA, 4000 bp, Escherichia coli
  misc_feature (289)..(289): n is a, c, g, or t
  misc_feature (1760)..(1760): n is a, c, g, or t
ttttttggacttcatttaggtcttggcatattttatagtattttattgtttatattgttgattagttatgattataaaaaataagagtttttatgaaaaatttgttgactggtggaatgattttaaaaaagacaagccattaataactggaagtgctaatgatatgatttattccatatctattttactttttgtgcttttagctgcgttttatgaccccttgtggagaccttttttacattactattttccagattcaattccattaatggattaccaaccgtacacnccttaattattcacatatcagaccgctatatatctaaacaaaaaaacccccggtaactcgagggcttacttttgggtggaagaccggattcgaaccggcgacctcctgaaccacaatcaggcgttctaaccaactgaactacaaccaccatttaatcaggcgcaaatttatattattttatctaatatttctaataaaatacttgatattaaaagttagaaaaaaaattcttaaataagatgtatttaatatttattatattcaatatcaaataattatctgtttatggatttaaactctatatctctatgtttgatgatttttttttacttattcgcaggaattagtcattttaaaaatcctaaattttttctaaaaataacaccaaaatgggtttacagacctgatttagtgaacattataattggcattattgaaataggactagcacttggtcttgttttaaaaacaacaagatcaatatctgccattggaataatattattattaataatagtatttcccgcaaacttatatcatttacaaatttcaattaaaaagaaaaaaaatataattggaacaataattcgattaccaattcagggattactaatttattgggcttatatatttatataagactttgcagatcgtttatcccaattgacttattagatgtaaaaccttcagcatgatctacatttattaacctgcctaaatcagcagatctgttgatcacgttattaataaaatttttactgctaatcaatgtttcaggctcattactatttgggtcaaaaaactgactggaatatgattttatagcattagtcttagtatcaatatgtccagaaatgtctactaaaaaatcaggaatagaatttttccactgaatgtaatgataaacgttttttggacgccactccgtttgagacaaaccgttaagtttagttacaacttttcttaaaccacttagaaagcaagcattacttactagatttgctccttttgggtggtcaatatgccgatcatcttgtgcattacacaaaactatctctggtctgtattttcttaaaatcttaattatttctagctgatgaaactcatcattaataaagaaaccatctctaaaatttaaattctctcttgtttcaactccaagtatttttgaagcagcattagattcagaatctcttgtttgaacatctcctcttgttcctaattcacctctagttaagtcaataattcctactttctttccgttgtgaatctccttggctattgtaccaccacatccaagctctacatcatcaggatgagcaccaaacgcaagtatatctaattttatatctttcatattttttcaaaagcttgattaagatcggcaataatgtctttagaatcttcaattccaactgaaaatcttaacaaaccatcaaaaatacctaaattttctctctctgcttttgtnatttttgaatgagaagttagtgaaggagaacataatgtagattctactccaccaagactcattgcagattttactaattttaattttctagtaaataatattgcagtatttaaatctgataattcaaaggatagcattccaccaaaacctctcatttgtttcttagaaagttcataatcaggatgagattttaaaccagggtaaaaaactgatttaaccttatctactttagaaagatgttctgcaacaagagcagcattttcattttgtttatttactcttagagataatgttttaatacttctctccaaaagccaaactgtatactcacttaaatttccaccataattgattgaagattcaactattttattaatatttgattgacttgaagctaatgcaccggctaatatatcactgtgtccacccagatattttgttgcactatggataactatatttataccataatctgctgggttttgattaattggactagaaaatgtattatcaattatagaaataagatcgtattttattgaaagatttgaaatagcttttagatccataactttcaaaagaggattacttggagattcaataaaaattattttagtattatctttaatttcagtctcataatcatcaattaaaaaactatctacaagactgtattcaatattaaacttgttaaattcttttataactaagtttaatgtaccaccatatattgaagattgaaaaattacatggtcacctgattttataaaactaaacaaggacgtataaattgctgctattcctgaactaaacaacagagctgattcacaattttcaagatcagcaattttttttgataaagctatttgatttggagtgttaaagtatcttggatacttatcatcctcgacgtctacaaaatcgtaagccgttgaggggaaaagtggagatgttgcacccttaaatcgatcgtcaattaattctcctgaatgaacacattttgtacttactccatttttatttttcatttaactaagttttaatccactggataaccgagggatcatctggctttgtccttggtgaaattattttttcaaggtaaccattttcattaattaaatatttttgaaaattccattttacagaggaatctttataaccatttttattcttgctagttaaaaatttatataatggatgcatgtcagatcctttaacagagattttttccatcattggaaatgatactccataatttttttcgcaaaatgctgcaatttcatcattcgaaccaggttcttgccataaaaaattatttgctggaaaaccaataattacaaaattgtctgatttatattcattatacattttttcaagaatttcatattgatatgttaaaccacacttcgaagcagtattaactaccataactttctttccttttaagctagacatgctgaaagtatttccgtttaaatcagttaatttaaattgatgaatagtttctttgacagaattagctgaaggttcctgagcattgcaagaaaacgtaaaaagtcccataaataaaaaaattaattttttcatataatatatctcacaaaactcatgccataatgatattatactatttctgctgatagaccagcttgtaataatttagtacacataggttttaaatcagagtatgaaccagattttacactacatttacctttataatgtacaattaaagaacactgttcggcttgttctaaagtatgatcacaaacacttattaaggtattaataacatgatcaaatgtgtttacatcgtcattgtaaagaatgatttcattttcatgcattaaatcagtctcagaaagatgtttttcagaaattttttcttttgttcccaaaatcactctaatttacaaaataaataacttagctattagcttttattatttcaataaaatcgtttgcatttaaagctgctcctccaataagaccaccatctacatcttttttattaaaaatttcaactgcatttgatggttttacacttcctccatataatatggatacactattagctatttctcgactaaacttttctgaaatataattcctaacaaactcgtgtatctcctgagcttgatctgctgatgctgtttctcctgttccaatggcccaaactggttcatatgctaaaacaattttgtttaaagattttgaattcaatttcatgactgtgt

SEQ ID NO: 233 - DNA, 4000 bp, Escherichia coli
  misc_feature (2)..(2): n is a, c, g, or t
  misc_feature (6)..(8): n is a, c, g, or t
  misc_feature (10)..(10): n is a, c, g, or t
  misc_feature (12)..(15): n is a, c, g, or t
  misc_feature (17)..(17): n is a, c, g, or t
  misc_feature (20)..(21): n is a, c, g, or t
  misc_feature (23)..(25): n is a, c, g, or t
  misc_feature (27)..(28): n is a, c, g, or t
  misc_feature (30)..(30): n is a, c, g, or t
  misc_feature (32)..(47): n is a, c, g, or t
  misc_feature (49)..(49): n is a, c, g, or t
  misc_feature (51)..(69): n is a, c, g, or t
  misc_feature (71)..(75): n is a, c, g, or t
  misc_feature (77)..(86): n is a, c, g, or t
  misc_feature (88)..(89): n is a, c, g, or t
  misc_feature (91)..(102): n is a, c, g, or t
  misc_feature (104)..(106): n is a, c, g, or t
  misc_feature (108)..(122): n is a, c, g, or t
  misc_feature (124)..(125): n is a, c, g, or t
  misc_feature (129)..(129): n is a, c, g, or t
  misc_feature (132)..(139): n is a, c, g, or t
  misc_feature (141)..(143): n is a, c, g, or t
  misc_feature (148)..(148): n is a, c, g, or t
  misc_feature (150)..(150): n is a, c, g, or t
  misc_feature (154)..(154): n is a, c, g, or t
  misc_feature (156)..(156): n is a, c, g, or t
  misc_feature (158)..(164): n is a, c, g, or t
  misc_feature (166)..(166): n is a, c, g, or t
  misc_feature (169)..(169): n is a, c, g, or t
  misc_feature (186)..(186): n is a, c, g, or t
  misc_feature (193)..(193): n is a, c, g, or t
  misc_feature (199)..(199): n is a, c, g, or t
  misc_feature (201)..(201): n is a, c, g, or t
  misc_feature (204)..(204): n is a, c, g, or t
  misc_feature (213)..(213): n is a, c, g, or t
  misc_feature (218)..(218): n is a, c, g, or t
  misc_feature (220)..(220): n is a, c, g, or t
  misc_feature (223)..(223): n is a, c, g, or t
  misc_feature (234)..(234): n is a, c, g, or t
  misc_feature (237)..(237): n is a, c, g, or t
  misc_feature (244)..(246): n is a, c, g, or t
  misc_feature (254)..(255): n is a, c, g, or t
  misc_feature (265)..(265): n is a, c, g, or t
  misc_feature (279)..(279): n is a, c, g, or t
  misc_feature (286)..(288): n is a, c, g, or t
  misc_feature (300)..(301): n is a, c, g, or t
  misc_feature (303)..(303): n is a, c, g, or t
  misc_feature (307)..(309): n is a, c, g, or t
  misc_feature (312)..(313): n is a, c, g, or t
  misc_feature (315)..(316): n is a, c, g, or t
  misc_feature (318)..(319): n is a, c, g, or t
  misc_feature (325)..(327): n is a, c, g, or t
  misc_feature (339)..(339): n is a, c, g, or t
  misc_feature (342)..(342): n is a, c, g, or t
  misc_feature (345)..(345): n is a, c, g, or t
  misc_feature (348)..(349): n is a, c, g, or t
  misc_feature (351)..(352): n is a, c, g, or t
  misc_feature (354)..(354): n is a, c, g, or t
  misc_feature (356)..(357): n is a, c, g, or t
  misc_feature (360)..(360): n is a, c, g, or t
  misc_feature (372)..(372): n is a, c, g, or t
  misc_feature (375)..(376): n is a, c, g, or t
  misc_feature (378)..(378): n is a, c, g, or t
  misc_feature (394)..(394): n is a, c, g, or t
  misc_feature (397)..(397): n is a, c, g, or t
  misc_feature (399)..(402): n is a, c, g, or t
  misc_feature (404)..(405): n is a, c, g, or t
  misc_feature (409)..(409): n is a, c, g, or t
  misc_feature (417)..(417): n is a, c, g, or t
  misc_feature (419)..(420): n is a, c, g, or t
  misc_feature (422)..(422): n is a, c, g, or t
  misc_feature (429)..(429): n is a, c, g, or t
  misc_feature (431)..(431): n is a, c, g, or t
  misc_feature (438)..(438): n is a, c, g, or t
  misc_feature (441)..(442): n is a, c, g, or t
  misc_feature (444)..(445): n is a, c, g, or t
  misc_feature (448)..(448): n is a, c, g, or t
  misc_feature (462)..(462): n is a, c, g, or t
  misc_feature (465)..(465): n is a, c, g, or t
  misc_feature (469)..(470): n is a, c, g, or t
  misc_feature (474)..(474): n is a, c, g, or t
  misc_feature (480)..(480): n is a, c, g, or t
  misc_feature (484)..(484): n is a, c, g, or t
  misc_feature (486)..(486): n is a, c, g, or t
  misc_feature (490)..(490): n is a, c, g, or t
  misc_feature (498)..(498): n is a, c, g, or t
  misc_feature (522)..(522): n is a, c, g, or t
  misc_feature (528)..(528): n is a, c, g, or t
  misc_feature (540)..(540): n is a, c, g, or t
  misc_feature (559)..(559): n is a, c, g, or t
  misc_feature (589)..(589): n is a, c, g, or t
  misc_feature (604)..(604): n is a, c, g, or t
  misc_feature (649)..(649): n is a, c, g, or t
  misc_feature (679)..(679): n is a, c, g, or t
  misc_feature (730)..(730): n is a, c, g, or t
  misc_feature (855)..(855): n is a, c, g, or t
  misc_feature (870)..(870): n is a, c, g, or t
  misc_feature (925)..(925): n is a, c, g, or t
  misc_feature (927)..(927): n is a, c, g, or t
  misc_feature (1049)..(1049): n is a, c, g, or t
  misc_feature (1177)..(1177): n is a, c, g, or t
  misc_feature (1815)..(1815): n is a, c, g, or t
  misc_feature (1829)..(1829): n is a, c, g, or t
  misc_feature (1881)..(1881): n is a, c, g, or t
  misc_feature (1930)..(1930): n is a, c, g, or t
  misc_feature (1939)..(1940): n is a, c, g, or t
  misc_feature (1951)..(1951): n is a, c, g, or t
  misc_feature (1957)..(1957): n is a, c, g, or t
  misc_feature (1966)..(1966): n is a, c, g, or t
  misc_feature (1972)..(1972): n is a, c, g, or t
  misc_feature (1979)..(1979): n is a, c, g, or t
  misc_feature (1981)..(1982): n is a, c, g, or t
  misc_feature (1984)..(1985): n is a, c, g, or t
  misc_feature (1987)..(1987): n is a, c, g, or t
  misc_feature (1996)..(1996): n is a, c, g, or t
  misc_feature (2002)..(2003): n is a, c, g, or t
  misc_feature (2013)..(2013): n is a, c, g, or t
  misc_feature (2196)..(2196): n is a, c, g, or t
  misc_feature (2203)..(2203): n is a, c, g, or t
  misc_feature (2206)..(2206): n is a, c, g, or t
  misc_feature (2208)..(2216): n is a, c, g, or t
  misc_feature (2218)..(2218): n is a, c, g, or t
  misc_feature (2220)..(2221): n is a, c, g, or t
  misc_feature (2223)..(2225): n is a, c, g, or t
  misc_feature (2228)..(2228): n is a, c, g, or t
  misc_feature (2230)..(2232): n is a, c, g, or t
  misc_feature (2235)..(2238): n is a, c, g, or t
  misc_feature (2240)..(2241): n is a, c, g, or t
  misc_feature (2244)..(2244): n is a, c, g, or t
  misc_feature (2249)..(2249): n is a, c, g, or t
  misc_feature (2251)..(2252): n is a, c, g, or t
  misc_feature (2254)..(2257): n is a, c, g, or t
  misc_feature (2262)..(2262): n is a, c, g, or t
  misc_feature (2264)..(2265): n is a, c, g, or t
  misc_feature (2267)..(2267): n is a, c, g, or t
  misc_feature (2270)..(2273): n is a, c, g, or t
  misc_feature (2275)..(2282): n is a, c, g, or t
  misc_feature (2285)..(2285): n is a, c, g, or t
  misc_feature (2287)..(2292): n is a, c, g, or t
  misc_feature (2294)..(2298): n is a, c, g, or t
  misc_feature (2300)..(2300): n is a, c, g, or t
  misc_feature (2302)..(2302): n is a, c, g, or t
  misc_feature (2304)..(2304): n is a, c, g, or t
  misc_feature (2306)..(2310): n is a, c, g, or t
  misc_feature (2312)..(2313): n is a, c, g, or t
  misc_feature (2315)..(2316): n is a, c, g, or t
  misc_feature (2319)..(2324): n is a, c, g, or t
  misc_feature (2326)..(2326): n is a, c, g, or t
  misc_feature (2331)..(2331): n is a, c, g, or t
  misc_feature (2334)..(2337): n is a, c, g, or t
  misc_feature (2339)..(2344): n is a, c, g, or t
  misc_feature (2346)..(2351): n is a, c, g, or t
  misc_feature (2355)..(2355): n is a, c, g, or t
  misc_feature (2357)..(2362): n is a, c, g, or t
  misc_feature (2365)..(2365): n is a, c, g, or t
  misc_feature (2367)..(2380): n is a, c, g, or t
  misc_feature (2384)..(2386): n is a, c, g, or t
  misc_feature (2388)..(2389): n is a, c, g, or t
  misc_feature (2391)..(2393): n is a, c, g, or t
  misc_feature (2395)..(2398): n is a, c, g, or t
  misc_feature (2400)..(2405): n is a, c, g, or t
  misc_feature (2408)..(2412): n is a, c, g, or t
  misc_feature (2414)..(2417): n is a, c, g, or t
  misc_feature (2419)..(2419): n is a, c, g, or t
  misc_feature (2421)..(2421): n is a, c, g, or t
  misc_feature (2423)..(2430): n is a, c, g, or t
  misc_feature (2433)..(2433): n is a, c, g, or t
  misc_feature (2435)..(2438): n is a, c, g, or t
  misc_feature (2440)..(2442): n is a, c, g, or t
  misc_feature (2444)..(2447): n is a, c, g, or t
  misc_feature (2449)..(2451): n is a, c, g, or t
  misc_feature (2453)..(2456): n is a, c, g, or t
  misc_feature (2458)..(2463): n is a, c, g, or t
  misc_feature (2470)..(2475): n is a, c, g, or t
  misc_feature (2477)..(2481): n is a, c, g, or t
  misc_feature (2483)..(2483): n is a, c, g, or t
  misc_feature (2485)..(2485): n is a, c, g, or t
  misc_feature (2488)..(2489): n is a, c, g, or t
  misc_feature (2491)..(2491): n is a, c, g, or t
  misc_feature (2494)..(2494): n is a, c, g, or t
  misc_feature (2497)..(2497): n is a, c, g, or t
  misc_feature (2499)..(2499): n is a, c, g, or t
  misc_feature (2503)..(2505): n is a, c, g, or t
  misc_feature (2507)..(2507): n is a, c, g, or t
  misc_feature (2509)..(2510): n is a, c, g, or t
  misc_feature (2512)..(2516): n is a, c, g, or t
  misc_feature (2519)..(2524): n is a, c, g, or t
  misc_feature (2526)..(2527): n is a, c, g, or t
  misc_feature (2529)..(2529): n is a, c, g, or t
  misc_feature (2532)..(2532): n is a, c, g, or t
  misc_feature (2534)..(2535): n is a, c, g, or t
  misc_feature (2537)..(2540): n is a, c, g, or t
  misc_feature (2543)..(2544): n is a, c, g, or t
  misc_feature (2546)..(2546): n is a, c, g, or t
  misc_feature (2548)..(2551): n is a, c, g, or t
  misc_feature (2553)..(2556): n is a, c, g, or t
  misc_feature (2558)..(2558): n is a, c, g, or t
  misc_feature (2561)..(2561): n is a, c, g, or t
  misc_feature (2563)..(2563): n is a, c, g, or t
  misc_feature (2565)..(2566): n is a, c, g, or t
  misc_feature (2569)..(2571): n is a, c, g, or t
  misc_feature (2573)..(2573): n is a, c, g, or t
  misc_feature (2576)..(2576): n is a, c, g, or t
  misc_feature (2578)..(2581): n is a, c, g, or t
  misc_feature (2583)..(2585): n is a, c, g, or t
  misc_feature (2589)..(2592): n is a, c, g, or t
  misc_feature (2596)..(2601): n is a, c, g, or t
  misc_feature (2603)..(2603): n is a, c, g, or t
  misc_feature (2607)..(2610): n is a, c, g, or t
  misc_feature (2615)..(2615): n is a, c, g, or t
  misc_feature (2617)..(2619): n is a, c, g, or t
  misc_feature (2621)..(2621): n is a, c, g, or t
  misc_feature (2625)..(2627): n is a, c, g, or t
  misc_feature (2629)..(2629): n is a, c, g, or t
  misc_feature (2631)..(2631): n is a, c, g, or t
  misc_feature (2634)..(2635): n is a, c, g, or t
  misc_feature (2638)..(2641): n is a, c, g, or t
  misc_feature (2643)..(2658): n is a, c, g, or t
  misc_feature (2660)..(2660): n is a, c, g, or t
  misc_feature (2662)..(2662): n is a, c, g, or t
  misc_feature (2665)..(2684): n is a, c, g, or t
  misc_feature (2686)..(2692): n is a, c, g, or t
  misc_feature (2697)..(2697): n is a, c, g, or t
  misc_feature (2699)..(2704): n is a, c, g, or t
  misc_feature (2706)..(2711): n is a, c, g, or t
  misc_feature (2713)..(2721): n is a, c, g, or t
  misc_feature (2723)..(2725): n is a, c, g, or t
  misc_feature (2728)..(2730): n is a, c, g, or t
  misc_feature (2732)..(2737): n is a, c, g, or t
  misc_feature (2739)..(2745): n is a, c, g, or t
  misc_feature (2747)..(2753): n is a, c, g, or t
  misc_feature (2755)..(2757): n is a, c, g, or t
  misc_feature (2759)..(2765): n is a, c, g, or t
  misc_feature (2767)..(2768): n is a, c, g, or t
  misc_feature (2770)..(2770): n is a, c, g, or t
  misc_feature (2772)..(2775): n is a, c, g, or t
  misc_feature (2777)..(2780): n is a, c, g, or t
  misc_feature (2782)..(2790): n is a, c, g, or t
  misc_feature (2794)..(2794): n is a, c, g, or t
  misc_feature (2796)..(2796): n is a, c, g, or t
  misc_feature (2799)..(2801): n is a, c, g, or t
  misc_feature (2803)..(2806): n is a, c, g, or t
  misc_feature (2809)..(2815): n is a, c, g, or t
  misc_feature (2817)..(2817): n is a, c, g, or t
  misc_feature (2822)..(2822): n is a, c, g, or t
  misc_feature (2825)..(2833): n is a, c, g, or t
  misc_feature (2835)..(2838): n is a, c, g, or t
  misc_feature (2840)..(2844): n is a, c, g, or t
  misc_feature (2846)..(2846): n is a, c, g, or t
  misc_feature (2849)..(2853): n is a, c, g, or t
  misc_feature (2856)..(2860): n is a, c, g, or t
  misc_feature (2862)..(2864): n is a, c, g, or t
  misc_feature (2868)..(2880): n is a, c, g, or t
  misc_feature (2882)..(2888): n is a, c, g, or t
  misc_feature (2890)..(2894): n is a, c, g, or t
  misc_feature (2896)..(2896): n is a, c, g, or t
  misc_feature (2900)..(2900): n is a, c, g, or t
  misc_feature (2902)..(2910): n is a, c, g, or t
  misc_feature (2912)..(2912): n is a, c, g, or t
  misc_feature (2914)..(2916): n is a, c, g, or t
  misc_feature (2919)..(2919): n is a, c, g, or t
  misc_feature (2921)..(2922): n is a, c, g, or t
  misc_feature (2924)..(2932): n is a, c, g, or t
  misc_feature (2934)..(2934): n is a, c, g, or t
  misc_feature (2937)..(2939): n is a, c, g, or t
  misc_feature (2941)..(2944): n is a, c, g, or t
  misc_feature (2946)..(2946): n is a, c, g, or t
  misc_feature (2948)..(2948): n is a, c, g, or t
  misc_feature (2950)..(2950): n is a, c, g, or t
  misc_feature (2952)..(2953): n is a, c, g, or t
  misc_feature (2957)..(2963): n is a, c, g, or t
  misc_feature (2967)..(2968): n is a, c, g, or t
  misc_feature (2970)..(2973): n is a, c, g, or t
  misc_feature (2975)..(2977): n is a, c, g, or t
  misc_feature (2979)..(2982): n is a, c, g, or t
  misc_feature (2985)..(2986): n is a, c, g, or t
  misc_feature (2988)..(2995): n is a, c, g, or t
  misc_feature (2997)..(2999): n is a, c, g, or t
  misc_feature (3002)..(3003): n is a, c, g, or t
  misc_feature (3006)..(3010): n is a, c, g, or t
  misc_feature (3012)..(3014): n is a, c, g, or t
  misc_feature (3016)..(3016): n is a, c, g, or t
  misc_feature (3018)..(3019): n is a, c, g, or t
  misc_feature (3021)..(3025): n is a, c, g, or t
  misc_feature (3027)..(3027): n is a, c, g, or t
  misc_feature (3029)..(3030): n is a, c, g, or t
  misc_feature (3032)..(3032): n is a, c, g, or t
  misc_feature (3034)..(3034): n is a, c, g, or t
  misc_feature (3036)..(3036): n is a, c, g, or t
  misc_feature (3038)..(3038): n is a, c, g, or t
  misc_feature (3040)..(3040): n is a, c, g, or t
  misc_feature (3042)..(3049): n is a, c, g, or t
  misc_feature (3053)..(3056): n is a, c, g, or t
  misc_feature (3058)..(3060): n is a, c, g, or t
  misc_feature (3063)..(3073): n is a, c, g, or t
  misc_feature (3075)..(3075): n is a, c, g, or t
  misc_feature (3078)..(3079): n is a, c, g, or t
  misc_feature (3081)..(3082): n is a, c, g, or t
  misc_feature (3084)..(3085): n is a, c, g, or t
  misc_feature (3087)..(3093): n is a, c, g, or t
  misc_feature (3097)..(3097): n is a, c, g, or t
  misc_feature (3099)..(3103): n is a, c, g, or t
  misc_feature (3105)..(3110): n is a, c, g, or t
  misc_feature (3112)..(3112): n is a, c, g, or t
  misc_feature (3117)..(3117): n is a, c, g, or t
  misc_feature (3119)..(3120): n is a, c, g, or t
  misc_feature (3122)..(3122): n is a, c, g, or t
  misc_feature (3124)..(3124): n is a, c, g, or t
  misc_feature (3127)..(3127): n is a, c, g, or t
  misc_feature (3130)..(3131): n is a, c, g, or t
  misc_feature (3133)..(3137): n is a, c, g, or t
  misc_feature (3139)..(3147): n is a, c, g, or t
  misc_feature (3150)..(3151): n is a, c, g, or t
  misc_feature (3154)..(3156): n is a, c, g, or t
  misc_feature (3158)..(3158): n is a, c, g, or t
  misc_feature (3162)..(3164): n is a, c, g, or t
  misc_feature (3166)..(3168): n is a, c, g, or t
  misc_feature (3170)..(3171): n is a, c, g, or t
  misc_feature (3175)..(3180): n is a, c, g, or t
  misc_feature (3182)..(3184): n is a, c, g, or t
  misc_feature (3187)..(3196): n is a, c, g, or t
  misc_feature (3198)..(3202): n is a, c, g, or t
  misc_feature (3206)..(3207): n is a, c, g, or t
  misc_feature (3209)..(3215): n is a, c, g, or t
  misc_feature (3217)..(3217): n is a, c, g, or t
  misc_feature (3221)..(3223): n is a, c, g, or t
  misc_feature (3225)..(3255): n is a, c, g, or t
  misc_feature (3257)..(3257): n is a, c, g, or t
  misc_feature (3260)..(3264): n is a, c, g, or t
  misc_feature (3267)..(3268): n is a, c, g, or t
  misc_feature (3270)..(3270): n is a, c, g, or t
  misc_feature (3272)..(3273): n is a, c, g, or t
  misc_feature (3275)..(3275): n is a, c, g, or t
  misc_feature (3278)..(3283): n is a, c, g, or t
  misc_feature (3286)..(3288): n is a, c, g, or t
  misc_feature (3290)..(3291): n is a, c, g, or t
  misc_feature (3293)..(3293): n is a, c, g, or t
  misc_feature (3295)..(3295): n is a, c, g, or t
  misc_feature (3298)..(3300): n is a, c, g, or t
  misc_feature (3302)..(3305): n is a, c, g, or t
  misc_feature (3307)..(3308): n is a, c, g, or t
  misc_feature (3310)..(3310): n is a, c, g, or t
  misc_feature (3312)..(3312): n is a, c, g, or t
  misc_feature (3314)..(3315): n is a, c, g, or t
  misc_feature (3317)..(3317): n is a, c, g, or t
  misc_feature (3321)..(3325): n is a, c, g, or t
  misc_feature (3328)..(3333): n is a, c, g, or t
  misc_feature (3336)..(3336): n is a, c, g, or t
  misc_feature (3338)..(3349): n is a, c, g, or t
  misc_feature (3351)..(3353): n is a, c, g, or t
  misc_feature (3356)..(3356): n is a, c, g, or t
  misc_feature (3358)..(3359): n is a, c, g, or t
  misc_feature (3361)..(3373): n is a, c, g, or t
  misc_feature (3375)..(3381): n is a, c, g, or t
  misc_feature (3383)..(3383): n is a, c, g, or t
  misc_feature (3386)..(3388): n is a, c, g, or t
  misc_feature (3390)..(3394): n is a, c, g, or t
  misc_feature (3396)..(3398): n is a, c, g, or t
  misc_feature (3400)..(3407): n is a, c, g, or t
  misc_feature (3409)..(3410): n is a, c, g, or t
  misc_feature (3413)..(3417): n is a, c, g, or t
  misc_feature (3419)..(3419): n is a, c, g, or t
  misc_feature (3421)..(3424): n is a, c, g, or t
  misc_feature (3426)..(3427): n is a, c, g, or t
  misc_feature (3430)..(3435): n is a, c, g, or t
  misc_feature (3438)..(3439): n is a, c, g, or t
  misc_feature (3441)..(3443): n is a, c, g, or t
  misc_feature (3445)..(3445): n is a, c, g, or t
  misc_feature (3447)..(3451): n is a, c, g, or t
  misc_feature (3455)..(3457): n is a, c, g, or t
  misc_feature (3459)..(3462): n is a, c, g, or t
  misc_feature (3464)..(3468): n is a, c, g, or t
  misc_feature (3470)..(3471): n is a, c, g, or t
  misc_feature (3473)..(3475): n is a, c, g, or t
  misc_feature (3479)..(3482): n is a, c, g, or t
  misc_feature (3484)..(3487): n is a, c, g, or t
  misc_feature (3490)..(3492): n is a, c, g, or t
  misc_feature (3494)..(3495): n is a, c, g, or t
  misc_feature (3497)..(3498): n is a, c, g, or t
  misc_feature (3501)..(3502): n is a, c, g, or t
  misc_feature (3504)..(3504): n is a, c, g, or t
  misc_feature (3506)..(3506): n is a, c, g, or t
  misc_feature (3508)..(3512): n is a, c, g, or t
  misc_feature (3515)..(3515): n is a, c, g, or t
  misc_feature (3518)..(3519): n is a, c, g, or t
  misc_feature (3521)..(3526): n is a, c, g, or t
  misc_feature (3528)..(3535): n is a, c, g, or t
  misc_feature (3537)..(3548): n is a, c, g, or t
  misc_feature (3550)..(3551): n is a, c, g, or t
  misc_feature (3553)..(3553): n is a, c, g, or t
  misc_feature (3555)..(3559): n is a, c, g, or t
  misc_feature (3561)..(3562): n is a, c, g, or t
  misc_feature (3564)..(3565): n is a, c, g, or t
  misc_feature (3567)..(3567): n is a, c, g, or t
  misc_feature (3569)..(3570): n is a, c, g, or t
  misc_feature (3573)..(3581): n is a, c, g, or t
  misc_feature (3583)..(3584): n is a, c, g, or t
  misc_feature (3586)..(3592): n is a, c, g, or t
  misc_feature (3594)..(3595): n is a, c, g, or t
  misc_feature (3597)..(3602): n is a, c, g, or t
  misc_feature (3604)..(3604): n is a, c, g, or t
  misc_feature (3606)..(3607): n is a, c, g, or t
  misc_feature (3609)..(3610): n is a, c, g, or t
  misc_feature (3612)..(3612): n is a, c, g, or t
  misc_feature (3614)..(3614): n is a, c, g, or t
  misc_feature (3616)..(3616): n is a, c, g, or t
  misc_feature (3619)..(3619): n is a, c, g, or t
  misc_feature (3622)..(3624): n is a, c, g, or t
  misc_feature (3626)..(3633): n is a, c, g, or t
  misc_feature (3635)..(3637): n is a, c, g, or t
  misc_feature (3639)..(3641): n is a, c, g, or t
  misc_feature (3643)..(3647): n is a, c, g, or t
  misc_feature (3650)..(3652): n is a, c, g, or t
  misc_feature (3654)..(3659): n is a, c, g, or t
  misc_feature (3663)..(3664): n is a, c, g, or t
  misc_feature (3668)..(3673): n is a, c, g, or t
  misc_feature (3676)..(3676): n is a, c, g, or t
  misc_feature (3678)..(3679): n is a, c, g, or t
  misc_feature (3681)..(3682): n is a, c, g, or t
  misc_feature (3684)..(3685): n is a, c, g, or t
  misc_feature (3687)..(3687): n is a, c, g, or t
  misc_feature (3689)..(3690): n is a, c, g, or t
  misc_feature (3692)..(3696): n is a, c, g, or t
  misc_feature (3698)..(3699): n is a, c, g, or t
  misc_feature (3701)..(3701): n is a, c, g, or t
  misc_feature (3705)..(3708): n is a, c, g, or t
  misc_feature (3711)..(3713): n is a, c, g, or t
  misc_feature (3715)..(3716): n is a, c, g, or t
  misc_feature (3718)..(3721): n is a, c, g, or t
  misc_feature (3723)..(3724): n is a, c, g, or t
  misc_feature (3728)..(3732): n is a, c, g, or t
  misc_feature (3734)..(3738): n is a, c, g, or t
  misc_feature (3741)..(3744): n is a, c, g, or t
  misc_feature (3746)..(3746): n is a, c, g, or t
  misc_feature (3748)..(3764): n is a, c, g, or t
  misc_feature (3767)..(3769): n is a, c, g, or t
  misc_feature (3772)..(3774): n is a, c, g, or t
  misc_feature (3776)..(3778): n is a, c, g, or t
  misc_feature (3780)..(3793): n is a, c, g, or t
  misc_feature (3796)..(3798): n is a, c, g, or t
  misc_feature (3800)..(3800): n is a, c, g, or t
  misc_feature (3802)..(3802): n is a, c, g, or t
  misc_feature (3804)..(3808): n is a, c, g, or t
  misc_feature (3810)..(3811): n is a, c, g, or t
  misc_feature (3814)..(3814): n is a, c, g, or t
  misc_feature (3817)..(3819): n is a, c, g, or t
  misc_feature (3821)..(3825): n is a, c, g, or t
  misc_feature (3827)..(3829): n is a, c, g, or t
  misc_feature (3831)..(3832): n is a, c, g, or t
  misc_feature (3834)..(3834): n is a, c, g, or t
  misc_feature (3836)..(3836): n is a, c, g, or t
  misc_feature (3838)..(3841): n is a, c, g, or t
  misc_feature (3843)..(3845): n is a, c, g, or t
  misc_feature (3847)..(3847): n is a, c, g, or t
  misc_feature (3849)..(3858): n is a, c, g, or t
  misc_feature (3860)..(3865): n is a, c, g, or t
  misc_feature (3867)..(3867): n is a, c, g, or t
  misc_feature (3869)..(3875): n is a, c, g, or t
  misc_feature (3877)..(3879): n is a, c, g, or t
  misc_feature (3882)..(3882): n is a, c, g, or t
  misc_feature (3884)..(3901): n is a, c, g, or t
  misc_feature (3904)..(3906): n is a, c, g, or t
  misc_feature (3908)..(3912): n is a, c, g, or t
  misc_feature (3914)..(3916): n is a, c, g, or t
  misc_feature (3918)..(3924): n is a, c, g, or t
  misc_feature (3926)..(3929): n is a, c, g, or t
  misc_feature (3931)..(3935): n is a, c, g, or t
  misc_feature (3937)..(3939): n is a, c, g, or t
  misc_feature (3941)..(3941): n is a, c, g, or t
  misc_feature (3943)..(3946): n is a, c, g, or t
  misc_feature (3948)..(3948): n is a, c, g, or t
  misc_feature (3950)..(3955): n is a, c, g, or t
  misc_feature (3957)..(3964): n is a, c, g, or t
  misc_feature (3967)..(3967): n is a, c, g, or t
  misc_feature (3969)..(3971): n is a, c, g, or t
  misc_feature (3973)..(3974): n is a, c, g, or t
  misc_feature (3977)..(3985): n is a, c, g, or t
  misc_feature (3989)..(3997): n is a, c, g, or t
  misc_feature (3999)..(3999): n is a, c, g, or t
tntttnnngngnnnntntgnngnnncnnanannnnnnnnnnnnnnnngngnnnnnnnnnnnnnnnnnnnannnnngnnnnnnnnnngnncnnnnnnnnnnnntnnngnnnnnnnnnnnnnnnannatanaannnnnnnngnnnatatntntgtntntnnnnnnnanaanattgaattatcatggantatatgnaacatncnaanttttatgcnatgtntnatnaaattagaaanaangaagctnnngaattacnnttagcattgnaagctcatggtggngaatttnnntggattgatgannanaacnnngannannanntatatnnnccgcctataatnttngtnaanntnnangnnggncctatggatgtngtnntncataaggtatggttgnatnannnntnnattnaattatcngnntntgataangnatggggnaannanntanatattgaattgganganattnntccnggacancttncntatnttattgantacatgcctgttacagacaaggtnaaatcngtggcaataaangatgattaatatggggcanaaaaagacgattgattattggagacacccnaccaaaagggaaatnaagttcggtgagggagctattcattggttaacagtggatattganaaagttcagaagccagacggaagtttgaanaaatggtttattcatacagacggactaaggtacaatcgaccatagttaaantgatgtctgtaaagcaaaggctgttctaacaaaatagagcagccttttgtgttaaacaatggttaaagtggacaactattcacaccatataaaactataaaatctattcacattaaaacagtaanaaatatgccattganaattgagaatatcaagttggcaggaaccaaatttgatggtcgcgctaagttgtcncnagaacaacgccaggctattcagattttggcccgtgaaggatatagccaaagaagactggccgctatgttcaatgttagtaagcggcttatacaatctatactatctcctcctgttcgcaagnactctaaacaatatccaacagaatattggacagagttaaaacggaagtatcgaaaaaagaaaattgatttatataaaaatggaaagatcaagtttaataacaagttgaaaaataaatgaaacgcaagngtatcaagtatgtagctaacattgattttggctatcgttcaattactgatgcaaagcaacatataaaaatattcttgaaatcgcttctttcgcaaataggtttacacccaggaatagactatatcgtaacagctaatcatttgcgaattagacatgtgaaaaatattacaggaaaaataaccaccacacttaaagagatattcccagtattcaatttttattggaagactccaaggctattggtgtggttctaaaatcaatattaataataatttacaagtatggaaaagtattctatttcggttttaggagccgacaagaaacagtatgaaatcgcagatttcagagcaagaggtatgaattatactaatgctattggcattatcgtaacaacagaatttatgagccgtattttggcgtttgacacttggcaagaacaatggggaaatactgataggatcttaacggaagagcagaatgaatccgttgctatgcaaactttctccggacttgatctaaccaaacgtattgtagaagcacaaactgatattgatggaatgactgccgccaaacgctgctggaactatcaaaaaggtggcctccagtggtatttgccttgtttgatggagctaggagtnctttgcgcatatcntgatgagataaacaaagcaatgaaagaaattggatgtcccgatgaatgtttncttcctacagaagattctgatgaaacctgggtctggagtagcagtgagngcagtcagnncggcagctggnacgtgnactttagtnatggcnacttcancnncnncngcaagtacnacagtnncatggtgagngcggttgcagcatttcagccttcgccgagcctgttgacaggcgaggcaaaaagtaacgattgtctgcatagtgacgaagctcttataaacatgttacgtgaacgtggttataaaggcgaattgactaagaccttgactatttaatattatcgccacccatatttgatatggtatgggtggcanaatattnttnannnnnnnnnananntnnnaanannntannnnannatncacananngnnnngtgtntnngngannnntnnnnnnnnatntnnnnnnannnnntntntntnnnnnanncnnttnnnnnntntatanaannnntnnnnnntnnnnnnaaanannnnnnttntnnnnnnnnnnnnnnagannngnnannntnnnnannnnnnagnnnnnannnnananannnnnnnnaanannnntnnnannnncnnnannnntnnnnnnatataannnnnnannnnnananatnntnttntananatannngngnngnnnnnatnnnnnncnntnaananngnnnngannanannnntnnnnanatntncnnctnnntntcntnnnntnnngaannnnacannnnnntntctnnnnttttntnnnanaaannngngngtnnaannnnannnnnnnnnnnnnnnncncnaannnnnnnnnnnnnnnnnnnngnnnnnnngtgcncnnnnnnannnnnnannnnnnnnngnnnctnnnannnnnntnnnnnnnannnnnnncnnngnnnnnnntnnanannnngnnnntnnnnnnnnnatananaannntnnnnttnnnnnnnanaaaanatnnnnnnnnntnnnngnnnnntnttnnnnnaannnnnannntatnnnnnnnnnnnnngnnnnnnntnnnnnanaaanannnnnnnnntntnnnaananncnnnnnnnnnanaannngnnnntntntntnnagannnnnnngcgnnannnntnnnannnnatnngnnnnnnnngnnnacnngannnnnannntntnnannnnnananntntntntntntnnnnnnnnagannnntnnnatnnnnnnnnnnnanatnntnnannannnnnnnaaanannnnnannnnnntntatananntntnttntgnngnnnnngnnnnnnnnncannggnnnanaaannncnnntnnagannnnnnannntgnnnnnnnnnnannnnntgtnnannnnnnnanaaannngnnnnnnnnnnnnnnnnnnnnnnnnnnnnnnncnctnnnnnttnnanannanatnnnnnnacnnnanntntntcnnntnnnntnncncntnnanaaannnnnagnnnnnnatncnnnnnnnnnnnnannnttntnngnnnnnnnnnnnnntnnnnnnntntcnnnannnnnannngnnnnnnnncnngannnnnanannnnannacnnnnnnagnncnnntntnnnnntatnnngnnnntnnnnncnnannntatnnnnannnngannntnnannagnntntntnnnnnggnganntnnnnnngnnnnnnnnannnnnnnnnnnngnnanannnnnanntnntntnngannnnnnnnnanngnnnnnnntnntnnnnnnananntnngnananaanatnnnannnnnnnnannntnnngnnnnnacnnntnnnnnnaganntttnnnnnnatntnngnnanngngnntnnnnntnntntttnnnnagnnnanncnnnntnnaaannnnnannnnnaannnnanannnnnnnnnnnnnnnnngannngtnnnannntnnnnnnnnnnnnnnaannntntntnnnnncnnaanacnnntnnnnnannntnntntntnnnnannntntnnnnnnnnnntnnnnnntntnnnnnnngnnnaanannnnnnnnnnnnnnnnnntannncnnnnngnnnannnnnnnannnnannnnncnnngngnnnngngnnnnnntnnnnnnnnatntnnncnnaannnnnnnnnggtnnnnnnnnnana

SEQ ID NO: 234 - DNA, 4000 bp, Escherichia coli
  misc_feature (1)..(21): n is a, c, g, or t
  misc_feature (23)..(83): n is a, c, g, or t
  misc_feature (85)..(115): n is a, c, g, or t
  misc_feature (117)..(118): n is a, c, g, or t
  misc_feature (120)..(120): n is a, c, g, or t
  misc_feature (122)..(122): n is a, c, g, or t
  misc_feature (125)..(147): n is a, c, g, or t
  misc_feature (150)..(163): n is a, c, g, or t
  misc_feature (165)..(171): n is a, c, g, or t
  misc_feature (173)..(176): n is a, c, g, or t
  misc_feature (178)..(180): n is a, c, g, or t
  misc_feature (182)..(187): n is a, c, g, or t
  misc_feature (189)..(206): n is a, c, g, or t
  misc_feature (208)..(219): n is a, c, g, or t
  misc_feature (221)..(222): n is a, c, g, or t
  misc_feature (225)..(227): n is a, c, g, or t
  misc_feature (229)..(230): n is a, c, g, or t
  misc_feature (232)..(233): n is a, c, g, or t
  misc_feature (235)..(238): n is a, c, g, or t
  misc_feature (240)..(248): n is a, c, g, or t
  misc_feature (251)..(255): n is a, c, g, or t
  misc_feature (257)..(258): n is a, c, g, or t
  misc_feature (260)..(263): n is a, c, g, or t
  misc_feature (266)..(269): n is a, c, g, or t
  misc_feature (271)..(272): n is a, c, g, or t
  misc_feature (274)..(274): n is a, c, g, or t
  misc_feature (277)..(277): n is a, c, g, or t
  misc_feature (279)..(279): n is a, c, g, or t
  misc_feature (282)..(282): n is a, c, g, or t
  misc_feature (284)..(284): n is a, c, g, or t
  misc_feature (286)..(289): n is a, c, g, or t
  misc_feature (291)..(291): n is a, c, g, or t
  misc_feature (293)..(295): n is a, c, g, or t
  misc_feature (297)..(297): n is a, c, g, or t
  misc_feature (299)..(302): n is a, c, g, or t
  misc_feature (304)..(305): n is a, c, g, or t
  misc_feature (307)..(308): n is a, c, g, or t
  misc_feature (310)..(323): n is a, c, g, or t
  misc_feature (325)..(329): n is a, c, g, or t
  misc_feature (333)..(333): n is a, c, g, or t
  misc_feature (336)..(337): n is a, c, g, or t
  misc_feature (339)..(339): n is a, c, g, or t
  misc_feature (341)..(347): n is a, c, g, or t
  misc_feature (349)..(349): n is a, c, g, or t
  misc_feature (352)..(357): n is a, c, g, or t
  misc_feature (359)..(364): n is a, c, g, or t
  misc_feature (366)..(366): n is a, c, g, or t
  misc_feature (369)..(369): n is a, c, g, or t
  misc_feature (372)..(378): n is a, c, g, or t
  misc_feature (380)..(380): n is a, c, g, or t
  misc_feature (382)..(388): n is a, c, g, or t
  misc_feature (390)..(393): n is a, c, g, or t
  misc_feature (395)..(395): n is a, c, g, or t
  misc_feature (397)..(414): n is a, c, g, or t
  misc_feature (416)..(416): n is a, c, g, or t
  misc_feature (418)..(424): n is a, c, g, or t
  misc_feature (426)..(430): n is a, c, g, or t
  misc_feature (433)..(448): n is a, c, g, or t
  misc_feature (450)..(450): n is a, c, g, or t
  misc_feature (452)..(453): n is a, c, g, or t
  misc_feature (455)..(458): n is a, c, g, or t
  misc_feature (461)..(469): n is a, c, g, or t
  misc_feature (471)..(471): n is a, c, g, or t
  misc_feature (473)..(481): n is a, c, g, or t
  misc_feature (483)..(495): n is a, c, g, or t
  misc_feature (497)..(500): n is a, c, g, or t
  misc_feature (502)..(504): n is a, c, g, or t
  misc_feature (511)..(519): n is a, c, g, or t
  misc_feature (521)..(527): n is a, c, g, or t
  misc_feature (530)..(531): n is a, c, g, or t
  misc_feature (533)..(534): n is a, c, g, or t
  misc_feature (537)..(542): n is a, c, g, or t
  misc_feature (545)..(546): n is a, c, g, or t
  misc_feature (549)..(555): n is a, c, g, or t
  misc_feature (557)..(557): n is a, c, g, or t
  misc_feature (559)..(568): n is a, c, g, or t
  misc_feature (570)..(572): n is a, c, g, or t
  misc_feature (574)..(575): n is a, c, g, or t
  misc_feature (577)..(579): n is a, c, g, or t
  misc_feature (581)..(584): n is a, c, g, or t
  misc_feature (586)..(586): n is a, c, g, or t
  misc_feature (588)..(592): n is a, c, g, or t
  misc_feature (595)..(595): n is a, c, g, or t
  misc_feature (597)..(597): n is a, c, g, or t
  misc_feature (600)..(600): n is a, c, g, or t
  misc_feature (602)..(603): n is a, c, g, or t
  misc_feature (605)..(605): n is a, c, g, or t
  misc_feature (607)..(615): n is a, c, g, or t
  misc_feature (617)..(623): n is a, c, g, or t
  misc_feature (625)..(631): n is a, c, g, or t
  misc_feature (633)..(633): n is a, c, g, or t
  misc_feature (636)..(636): n is a, c, g, or t
  misc_feature (638)..(643): n is a, c, g, or t
  misc_feature (646)..(647): n is a, c, g, or t
  misc_feature (649)..(652): n is a, c, g, or t
  misc_feature (654)..(655): n is a, c, g, or t
  misc_feature (657)..(666): n is a, c, g, or t
  misc_feature (669)..(672): n is a, c, g, or t
  misc_feature (674)..(676): n is a, c, g, or t
  misc_feature (678)..(686): n is a, c, g, or t
  misc_feature (688)..(698): n is a, c, g, or t
  misc_feature (700)..(703): n is a, c, g, or t
  misc_feature (705)..(709): n is a, c, g, or t
  misc_feature (711)..(712): n is a, c, g, or t
  misc_feature (715)..(715): n is a, c, g, or t
  misc_feature (717)..(717): n is a, c, g, or t
  misc_feature (721)..(721): n is a, c, g, or t
  misc_feature (726)..(726): n is a, c, g, or t
  misc_feature (728)..(728): n is a, c, g, or t
  misc_feature (730)..(732): n is a, c, g, or t
  misc_feature (734)..(736): n is a, c, g, or t
  misc_feature (738)..(743): n is a, c, g, or t
  misc_feature (745)..(749): n is a, c, g, or t
  misc_feature (751)..(751): n is a, c, g, or t
  misc_feature (755)..(759): n is a, c, g, or t
  misc_feature (761)..(766): n is a, c, g, or t
  misc_feature (768)..(774): n is a, c, g, or t
  misc_feature (776)..(778): n is a, c, g, or t
  misc_feature (781)..(783): n is a, c, g, or t
  misc_feature (785)..(785): n is a, c, g, or t
  misc_feature (787)..(787): n is a, c, g, or t
  misc_feature (789)..(794): n is a, c, g, or t
  misc_feature (796)..(796): n is a, c, g, or t
  misc_feature (798)..(811): n is a, c, g, or t
  misc_feature (813)..(814): n is a, c, g, or t
  misc_feature (816)..(816): n is a, c, g, or t
  misc_feature (818)..(824): n is a, c, g, or t
  misc_feature (828)..(828): n is a, c, g, or t
  misc_feature (830)..(833): n is a, c, g, or t
  misc_feature (839)..(839): n is a, c, g, or t
  misc_feature (841)..(842): n is a, c, g, or t
  misc_feature (845)..(845): n is a, c, g, or t
  misc_feature (847)..(847): n is a, c, g, or t
  misc_feature (849)..(849): n is a, c, g, or t
  misc_feature (854)..(854): n is a, c, g, or t
  misc_feature (856)..(857): n is a, c, g, or t
  misc_feature (860)..(861): n is a, c, g, or t
  misc_feature (863)..(863): n is a, c, g, or t
  misc_feature (873)..(874): n is a, c, g, or t
  misc_feature (877)..(877): n is a, c, g, or t
  misc_feature (879)..(880): n is a, c, g, or t
  misc_feature (883)..(883): n is a, c, g, or t
  misc_feature (889)..(889): n is a, c, g, or t
  misc_feature (893)..(894): n is a, c, g, or t
  misc_feature (900)..(902): n is a, c, g, or t
  misc_feature (919)..(919): n is a, c, g, or t
  misc_feature (1100)..(1100): n is a, c, g, or t
  misc_feature (1238)..(1238): n is a, c, g, or t
  misc_feature (2004)..(2004): n is a, c, g, or t
  misc_feature (2016)..(2016): n is a, c, g, or t
  misc_feature (2118)..(2119): n is a, c, g, or t
  misc_feature (2121)..(2121): n is a, c, g, or t
  misc_feature (2128)..(2130): n is a, c, g, or t
  misc_feature (2136)..(2136): n is a, c, g, or t
  misc_feature (2139)..(2142): n is a, c, g, or t
  misc_feature (2144)..(2144): n is a, c, g, or t
  misc_feature (2149)..(2151): n is a, c, g, or t
  misc_feature (2153)..(2153): n is a, c, g, or t
  misc_feature (2156)..(2157): n is a, c, g, or t
  misc_feature (2159)..(2162): n is a, c, g, or t
  misc_feature (2164)..(2164): n is a, c, g, or t
  misc_feature (2166)..(2166): n is a, c, g, or t
  misc_feature (2168)..(2169): n is a, c, g, or t
  misc_feature (2171)..(2174): n is a, c, g, or t
  misc_feature (2176)..(2176): n is a, c, g, or t
  misc_feature (2178)..(2183): n is a, c, g, or t
  misc_feature (2185)..(2185): n is a, c, g, or t
  misc_feature (2188)..(2195): n is a, c, g, or t
  misc_feature (2197)..(2197): n is a, c, g, or t
  misc_feature (2199)..(2206): n is a, c, g, or t
  misc_feature (2208)..(2208): n is a, c, g, or t
  misc_feature (2210)..(2212): n is a, c, g, or t
  misc_feature (2214)..(2216): n is a, c, g, or t
  misc_feature (2220)..(2224): n is a, c, g, or t
  misc_feature (2227)..(2227): n is a, c, g, or t
  misc_feature (2232)..(2233): n is a, c, g, or t
  misc_feature (2235)..(2243): n is a, c, g, or t
  misc_feature (2245)..(2245): n is a, c, g, or t
  misc_feature (2247)..(2247): n is a, c, g, or t
  misc_feature (2249)..(2249): n is a, c, g, or t
  misc_feature (2251)..(2251): n is a, c, g, or t
  misc_feature (2253)..(2255): n is a, c, g, or t
  misc_feature (2257)..(2260): n is a, c, g, or t
  misc_feature (2262)..(2262): n is a, c, g, or t
  misc_feature (2265)..(2269): n is a, c, g, or t
  misc_feature (2271)..(2274): n is a, c, g, or t
  misc_feature (2276)..(2290): n is a, c, g, or t
  misc_feature (2292)..(2297): n is a, c, g, or t
  misc_feature (2299)..(2300): n is a, c, g, or t
  misc_feature (2303)..(2320): n is a, c, g, or t
  misc_feature (2322)..(2323): n is a, c, g, or t
  misc_feature (2325)..(2359): n is a, c, g, or t
  misc_feature (2361)..(2361): n is a, c, g, or t
  misc_feature (2363)..(2366): n is a, c, g, or t
  misc_feature (2368)..(2368): n is a, c, g, or t
  misc_feature (2370)..(2378): n is a, c, g, or t
  misc_feature (2380)..(2384): n is a, c, g, or t
  misc_feature (2386)..(2388): n is a, c, g, or t
  misc_feature (2390)..(2407): n is a, c, g, or t
  misc_feature (2409)..(2413): n is a, c, g, or t
  misc_feature (2415)..(2430): n is a, c, g, or t
  misc_feature (2433)..(2439): n is a, c, g, or t
  misc_feature (2442)..(2472): n is a, c, g, or t
  misc_feature (2474)..(2489): n is a, c, g, or t
  misc_feature (2491)..(2492): n is a, c, g, or t
  misc_feature (2494)..(2497): n is a, c, g, or t
  misc_feature (2499)..(2500): n is a, c, g, or t
  misc_feature (2502)..(2508): n is a, c, g, or t
  misc_feature (2510)..(2510): n is a, c, g, or t
  misc_feature (2513)..(2519): n is a, c, g, or t
  misc_feature (2522)..(2523): n is a, c, g, or t
  misc_feature (2525)..(2528): n is a, c, g, or t
  misc_feature (2530)..(2542): n is a, c, g, or t
  misc_feature (2544)..(2547): n is a, c, g, or t
  misc_feature (2549)..(2550): n is a, c, g, or t
  misc_feature (2552)..(2557): n is a, c, g, or t
  misc_feature (2561)..(2577): n is a, c, g, or t
  misc_feature (2579)..(2580): n is a, c, g, or t
  misc_feature (2583)..(2585): n is a, c, g, or t
  misc_feature (2587)..(2588): n is a, c, g, or t
  misc_feature (2590)..(2594): n is a, c, g, or t
  misc_feature (2596)..(2598): n is a, c, g, or t
  misc_feature (2600)..(2610): n is a, c, g, or t
  misc_feature (2612)..(2625): n is a, c, g, or t
  misc_feature (2627)..(2646): n is a, c, g, or t
  misc_feature (2649)..(2652): n is a, c, g, or t
  misc_feature (2654)..(2660): n is a, c, g, or t
  misc_feature (2662)..(2674): n is a, c, g, or t
  misc_feature (2676)..(2682): n is a, c, g, or t
  misc_feature (2685)..(2705): n is a, c, g, or t
  misc_feature (2707)..(2707): n is a, c, g, or t
  misc_feature (2709)..(2729): n is a, c, g, or t
  misc_feature (2731)..(2752): n is a, c, g, or t
  misc_feature (2754)..(2765): n is a, c, g, or t
  misc_feature (2767)..(2767): n is a, c, g, or t
  misc_feature (2769)..(2771): n is a, c, g, or t
  misc_feature (2773)..(2775): n is a, c, g, or t
  misc_feature (2777)..(2779): n is a, c, g, or t
  misc_feature (2781)..(2786): n is a, c, g, or t
  misc_feature (2788)..(2790): n is a, c, g, or t
  misc_feature (2792)..(2799): n is a, c, g, or t
  misc_feature (2801)..(2806): n is a, c, g, or t
  misc_feature (2808)..(2812): n is a, c, g, or t
  misc_feature (2814)..(2827): n is a, c, g, or t
  misc_feature (2829)..(2829): n is a, c, g, or t
  misc_feature (2831)..(2831): n is a, c, g, or t
  misc_feature (2833)..(2839): n is a, c, g, or t
  misc_feature (2842)..(2847): n is a, c, g, or t
  misc_feature (2849)..(2865): n is a, c, g, or t
  misc_feature (2867)..(2879): n is a, c, g, or t
  misc_feature (2882)..(2887): n is a, c, g, or t
  misc_feature (2889)..(2890): n is a, c, g, or t
  misc_feature (2892)..(2894): n is a, c, g, or t
  misc_feature (2896)..(2898): n is a, c, g, or t
  misc_feature (2900)..(2909): n is a, c, g, or t
  misc_feature (2911)..(2912): n is a, c, g, or t
  misc_feature (2915)..(2915): n is a, c, g, or t
  misc_feature (2917)..(2918): n is a, c, g, or t
  misc_feature (2921)..(2922): n is a, c, g, or t
  misc_feature (2924)..(2932): n is a, c, g, or t
  misc_feature (2934)..(2940): n is a, c, g, or t
  misc_feature (2942)..(2958): n is a, c, g, or t
  misc_feature (2960)..(2965): n is a, c, g, or t
  misc_feature (2967)..(2979): n is a, c, g, or t
  misc_feature (2981)..(2983): n is a, c, g, or t
  misc_feature (2985)..(2987): n is a, c, g, or t
  misc_feature (2989)..(2993): n is a, c, g, or t
  misc_feature (2996)..(2999): n is a, c, g, or t
  misc_feature (3002)..(3012): n is a, c, g, or t
  misc_feature (3014)..(3019): n is a, c, g, or t
  misc_feature (3021)..(3032): n is a, c, g, or t
  misc_feature (3034)..(3046): n is a, c, g, or t
  misc_feature (3049)..(3074): n is a, c, g, or t
  misc_feature (3077)..(3077): n is a, c, g, or t
  misc_feature (3079)..(3081): n is a, c, g, or t
  misc_feature (3083)..(3083): n is a, c, g, or t
  misc_feature (3085)..(3086): n is a, c, g, or t
  misc_feature (3088)..(3090): n is a, c, g, or t
  misc_feature (3092)..(3095): n is a, c, g, or t
  misc_feature (3097)..(3097): n is a, c, g, or t
  misc_feature (3099)..(3100): n is a, c, g, or t
  misc_feature (3102)..(3110): n is a, c, g, or t
  misc_feature (3112)..(3116): n is a, c, g, or t
  misc_feature (3119)..(3130): n is a, c, g, or t
  misc_feature (3133)..(3133): n is a, c, g, or t
  misc_feature (3136)..(3136): n is a, c, g, or t
  misc_feature (3138)..(3142): n is a, c, g, or t
  misc_feature (3146)..(3152): n is a, c, g, or t
  misc_feature (3154)..(3173): n is a, c, g, or t
  misc_feature (3175)..(3183): n is a, c, g, or t
  misc_feature (3185)..(3185): n is a, c, g, or t
  misc_feature (3187)..(3192): n is a, c, g, or t
  misc_feature (3194)..(3194): n is a, c, g, or t
  misc_feature (3196)..(3213): n is a, c, g, or t
  misc_feature (3215)..(3218): n is a, c, g, or t
  misc_feature (3220)..(3230): n is a, c, g, or t
  misc_feature (3233)..(3234): n is a, c, g, or t
  misc_feature (3236)..(3241): n is a, c, g, or t
  misc_feature (3243)..(3244): n is a, c, g, or t
  misc_feature (3246)..(3247): n is a, c, g, or t
  misc_feature (3249)..(3252): n is a, c, g, or t
  misc_feature (3255)..(3271): n is a, c, g, or t
  misc_feature (3273)..(3276): n is a, c, g, or t
  misc_feature (3278)..(3278): n is a, c, g, or t
  misc_feature (3280)..(3288): n is a, c, g, or t
  misc_feature (3291)..(3296): n is a, c, g, or t
  misc_feature (3298)..(3298): n is a, c, g, or t
  misc_feature (3300)..(3304): n is a, c, g, or t
  misc_feature (3306)..(3319): n is a, c, g, or t
  misc_feature (3321)..(3329): n is a, c, g, or t
  misc_feature (3331)..(3335): n is a, c, g, or t
  misc_feature (3337)..(3338): n is a, c, g, or t
  misc_feature (3340)..(3347): n is a, c, g, or t
  misc_feature (3349)..(3355): n is a, c, g, or t
  misc_feature (3358)..(3362): n is a, c, g, or t
  misc_feature (3364)..(3367): n is a, c, g, or t
  misc_feature (3369)..(3374): n is a, c, g, or t
  misc_feature (3376)..(3380): n is a, c, g, or t
  misc_feature (3382)..(3383): n is a, c, g, or t
  misc_feature (3385)..(3392): n is a, c, g, or t
  misc_feature (3395)..(3434): n is a, c, g, or t
  misc_feature (3436)..(3437): n is a, c, g, or t
  misc_feature (3439)..(3440): n is a, c, g, or t
  misc_feature (3442)..(3453): n is a, c, g, or t
  misc_feature (3455)..(3457): n is a, c, g, or t
  misc_feature (3459)..(3462): n is a, c, g, or t
  misc_feature (3464)..(3466): n is a, c, g, or t
  misc_feature (3469)..(3470): n is a, c, g, or t
  misc_feature (3472)..(3473): n is a, c, g, or t
  misc_feature (3475)..(3478): n is a, c, g, or t
  misc_feature (3480)..(3482): n is a, c, g, or t
  misc_feature (3484)..(3486): n is a, c, g, or t
  misc_feature (3489)..(3500): n is a, c, g, or t
  misc_feature (3502)..(3504): n is a, c, g, or t
  misc_feature (3506)..(3507): n is a, c, g, or t
  misc_feature (3509)..(3513): n is a, c, g, or t
  misc_feature (3515)..(3530): n is a, c, g, or t
  misc_feature (3532)..(3555): n is a, c, g, or t
  misc_feature (3557)..(3572): n is a, c, g, or t
  misc_feature (3574)..(3574): n is a, c, g, or t
  misc_feature (3576)..(3576): n is a, c, g, or t
  misc_feature (3578)..(3583): n is a, c, g, or t
  misc_feature (3585)..(3588): n is a, c, g, or t
  misc_feature (3590)..(3591): n is a, c, g, or t
  misc_feature (3593)..(3596): n is a, c, g, or t
  misc_feature (3599)..(3603): n is a, c, g, or t
  misc_feature (3605)..(3605): n is a, c, g, or t
  misc_feature (3607)..(3609): n is a, c, g, or t
  misc_feature (3611)..(3627): n is a, c, g, or t
  misc_feature (3629)..(3641): n is a, c, g, or t
  misc_feature (3644)..(3653): n is a, c, g, or t
  misc_feature (3655)..(3656): n is a, c, g, or t
  misc_feature (3658)..(3660): n is a, c, g, or t
  misc_feature (3662)..(3662): n is a, c, g, or t
  misc_feature (3664)..(3668): n is a, c, g, or t
  misc_feature (3670)..(3674): n is a, c, g, or t
  misc_feature (3676)..(3676): n is a, c, g, or t
  misc_feature (3678)..(3681): n is a, c, g, or t
  misc_feature (3683)..(3684): n is a, c, g, or t
  misc_feature (3686)..(3686): n is a, c, g, or t
  misc_feature (3688)..(3693): n is a, c, g, or t
  misc_feature (3695)..(3702): n is a, c, g, or t
  misc_feature (3704)..(3707): n is a, c, g, or t
  misc_feature (3710)..(3712): n is a, c, g, or t
  misc_feature (3715)..(3719): n is a, c, g, or t
  misc_feature (3721)..(3721): n is a, c, g, or t
  misc_feature (3723)..(3723): n is a, c, g, or t
  misc_feature (3725)..(3731): n is a, c, g, or t
  misc_feature (3733)..(3739): n is a, c, g, or t
  misc_feature (3742)..(3745): n is a, c, g, or t
  misc_feature (3747)..(3752): n is a, c, g, or t
  misc_feature (3754)..(3761): n is a, c, g, or t
  misc_feature (3763)..(3780): n is a, c, g, or t
  misc_feature (3782)..(3786): n is a, c, g, or t
  misc_feature (3788)..(3788): n is a, c, g, or t
  misc_feature (3790)..(3805): n is a, c, g, or t
  misc_feature (3808)..(3824): n is a, c, g, or t
  misc_feature (3826)..(3833): n is a, c, g, or t
  misc_feature (3835)..(3846): n is a, c, g, or t
  misc_feature (3848)..(3879): n is a, c, g, or t
  misc_feature (3881)..(3881): n is a, c, g, or t
  misc_feature (3883)..(3935): n is a, c, g, or t
  misc_feature (3937)..(4000): n is a, c, g, or t
nnnnnnnnnnnnnnnnnnnnntnnnnnnnnnnnnnnnnnnnnnnnnnnnnnnnnnnnnnnnnnnnnnnnnnnnnnnnnnnnnntnnnnnnnnnnnnnnnnnnnnnnnnnnnnnnntnntnanttnnnnnnnnnnnnnnnnnnnnnnnttnnnnnnnnnnnnnngnnnnnnntnnnncnnntnnnnnncnnnnnnnnnnnnnnnnnntnnnnnnnnnnnntnnttnnntnntnntnnnncnnnnnnnnnaannnnnanntnnnnttnnnnannanttncnttnantnnnncntnnncnannnntnntnnannnnnnnnnnnnnncnnnnntttnaanncnannnnnnngnttnnnnnnannnnnncnttnccnnnnnnntncnnnnnnntnnnnantnnnnnnnnnnnnnnnnnntncnnnnnnntnnnnnaannnnnnnnnnnnnnnntnanncnnnnaannnnnnnnncnannnnnnnnntnnnnnnnnnnnnngnnnncnnnttttttnnnnnnnnncnnnnnnnggnntnnaannnnnnaannaannnnnnncntnnnnnnnnnncnnnannannncnnnncntnnnnnttncnccnanncnannnnnnnnngnnnnnnncnnnnnnntnccnannnnnnaannannnntnnannnnnnnnnnttnnnntnnntnnnnnnnnnannnnnnnnnnntnnnntnnnnnannacngnaaanttttngntnnnannnannnnnnannnnntnaaannnnntnnnnnnannnnnnntnnnttnnnantncnnnnnngntnnnnnnnnnnnnnntnntntnnnnnnntttncnnnntttttncnnccntncnaaaantnnatnnantgtatatctnnccntnnatnagttanaaannataaannnaaaaaaagatcgggganttctccccgaccttcttatcttctctagaaaaattacttaagagtgatcttagcgccttcagcctcaagcttagccttgatatcatcagcctcagccttggaagcaccttccttaagaacctttggagctgcctcaacgaggtccttagcttccttaagtccaagaccggtagcctcacgnacaaccttgataaccttgatcttgtttggtcctacatcagtaagctcaacgtcgaactcagtcttctcttcctcagctgcgcctgcacctgcaccagcgcctgctgctgcaactactacacctgctgctgcggaaacnccgaattcctcttcgcaagcctttaccaaatcatttaattccattacggaaagttccttaattgctgcaataaactcttcaacagttaactttgccattgtattatcctccattatttttattttttgaaaatgtcacggaataaattccgtattaagctgctttacgctgcttctccgccgtccttctgtgcaatctgattaagcacacgtgcgaaattgctgacaggggacttgatggatccgagaagtcttccaagaagctcttctctggatggaatctctgccaatgcctgaactgcctttgcatcgtagaactttccttccactactgcacccttaaactctaactttggtgctgtttttgcaaactttgcaaaaattcttgctgccgctgtagcatcgtccttagatactgccaaagcagtaggtccatctaatactacgtctaactgagcaaaatctgtaccctctgcggctctcttgattaaggtgttcttgaaaaccttgtactgtacaccggcttctcttaatgctttacgaagctctgtgtcctgtgctacggtaagaccacgatagtctacaacagtagcggcaacagcaccgtccaaaagggccttaatctcgtcgatgatcggctgctttaattcaacctttgccattccttgctttcctccttctgtaatttttctagaaagtattaacggaaacgagaggctttcttcttcaaagtatccggaaaatgcaagacacaaactcgcataaanccgttacttcantttagaagaataaaaaatcccttgccaaagacaagggatgaacgcacataataggataaatcctagctctttcctcggcgggcgatttctctttacatcctnncnttcttannntcgcanaannnntncaaannnanttnnannnntnananncnnnntntnnnnnntnaannnnnnnnanannnnnnnntntnnnannnaaannnnnaanaaaanncnnnnnnnnntnanananannntnnnnanaannnnntnnnnannnnnnnnnnnnnnntnnnnnntnnaannnnnnnnnnnnnnnnnngnntnnnnnnnnnnnnnnnnnnnnnnnnnnnnnnnnnnntntnnnnanannnnnnnnntnnnnntnnncnnnnnnnnnnnnnnnnnnannnnncnnnnnnnnnnnnnnnnaannnnnnnaannnnnnnnnnnnnnnnnnnnnnnnnnnnnnntnnnnnnnnnnnnnnnnannannnntnncnnnnnnntnatnnnnnnnttnnannnnannnnnnnnnnnnntnnnntnntnnnnnnaaannnnnnnnnnnnnnnnnannttnnncnntnnnnnannncnnnnnnnnnnnannnnnnnnnnnnnnannnnnnnnnnnnnnnnnnnnaannnntnnnnnnnannnnnnnnnnnnnannnnnnnaannnnnnnnnnnnnnnnnnnnncntnnnnnnnnnnnnnnnnnnnnntnnnnnnnnnnnnnnnnnnnnnntnnnnnnnnnnnntntnnntnnnannntnnnnnntnnncnnnnnnnntnnnnnnannnnngnnnnnnnnnnnnnntncntnnnnnnnaannnnnnannnnnnnnnnnnnnnnnannnnnnnnnnnnnaannnnnntnntnnntnnntnnnnnnnnnnanncananntannannnnnnnnntnnnnnnntnnnnnnnnnnnnnnnnnannnnnnannnnnnnnnnnnntnnnannntnnnnnaannnntcnnnnnnnnnnntnnnnnnannnnnnnnnnnnannnnnnnnnnnnnttnnnnnnnnnnnnnnnnnnnnnnnnnntgntnnntntnntnnntnnnntntnntnnnnnnnnntnnnnnttnnnnnnnnnnnnttntcntnnnnntcannnnnnntnnnnnnnnnnnnnnnnnnnnannnnnnnnncntnnnnnntntnnnnnnnnnnnnnnnnnntnnnntnnnnnnnnnnntanntnnnnnntnnanntnnnntannnnnnnnnnnnnnnnntnnnntntnnnnnnnnntannnnnntntnnnnntnnnnnnnnnnnnnnannnnnnnnntnnnnntnntnnnnnnnntnnnnnnnttnnnnncnnnncnnnnnntnnnnntnntnnnnnnnntcnnnnnnnnnnnnnnnnnnnnnnnnnnnnnnnnnnnnnnnntnntnntnnnnnnnnnnnntnnngnnnntnnnganntnntnnnngnnntnnnccnnnnnnnnnnnnannncnntnnnnncnnnnnnnnnnnnnnnntnnnnnnnnnnnnnnnnnnnnnnnncnnnnnnnnnnnnnnnncngnannnnnngnnnntnncnnnntcnnnnntntnnncnnnnnnnnnnnnnnnnntnnnnnnnnnnnnntcnnnnnnnnnntnntnnncntnnnnntnnnnntncnnnncnncntnnnnnncnnnnnnnncnnnntcnnnctnnnnntncncnnnnnnntnnnnnnnctnnnncnnnnnntnnnnnnnntnnnnnnnnnnnnnnnnnntnnnnncntnnnnnnnnnnnnnnnnctnnnnnnnnnnnnnnnnntnnnnnnnntnnnnnnnnnnnntnnnnnnnnnnnnnnnnnnnnnnnnnnnnnnnntncnnnnnnnnnnnnnnnnnnnnnnnnnnnnnnnnnnnnnnnnnnnnnnnnnnnnntnnnnnnnnnnnnnnnnnnnnnnnnnnnnnnnnnnnnnnnnnnnnnnnnnnnnnnnnnnnnnnnn

SEQ ID NO: 235 - DNA, 4000 bp, Escherichia coli
  misc_feature (1987)..(1988): n is a, c, g, or t
  misc_feature (1993)..(1993): n is a, c, g, or t
  misc_feature (1996)..(1996): n is a, c, g, or t
  misc_feature (2005)..(2006): n is a, c, g, or t
  misc_feature (2021)..(2021): n is a, c, g, or t
  misc_feature (2026)..(2026): n is a, c, g, or t
  misc_feature (2032)..(2032): n is a, c, g, or t
  misc_feature (2035)..(2035): n is a, c, g, or t
  misc_feature (2044)..(2044): n is a, c, g, or t
  misc_feature (2047)..(2047): n is a, c, g, or t
  misc_feature (2053)..(2054): n is a, c, g, or t
  misc_feature (2059)..(2060): n is a, c, g, or t
  misc_feature (2062)..(2062): n is a, c, g, or t
ccgcgcttcatttatagcaacagcggcataggactaccgcgtcgtgattccatttgtactgtgttaggcattagtaattatacagcctttgccgtaaggattactattatttgtgatagaacgagcacgcagaccgggtacgtttgcgggcgtaatacattcgtaaagaacagttccggcggcaatgctatggatagcaactactacccgtaccgtatgaacaacaacgcgggaaacgaaaccggaaagtggaacatggcggcgggcgacatacgcgagtttcttttagtttgggacggaagcagcggatattacgcctatttattgaacataagagaataagccatgcatcacggcgcaaggcattaaatagaagtgttgtaacgccgaatttcacggcttcggctaaacaaacacttcacgagtatttcacgacgtattaaactaatacgataagaaagtatttttgtaacgacttaaaattaagcgtatggaaaatagaaacggcgatttagtgagcgcgcaaatttcggtagccgggaacgtggatttttccggtggcaacttccgaatggatacgcctttttgcttaaaaaacgatggcgaagcggcggtagtattggaagtaaacctttggggaatgcccgaaggcgaatttataagcacgcgctttgaaacgggatggaaccccgaaattatcagagagataaaagaaacgagttcagcaaccgccctaatttggggctattaaaaattataattatgggtttaattattgcagcgggcaacacaaagcccgcgtttccttatgattactattatggcgttaagattaacgtaaatgtagcagatacaaagctggaacgggtaggaagaccggaactacatgtttcgctcccggttcaatcccttatgcggcgttgtctgcttaacgatgcggggaaggttgtaacctacctacatgctactaacagtacgaagacggacaccggggcagcggcagaccttaccggagcttccggcatggtaatggtagaaataccgaagcactaccgtaagtttgagtttgacggtactacgtttacctgccttatttcgcaataccagctaccgggctttatcgaagtaccaaagatgtaccgtagcgcatacgaagccacgatagaccgaactttatcagctactcccaaacttgccagcgtggtaaatactacggcggctttccggggcggaaataataatacggcatgggacggaacttatagaaccctattaggtcgcccggctaccgccacatcgctaaccaacttccgaaaatacgcacgaaacagaggtgcagtaggattgaacggcgcgggctggaactgcgatttatacgcggcacaaaacgcgacctattggctttatgtggttgaatacgccaaccttaactgccagcttgattttaacgcgcagcctacaagcgaaggctacaagcagggcggattaagtgcgggcgttacgacgcttaacagtacgaagtggaacacattcaacagctactacccgtttgtcccctgcggtactacaaattcattaggcaacgcttcgggcgtagtcgaatttaccatgccggacgaatacgatacgggcgtagtagttaaagtaaaagtaccttcataccggggaatagaaaacccgttcgggcatatttggagttggacggatggatgcaaatgcgctattgaatcggatgcggacggcggcgtaagttctttctatacttgcgacaacccggcaaactaccaagataccaactatgacaattacgtaaaacgcggcgaacttccacgtaaggaaggttatgttaagcgcatgatgataggcgaatacggggaaaatatgcctacggaagtgggcgcaggttctactacctactttgccgactacttctataccaacataccagccagcggcgtagcacaaaggggtgtcttgttcggcggtnntgcgnatnacggcgcgnntgccgggctttcgtncgcgnatacgnatnacgcggctncgnatacgnntgcgnntntcggctctcggctttgctttatccccgccgcgtaacacgtcacgaaacggaatgtttaacaattaaaaatacaagaaaatgacttcaaacaataatagcacagatgatggtagcctttcgttcttgaacattcaaccggacgaagcgaacaaacattttaactgcccggaaaccacgcaacagaaactaatcaatttgcagttttggttaattgatttcatcgaagacgtgaaaacgaaattcggtgcgaaccgcttcctcgtgaaaattaagttcaagaaagatgaccccgaaagcgaagcgaagaagttcttcacaaattccagcgagataaaatacattttacaggagataaagaagcgtaacgcctttccgcgaaaggtaactatgcgggcttcgggaacgcgctattattttgagtaagaagattttcacggttgtttgtccttcgggtgtcttgttcggcggtaatgcgaataacagcgcgaatgccgggctttcgtacgcgaatacgaataacacggctacgaatacgaatgcgaatatcggctctcagctatactgattttttgtaaagctaataaggacaaagaccgcgccgaaaggcggaaaagattaatcattaacggggtttggtagggaaaccgaagaacaccatttaatcagcaaagaaacaactatgaaaaggttaggcaacctttacgataaaataataagtttggataatttgcgccttgcggacgaacgcgcccgcaagggcaaactacgttcttacggcgtgaagttgcacgaccgtaacaaggaagccaaccttttatctttgcacgaagcactaaaggcaggaacttataggacttcggaatatagtaccttcacaatatacgagcctaaagaacgcgagattttccgtttgccatactttcccgaccggattgtacatcacgccgtaatgaacattttagaacctatatgggtgtctattttcacggcggacacttatagttgcataaaagggcgtggcatacaagcggcggcaaataagttaaggcgcgttatagacagagataaggcaggctgcgcgtattgcttgaaaatagacatacgcaaattttacccttccatagatcacaccgtactaaagtccattgttcgccggaagattaaggacacacggctactcaatcttttggacgaaataatagacagtgcggaaggcttaccgattggcaactaccttagccaatatttagcgaatcttgtacttacctacttcgaccattgggtaaaggaagtaaagcgggtaaggtactatttcagatacgccgacgacattgtagtattgcatagcgacaaaaagacgcttcacgctttgctggcagagtttgaaagctacttggcggctaacgtaaagctggaaatcaaacagaacaaacaagtctttccggtggcacacgaccaccgcgacagcttcgggcgtggtattgatttcttgggctatgtattctatttgaacgaaacacggcttaggaagcgtatcaaacagaacctttgccgtaagatagctaaattacggaaacggaagaaaccgttaagcgaggatgaatttaagcagacgttagccgcgtggtggggttgggctaaatacagcgacagcgaatatttaattaacaaattaaacaaaattacaccttatgaaatcaagttcagacgttagacccgcgattattttaccgttgggtaatggttcttaccactataactacaacatagtggaagaaaaggtagaagacccggaaacgggcgaaaagaccgtttacaactacgatacggtgcaggtttggcagaagccggactacgaaaaccttacgcgtgcggttatccgtagcgaaatagacgaaaccgaagaattttctttgattaacgactattacgccgcac

SEQ ID NO: 236 - DNA, 4000 bp, Escherichia coli
  misc_feature (1602)..(1602): n is a, c, g, or t
  misc_feature (1666)..(1666): n is a, c, g, or t
  misc_feature (1987)..(1987): n is a, c, g, or t
  misc_feature (2182)..(2183): n is a, c, g, or t
  misc_feature (2185)..(2186): n is a, c, g, or t
  misc_feature (2188)..(2191): n is a, c, g, or t
  misc_feature (2193)..(2194): n is a, c, g, or t
  misc_feature (2197)..(2197): n is a, c, g, or t
  misc_feature (2199)..(2202): n is a, c, g, or t
  misc_feature (2204)..(2204): n is a, c, g, or t
  misc_feature (2206)..(2207): n is a, c, g, or t
  misc_feature (2209)..(2209): n is a, c, g, or t
  misc_feature (2211)..(2211): n is a, c, g, or t
  misc_feature (2213)..(2214): n is a, c, g, or t
  misc_feature (2216)..(2220): n is a, c, g, or t
  misc_feature (2222)..(2224): n is a, c, g, or t
  misc_feature (2226)..(2230): n is a, c, g, or t
  misc_feature (2232)..(2234): n is a, c, g, or t
  misc_feature (2236)..(2240): n is a, c, g, or t
  misc_feature (2242)..(2259): n is a, c, g, or t
  misc_feature (2261)..(2261): n is a, c, g, or t
  misc_feature (2263)..(2265): n is a, c, g, or t
  misc_feature (2268)..(2274): n is a, c, g, or t
  misc_feature (2276)..(2276): n is a, c, g, or t
  misc_feature (2278)..(2285): n is a, c, g, or t
  misc_feature (2287)..(2300): n is a, c, g, or t
  misc_feature (2302)..(2304): n is a, c, g, or t
  misc_feature (2306)..(2307): n is a, c, g, or t
  misc_feature (2309)..(2313): n is a, c, g, or t
  misc_feature (2315)..(2317): n is a, c, g, or t
  misc_feature (2319)..(2320): n is a, c, g, or t
  misc_feature (2324)..(2324): n is a, c, g, or t
  misc_feature (2326)..(2326): n is a, c, g, or t
  misc_feature (2329)..(2331): n is a, c, g, or t
  misc_feature (2333)..(2334): n is a, c, g, or t
  misc_feature (2340)..(2340): n is a, c, g, or t
  misc_feature (2342)..(2343): n is a, c, g, or t
  misc_feature (2345)..(2358): n is a, c, g, or t
  misc_feature (2360)..(2360): n is a, c, g, or t
  misc_feature (2362)..(2366): n is a, c, g, or t
  misc_feature (2368)..(2369): n is a, c, g, or t
  misc_feature (2371)..(2374): n is a, c, g, or t
  misc_feature (2376)..(2376): n is a, c, g, or t
  misc_feature (2378)..(2387): n is a, c, g, or t
  misc_feature (2390)..(2393): n is a, c, g, or t
  misc_feature (2397)..(2400): n is a, c, g, or t
  misc_feature (2402)..(2406): n is a, c, g, or t
  misc_feature (2408)..(2408): n is a, c, g, or t
  misc_feature (2411)..(2413): n is a, c, g, or t
  misc_feature (2416)..(2426): n is a, c, g, or t
  misc_feature (2428)..(2428): n is a, c, g, or t
  misc_feature (2430)..(2430): n is a, c, g, or t
  misc_feature (2432)..(2432): n is a, c, g, or t
  misc_feature (2437)..(2437): n is a, c, g, or t
  misc_feature (2439)..(2440): n is a, c, g, or t
  misc_feature (2442)..(2446): n is a, c, g, or t
  misc_feature (2448)..(2451): n is a, c, g, or t
  misc_feature (2453)..(2460): n is a, c, g, or t
  misc_feature (2464)..(2472): n is a, c, g, or t
  misc_feature (2475)..(2476): n is a, c, g, or t
  misc_feature (2479)..(2479): n is a, c, g, or t
  misc_feature (2481)..(2483): n is a, c, g, or t
  misc_feature (2487)..(2490): n is a, c, g, or t
  misc_feature (2492)..(2492): n is a, c, g, or t
  misc_feature (2496)..(2499): n is a, c, g, or t
  misc_feature (2503)..(2503): n is a, c, g, or t
  misc_feature (2505)..(2506): n is a, c, g, or t
  misc_feature (2508)..(2509): n is a, c, g, or t
  misc_feature (2516)..(2520): n is a, c, g, or t
  misc_feature (2523)..(2523): n is a, c, g, or t
  misc_feature (2525)..(2525): n is a, c, g, or t
  misc_feature (2528)..(2529): n is a, c, g, or t
  misc_feature (2533)..(2537): n is a, c, g, or t
  misc_feature (2542)..(2545): n is a, c, g, or t
  misc_feature (2547)..(2547): n is a, c, g, or t
  misc_feature (2549)..(2555): n is a, c, g, or t
  misc_feature (2557)..(2565): n is a, c, g, or t
  misc_feature (2567)..(2567): n is a, c, g, or t
  misc_feature (2570)..(2571): n is a, c, g, or t
  misc_feature (2574)..(2574): n is a, c, g, or t
  misc_feature (2577)..(2577): n is a, c, g, or t
  misc_feature (2580)..(2585): n is a, c, g, or t
  misc_feature (2587)..(2587): n is a, c, g, or t
  misc_feature (2589)..(2590): n is a, c, g, or t
  misc_feature (2593)..(2595): n is a, c, g, or t
  misc_feature (2597)..(2601): n is a, c, g, or t
  misc_feature (2603)..(2605): n is a, c, g, or t
  misc_feature (2609)..(2610): n is a, c, g, or t
  misc_feature (2613)..(2614): n is a, c, g, or t
  misc_feature (2622)..(2625): n is a, c, g, or t
  misc_feature (2627)..(2630): n is a, c, g, or t
  misc_feature (2632)..(2632): n is a, c, g, or t
  misc_feature (2634)..(2634): n is a, c, g, or t
  misc_feature (2636)..(2639): n is a, c, g, or t
  misc_feature (2641)..(2641): n is a, c, g, or t
  misc_feature (2643)..(2646): n is a, c, g, or t
  misc_feature (2648)..(2649): n is a, c, g, or t
  misc_feature (2652)..(2652): n is a, c, g, or t
  misc_feature (2655)..(2656): n is a, c, g, or t
  misc_feature (2659)..(2659): n is a, c, g, or t
  misc_feature (2661)..(2662): n is a, c, g, or t
  misc_feature (2668)..(2668): n is a, c, g, or t
  misc_feature (2670)..(2674): n is a, c, g, or t
  misc_feature (2676)..(2676): n is a, c, g, or t
  misc_feature (2678)..(2681): n is a, c, g, or t
  misc_feature (2683)..(2685): n is a, c, g, or t
  misc_feature (2689)..(2689): n is a, c, g, or t
  misc_feature (2691)..(2692): n is a, c, g, or t
  misc_feature (2694)..(2694): n is a, c, g, or t
  misc_feature (2700)..(2703): n is a, c, g, or t
  misc_feature (2706)..(2706): n is a, c, g, or t
  misc_feature (2708)..(2711): n is a, c, g, or t
  misc_feature (2714)..(2714): n is a, c, g, or t
  misc_feature (2717)..(2721): n is a, c, g, or t
  misc_feature (2724)..(2724): n is a, c, g, or t
  misc_feature (2728)..(2728): n is a, c, g, or t
  misc_feature (2731)..(2733): n is a, c, g, or t
  misc_feature (2735)..(2736): n is a, c, g, or t
  misc_feature (2739)..(2740): n is a, c, g, or t
  misc_feature (2743)..(2748): n is a, c, g, or t
  misc_feature (2750)..(2751): n is a, c, g, or t
  misc_feature (2753)..(2755): n is a, c, g, or t
  misc_feature (2758)..(2761): n is a, c, g, or t
  misc_feature (2763)..(2765): n is a, c, g, or t
  misc_feature (2767)..(2767): n is a, c, g, or t
  misc_feature (2770)..(2776): n is a, c, g, or t
  misc_feature (2778)..(2783): n is a, c, g, or t
  misc_feature (2785)..(2788): n is a, c, g, or t
  misc_feature (2790)..(2795): n is a, c, g, or t
  misc_feature (2797)..(2798): n is a, c, g, or t
  misc_feature (2800)..(2807): n is a, c, g, or t
  misc_feature (2809)..(2809): n is a, c, g, or t
  misc_feature (2811)..(2821): n is a, c, g, or t
  misc_feature (2823)..(2825): n is a, c, g, or t
  misc_feature (2827)..(2829): n is a, c, g, or t
  misc_feature (2831)..(2834): n is a, c, g, or t
  misc_feature (2836)..(2837): n is a, c, g, or t
  misc_feature (2839)..(2840): n is a, c, g, or t
  misc_feature (2842)..(2842): n is a, c, g, or t
  misc_feature (2844)..(2851): n is a, c, g, or t
  misc_feature (2855)..(2862): n is a, c, g, or t
  misc_feature (2864)..(2865): n is a, c, g, or t
  misc_feature (2867)..(2867): n is a, c, g, or t
  misc_feature (2869)..(2876): n is a, c, g, or t
  misc_feature (2878)..(2881): n is a, c, g, or t
  misc_feature (2884)..(2892): n is a, c, g, or t
  misc_feature (2894)..(2895): n is a, c, g, or t
  misc_feature (2899)..(2900): n is a, c, g, or t
  misc_feature (2903)..(2904): n is a, c, g, or t
  misc_feature (2906)..(2912): n is a, c, g, or t
  misc_feature (2914)..(2930): n is a, c, g, or t
  misc_feature (2932)..(2937): n is a, c, g, or t
  misc_feature (2940)..(2949): n is a, c, g, or t
  misc_feature (2951)..(2951): n is a, c, g, or t
  misc_feature (2953)..(2961): n is a, c, g, or t
  misc_feature (2964)..(2967): n is a, c, g, or t
  misc_feature (2969)..(2971): n is a, c, g, or t
  misc_feature (2973)..(2981): n is a, c, g, or t
  misc_feature (2983)..(2984): n is a, c, g, or t
  misc_feature (2987)..(2987): n is a, c, g, or t
  misc_feature (2989)..(2998): n is a, c, g, or t
  misc_feature (3000)..(3001): n is a, c, g, or t
  misc_feature (3003)..(3005): n is a, c, g, or t
  misc_feature (3007)..(3009): n is a, c, g, or t
  misc_feature (3013)..(3019): n is a, c, g, or t
  misc_feature (3021)..(3022): n is a, c, g, or t
  misc_feature (3024)..(3025): n is a, c, g, or t
  misc_feature (3027)..(3027): n is a, c, g, or t
  misc_feature (3029)..(3030): n is a, c, g, or t
  misc_feature (3033)..(3034): n is a, c, g, or t
  misc_feature (3039)..(3039): n is a, c, g, or t
  misc_feature (3041)..(3042): n is a, c, g, or t
  misc_feature (3044)..(3052): n is a, c, g, or t
  misc_feature (3054)..(3058): n is a, c, g, or t
  misc_feature (3060)..(3061): n is a, c, g, or t
  misc_feature (3063)..(3067): n is a, c, g, or t
  misc_feature (3069)..(3071): n is a, c, g, or t
  misc_feature (3074)..(3075): n is a, c, g, or t
  misc_feature (3077)..(3078): n is a, c, g, or t
  misc_feature (3080)..(3086): n is a, c, g, or t
  misc_feature (3088)..(3089): n is a, c, g, or t
  misc_feature (3093)..(3103): n is a, c, g, or t
  misc_feature (3106)..(3107): n is a, c, g, or t
  misc_feature (3110)..(3113): n is a, c, g, or t
  misc_feature (3115)..(3119): n is a, c, g, or t
  misc_feature (3121)..(3123): n is a, c, g, or t
  misc_feature (3125)..(3125): n is a, c, g, or t
  misc_feature (3128)..(3129): n is a, c, g, or t
  misc_feature (3131)..(3142): n is a, c, g, or t
  misc_feature (3145)..(3146): n is a, c, g, or t
  misc_feature (3149)..(3155): n is a, c, g, or t
  misc_feature (3157)..(3157): n is a, c, g, or t
  misc_feature (3160)..(3163): n is a, c, g, or t
  misc_feature (3165)..(3179): n is a, c, g, or t
  misc_feature (3181)..(3183): n is a, c, g, or t
  misc_feature (3187)..(3196): n is a, c, g, or t
  misc_feature (3199)..(3200): n is a, c, g, or t
  misc_feature (3203)..(3207): n is a, c, g, or t
  misc_feature (3209)..(3213): n is a, c, g, or t
  misc_feature (3215)..(3218): n is a, c, g, or t
  misc_feature (3220)..(3228): n is a, c, g, or t
  misc_feature (3231)..(3239): n is a, c, g, or t
  misc_feature (3241)..(3244): n is a, c, g, or t
  misc_feature (3246)..(3258): n is a, c, g, or t
  misc_feature (3260)..(3271): n is a, c, g, or t
  misc_feature (3273)..(3283): n is a, c, g, or t
  misc_feature (3286)..(3291): n is a, c, g, or t
  misc_feature (3294)..(3294): n is a, c, g, or t
  misc_feature (3296)..(3297): n is a, c, g, or t
  misc_feature (3299)..(3305): n is a, c, g, or t
  misc_feature (3309)..(3310): n is a, c, g, or t
  misc_feature (3312)..(3312): n is a, c, g, or t
  misc_feature (3315)..(3317): n is a, c, g, or t
  misc_feature (3319)..(3326): n is a, c, g, or t
  misc_feature (3328)..(3328): n is a, c, g, or t
  misc_feature (3332)..(3335): n is a, c, g, or t
  misc_feature (3338)..(3342): n is a, c, g, or t
  misc_feature (3344)..(3359): n is a, c, g, or t
  misc_feature (3361)..(3368): n is a, c, g, or t
  misc_feature (3370)..(3370): n is a, c, g, or t
  misc_feature (3372)..(3379): n is a, c, g, or t
  misc_feature (3381)..(3403): n is a, c, g, or t
  misc_feature (3405)..(3412): n is a, c, g, or t
  misc_feature (3417)..(3421): n is a, c, g, or t
  misc_feature (3423)..(3473): n is a, c, g, or t
  misc_feature (3475)..(3479): n is a, c, g, or t
  misc_feature (3482)..(3491): n is a, c, g, or t
  misc_feature (3494)..(3499): n is a, c, g, or t
  misc_feature (3501)..(3504): n is a, c, g, or t
  misc_feature (3506)..(3512): n is a, c, g, or t
  misc_feature (3514)..(3514): n is a, c, g, or t
  misc_feature (3516)..(3520): n is a, c, g, or t
  misc_feature (3522)..(3524): n is a, c, g, or t
  misc_feature (3526)..(3527): n is a, c, g, or t
  misc_feature (3530)..(3533): n is a, c, g, or t
  misc_feature (3535)..(3536): n is a, c, g, or t
  misc_feature (3538)..(3541): n is a, c, g, or t
  misc_feature (3543)..(3545): n is a, c, g, or t
  misc_feature (3547)..(3547): n is a, c, g, or t
  misc_feature (3549)..(3549): n is a, c, g, or t
  misc_feature (3553)..(3556): n is a, c, g, or t
  misc_feature (3559)..(3559): n is a, c, g, or t
  misc_feature (3561)..(3570): n is a, c, g, or t
  misc_feature (3573)..(3579): n is a, c, g, or t
  misc_feature (3582)..(3586): n is a, c, g, or t
  misc_feature (3589)..(3590): n is a, c, g, or t
  misc_feature (3592)..(3595): n is a, c, g, or t
  misc_feature (3597)..(3598): n is a, c, g, or t
  misc_feature (3600)..(3601): n is a, c, g, or t
  misc_feature (3603)..(3605): n is a, c, g, or t
  misc_feature (3607)..(3611): n is a, c, g, or t
  misc_feature (3614)..(3616): n is a, c, g, or t
  misc_feature (3618)..(3618): n is a, c, g, or t
  misc_feature (3620)..(3622): n is a, c, g, or t
  misc_feature (3625)..(3625): n is a, c, g, or t
  misc_feature (3627)..(3629): n is a, c, g, or t
  misc_feature (3632)..(3636): n is a, c, g, or t
  misc_feature (3638)..(3644): n is a, c, g, or t
  misc_feature (3646)..(3648): n is a, c, g, or t
  misc_feature (3650)..(3667): n is a, c, g, or t
  misc_feature (3670)..(3688): n is a, c, g, or t
  misc_feature (3690)..(3700): n is a, c, g, or t
  misc_feature (3702)..(3707): n is a, c, g, or t
  misc_feature (3709)..(3716): n is a, c, g, or t
  misc_feature (3718)..(3752): n is a, c, g, or t
  misc_feature (3754)..(3786): n is a, c, g, or t
  misc_feature (3788)..(3854): n is a, c, g, or t
  misc_feature (3856)..(3877): n is a, c, g, or t
  misc_feature (3879)..(3880): n is a, c, g, or t
  misc_feature (3882)..(3887): n is a, c, g, or t
  misc_feature (3889)..(3890): n is a, c, g, or t
  misc_feature (3892)..(3920): n is a, c, g, or t
  misc_feature (3922)..(3971): n is a, c, g, or t
  misc_feature (3973)..(3989): n is a, c, g, or t
  misc_feature (3991)..(3995): n is a, c, g, or t
  misc_feature (3997)..(4000): n is a, c, g, or t
aacgaaagaatttctttttctgttcctaacaccatcaccgttttaccttgagtttgcatatcggcaattttttcttttttatcgcttgaaatgcttccgtgtaattcctcaaaaagattttgacttcccacataatacatttcattatttattttggctttaacgcctttacctgtaatggattgaaaatcctctactgttacttcattgaattttaatccattttcttctgcttttcgcataatcgctgaagcaagagggtgctgcgatcctttttcaatggctgatgttatggttattaattcattttcatttctaccatatgtcacaatgtctgttacagctggaatccctttggttaatgttcctgttttatcaaaggctatcgcttttaagtgtcctgctgcttctaaatggataccacctttaattaatacaccatttttcgctgcatttcctattgctgtaaccacagcaactggagttgagactactaaggcacaaggacaaccaaccactaatacagctaatccttgataaatccattggctccagtctccgccaaataatggtggaactactgcaattaaaagagctagtatgacaatagctggtgtatagtattttgcaaatttatcgacaaacgcttgagagggggcccgttctgcttgggcttcttctaccaagtgaatgatttttgaaagagtggtatcttcaactcgttttgttactttaacctcaagtaacccttcttcattcaaggttcctgcaaatacttcatcatttgtgattttcgttactggaacactttcacctgtaatcgcagcctgatttaatgtcgatgtacctttaaccactattccatccattgctaacttttgaccgggcttaactatcatgatgtctccaacttgaatctcatcaacatgaatcatcatttcttcattgcctcgtcgaattaacgcttcttttggggcaatatccattaaagattcaatagattgacgtgctttatccattgaataacgctctaatgcttcactaatcgcaaataggataacaacggttgccccttcaccccattcaccaataattgcagctcctataatggcaatagtcataagcgtattcatatcgaaatttaatctgcttaaatttttgagacctttaataaataacgaatatccaccgattaaaatggacgctgcataaccaattgtcggtagaacatgctcttcaccatactgctctcctaagaaccagctaactacaagtaaaagagctgatatatataccttaatgttttctttctgcttccaaaaaggttctccttctaccctttgttctttttcatctcgaatttttaaattttcaaatgctcctgctttttctaattcttcaatggttgtcgtccctttaacataaactttagatgctccgaaatttactttcgcatcctgaacaccgggaagttctttaacattattttcaaaaatggctgcacagttagtacaagtaaatccttgaacacgataggctttcatttcttcttcgaactgttttgctttcccactagacattgatcttcacctctttcttaantgccaatgcaatcatcataatttgtctgatatgctcatcatctaatgaataaaatgcaagtttnccctcttttcgaaacttaacaatcccttgcttatggagcgttcgcaggtgatgagaggcatttgcaaccgtaacacctataatatttgcaatatcacacacacacagttcgtcatcttgacacaatgcataggtaatttttgctctatttttatctgcaatagcttttaacatttgggcaacactagaaatatctactgtctgtaaattaccttgtattcgattgaccttttcttcgtcataacaataaatttcacaagtatcttttttaatcatattctcacctcaatatcattcaagtatttgcttgaacatagtatcncccttttcattaattaagtcaagtgtttttttgagtgaataaaaaaattcataaaaaaagacttggagtacccaattctaataacaaaataaccaatctgcataagactttaagtacataacattattagtattgaacttgttgaggaggtgctctatgaatcagcttgaatttcagcgtaatcacctacaaatnnannannnnannganannnncnannantntnnannnnncnnntnnnnntnnncnnnnntnnnnnnnnnnnnnnnnnntntnnntgnnnnnnncntnnnnnnnntnnnnnnnnnnnnnnannntnncnnnnncnnnannaagnanaannntnnagatancnntnnnnnnnnnnnnnntntnnnnntnngnnnntnannnnnnnnnncannnntctnnnntnnnnnanatnnnaannnnnnnnnnnananantccananntnnnnntnnnncnnnnnnnnactnnnnnnnnnaannctntnnntaannnntnaaannnnactntnnanngaaactnnnnnatntntannaaannnnntttcnnnnanannnnnnncnnnnnnnnntnttnnttnctnttnnnnnnanannccnnnannnnncnnntatnngtnnaagaaaannnnannnnantnannnnanannnngnngtnatnnaanannccactncnnnnntntnnnntnnnattntnnanttaaannnnccntnnnnttnaannnnntanattnttnnnannaannttnnnnnnannannnaannnngnnnanttnnnnnnntnnnnnnannnnannnnnntnnannnnnnnntncnnnnnnnnnnntnnnannntnnnngnnannantnnnnnnnnaatnnnnnnnncnntnannnnnnnntnnnnttnnnnnnnnntnncctnntanntnnnnnnnannnnnnnnnnnnnnnnntnnnnnnttnnnnnnnnnntnannnnnnnnnttnnnnannnannnnnnnnnannttntnnnnnnnnnnanntnnntnnnttannnnnnntnnanntnannaannttgtntnncnnnnnnnnntnnnnngnntnnnnnannnaanngnntnnnnnnntnnattnnnnnnnnnnnaannttnnnnannnnntnnncnatnntnnnnnnnnnnnnttnnttnnnnnnnanttnnnncnnnnnnnnnnnnnnncnnnaaannnnnnnnnnatnnaannnnntnnnnntnnnntnnnnnnnnnttnnnnnnnnntnnnntnnnnnnnnnnnnnannnnnnnnnnnntnnnnnnnnnnnttnnnnnnaancnntnnnnnnntttnntnttnnnannnnnnnntnaaannnnttnnnnnannnnnnnnnnnnnnnntnnnnnnnnangnnnnnnnnannnnnnnnnnnnnnnnnnnnnnntnnnnnnnnaaaannnnntnnnnnnnnnnnnnnnnnnnnnnnnnnnnnnnnnnnnnnnnnnnnnnnnnnnannnnnccnnnnnnnnnnaannnnnnannnntnnnnnnnanannnnnannnannaannnnanntnnnntnnnantncaannnntanannnnnnnnnnaannnnnnnaannnnnaannannnnannannannngnnnnnccnnncncnnnttnannnccnnnnncnnnnnnntnnncnnnnnnnnnnnnnnnnnnaannnnnnnnnnnnnnnnnnntnnnnnnnnnnntnnnnnntnnnnnnnnannnnnnnnnnnnnnnnnnnnnnnnnnnnnnnnnnncnnnnnnnnnnnnnnnnnnnnnnnnnnnnnnnnnannnnnnnnnnnnnnnnnnnnnnnnnnnnnnnnnnnnnnnnnnnnnnnnnnnnnnnnnnnnnnnnnnnannnnnnnnnnnnnnnnnnnnnntnnannnnnnannannnnnnnnnnnnnnnnnnnnnnnnnnnnntnnnnnnnnnnnnnnnnnnnnnnnnnnnnnnnnnnnnnnnnnnnnnnnnnntnnnnnnnnnnnnnnnnnannnnnannnn

SEQ ID NO: 237 - DNA, 4000 bp, Escherichia coli
  misc_feature (1989)..(1990): n is a, c, g, or t
  misc_feature (2519)..(2519): n is a, c, g, or t
  misc_feature (2593)..(2593): n is a, c, g, or t
  misc_feature (2598)..(2598): n is a, c, g, or t
  misc_feature (2622)..(2622): n is a, c, g, or t
  misc_feature (2683)..(2683): n is a, c, g, or t
  misc_feature (2742)..(2742): n is a, c, g, or t
  misc_feature (2744)..(2744): n is a, c, g, or t
  misc_feature (2746)..(2746): n is a, c, g, or t
  misc_feature (2752)..(2754): n is a, c, g, or t
  misc_feature (2756)..(2757): n is a, c, g, or t
  misc_feature (2759)..(2759): n is a, c, g, or t
  misc_feature (2761)..(2762): n is a, c, g, or t
  misc_feature (2764)..(2765): n is a, c, g, or t
  misc_feature (2767)..(2769): n is a, c, g, or t
  misc_feature (2771)..(2775): n is a, c, g, or t
  misc_feature (2779)..(2780): n is a, c, g, or t
  misc_feature (2782)..(2782): n is a, c, g, or t
  misc_feature (2784)..(2786): n is a, c, g, or t
  misc_feature (2788)..(2792): n is a, c, g, or t
  misc_feature (2795)..(2797): n is a, c, g, or t
  misc_feature (2801)..(2807): n is a, c, g, or t
  misc_feature (2809)..(2814): n is a, c, g, or t
  misc_feature (2816)..(2817): n is a, c, g, or t
  misc_feature (2820)..(2822): n is a, c, g, or t
  misc_feature (2827)..(2828): n is a, c, g, or t
  misc_feature (2831)..(2833): n is a, c, g, or t
  misc_feature (2836)..(2836): n is a, c, g, or t
  misc_feature (2840)..(2843): n is a, c, g, or t
  misc_feature (2846)..(2849): n is a, c, g, or t
  misc_feature (2851)..(2855): n is a, c, g, or t
  misc_feature (2857)..(2857): n is a, c, g, or t
  misc_feature (2861)..(2863): n is a, c, g, or t
  misc_feature (2865)..(2867): n is a, c, g, or t
  misc_feature (2869)..(2869): n is a, c, g, or t
  misc_feature (2872)..(2872): n is a, c, g, or t
  misc_feature (2874)..(2874): n is a, c, g, or t
  misc_feature (2876)..(2877): n is a, c, g, or t
  misc_feature (2881)..(2889): n is a, c, g, or t
  misc_feature (2893)..(2895): n is a, c, g, or t
  misc_feature (2897)..(2898): n is a, c, g, or t
  misc_feature (2901)..(2901): n is a, c, g, or t
  misc_feature (2903)..(2905): n is a, c, g, or t
  misc_feature (2907)..(2909): n is a, c, g, or t
  misc_feature (2911)..(2914): n is a, c, g, or t
  misc_feature (2916)..(2917): n is a, c, g, or t
  misc_feature (2920)..(2921): n is a, c, g, or t
  misc_feature (2924)..(2927): n is a, c, g, or t
  misc_feature (2929)..(2932): n is a, c, g, or t
  misc_feature (2935)..(2937): n is a, c, g, or t
  misc_feature (2939)..(2941): n is a, c, g, or t
  misc_feature (2944)..(2944): n is a, c, g, or t
  misc_feature (2947)..(2948): n is a, c, g, or t
  misc_feature (2951)..(2955): n is a, c, g, or t
  misc_feature (2958)..(2960): n is a, c, g, or t
  misc_feature (2964)..(2965): n is a, c, g, or t
  misc_feature (2967)..(2972): n is a, c, g, or t
  misc_feature (2975)..(2975): n is a, c, g, or t
  misc_feature (2977)..(2979): n is a, c, g, or t
  misc_feature (2982)..(2987): n is a, c, g, or t
  misc_feature (2989)..(2989): n is a, c, g, or t
  misc_feature (2992)..(2993): n is a, c, g, or t
  misc_feature (2995)..(3000): n is a, c, g, or t
  misc_feature (3006)..(3006): n is a, c, g, or t
  misc_feature (3008)..(3011): n is a, c, g, or t
  misc_feature (3014)..(3014): n is a, c, g, or t
  misc_feature (3016)..(3016): n is a, c, g, or t
  misc_feature (3018)..(3023): n is a, c, g, or t
  misc_feature (3025)..(3026): n is a, c, g, or t
  misc_feature (3030)..(3030): n is a, c, g, or t
  misc_feature (3033)..(3034): n is a, c, g, or t
  misc_feature (3036)..(3036): n is a, c, g, or t
  misc_feature (3040)..(3051): n is a, c, g, or t
  misc_feature (3053)..(3057): n is a, c, g, or t
  misc_feature (3059)..(3060): n is a, c, g, or t
  misc_feature (3062)..(3065): n is a, c, g, or t
  misc_feature (3067)..(3067): n is a, c, g, or t
  misc_feature (3070)..(3070): n is a, c, g, or t
  misc_feature (3072)..(3073): n is a, c, g, or t
  misc_feature (3076)..(3082): n is a, c, g, or t
  misc_feature (3085)..(3090): n is a, c, g, or t
  misc_feature (3096)..(3096): n is a, c, g, or t
  misc_feature (3100)..(3100): n is a, c, g, or t
  misc_feature (3108)..(3111): n is a, c, g, or t
  misc_feature (3113)..(3113): n is a, c, g, or t
  misc_feature (3116)..(3121): n is a, c, g, or t
  misc_feature (3125)..(3127): n is a, c, g, or t
  misc_feature (3134)..(3138): n is a, c, g, or t
  misc_feature (3141)..(3144): n is a, c, g, or t
  misc_feature (3148)..(3148): n is a, c, g, or t
  misc_feature (3150)..(3151): n is a, c, g, or t
  misc_feature (3153)..(3154): n is a, c, g, or t
  misc_feature (3156)..(3157): n is a, c, g, or t
  misc_feature (3159)..(3160): n is a, c, g, or t
  misc_feature (3162)..(3162): n is a, c, g, or t
  misc_feature (3166)..(3166): n is a, c, g, or t
  misc_feature (3169)..(3169): n is a, c, g, or t
  misc_feature (3172)..(3173): n is a, c, g, or t
  misc_feature (3175)..(3175): n is a, c, g, or t
  misc_feature (3177)..(3178): n is a, c, g, or t
  misc_feature (3181)..(3181): n is a, c, g, or t
  misc_feature (3184)..(3185): n is a, c, g, or t
  misc_feature (3187)..(3187): n is a, c, g, or t
  misc_feature (3190)..(3191): n is a, c, g, or t
  misc_feature (3194)..(3195): n is a, c, g, or t
  misc_feature (3197)..(3197): n is a, c, g, or t
  misc_feature (3199)..(3199): n is a, c, g, or t
  misc_feature (3201)..(3202): n is a, c, g, or t
  misc_feature (3207)..(3209): n is a, c, g, or t
  misc_feature (3212)..(3212): n is a, c, g, or t
  misc_feature (3214)..(3215): n is a, c, g, or t
  misc_feature (3218)..(3218): n is a, c, g, or t
  misc_feature (3221)..(3230): n is a, c, g, or t
  misc_feature (3235)..(3236): n is a, c, g, or t
  misc_feature (3239)..(3239): n is a, c, g, or t
  misc_feature (3241)..(3241): n is a, c, g, or t
  misc_feature (3243)..(3244): n is a, c, g, or t
  misc_feature (3246)..(3246): n is a, c, g, or t
  misc_feature (3257)..(3257): n is a, c, g, or t
  misc_feature (3271)..(3271): n is a, c, g, or t
  misc_feature (3287)..(3287): n is a, c, g, or t
  misc_feature (3291)..(3291): n is a, c, g, or t
  misc_feature (3293)..(3293): n is a, c, g, or t
  misc_feature (3295)..(3296): n is a, c, g, or t
  misc_feature (3301)..(3301): n is a, c, g, or t
  misc_feature (3328)..(3328): n is a, c, g, or t
  misc_feature (3330)..(3330): n is a, c, g, or t
  misc_feature (3333)..(3334): n is a, c, g, or t
  misc_feature (3337)..(3337): n is a, c, g, or t
  misc_feature (3340)..(3340): n is a, c, g, or t
  misc_feature (3347)..(3347): n is a, c, g, or t
  misc_feature (3351)..(3352): n is a, c, g, or t
  misc_feature (3358)..(3358): n is a, c, g, or t
  misc_feature (3364)..(3367): n is a, c, g, or t
  misc_feature (3378)..(3378): n is a, c, g, or t
  misc_feature (3399)..(3399): n is a, c, g, or t
  misc_feature (3406)..(3407): n is a, c, g, or t
  misc_feature (3412)..(3412): n is a, c, g, or t
  misc_feature (3418)..(3418): n is a, c, g, or t
  misc_feature (3425)..(3425): n is a, c, g, or t
  misc_feature (3427)..(3427): n is a, c, g, or t
  misc_feature (3440)..(3440): n is a, c, g, or t
  misc_feature (3448)..(3448): n is a, c, g, or t
  misc_feature (3475)..(3475): n is a, c, g, or t
  misc_feature (3511)..(3511): n is a, c, g, or t
  misc_feature (3520)..(3520): n is a, c, g, or t
  misc_feature (3529)..(3529): n is a, c, g, or t
  misc_feature (3531)..(3531): n is a, c, g, or t
  misc_feature (3694)..(3694): n is a, c, g, or t
  misc_feature (3698)..(3698): n is a, c, g, or t
tcagctaaaagtaatgcgtctccttagctcagctggatagcgcagccgacttctaatcggcaggtcgagggttcgaatccttcaggggacgccaactttataatgctccttctcgtcgaaaatcagcagacaataaatcgtagcttacgtcagtgtccgaaattcggagggggtagctcaaccctgcaaaaggagaccaaggcgcaaattgccatgatgttcttaaatatccctgccaccgtcgccgcgtgtaaggctggccttattcgcttccgcccgcgaatgggtggacgccgacatccaaactggactctcatgcgtccgcgcttatcattgggcagctgctaaaaacgttgaaatccgagtgtttaaatttcaaacgagttattaattttatccagaatagcttttgcctgaaggccgtccgagccccgtttttcgtcaaaatattttgggatggaattgaaagcccttaaaagcccgccattcattaagtattctggaaaagtcttatttcttagcctctggcttccaagttcaaccgacttaacattggctttagaccattttttggtggcaggtttcggtaacttttgtccaacgacaaacaggatgttggagttctctaaaaactcaatttcgaagtactcttccaaaagcgcagtcagtgatagagatgtataataggcaagatgtgccgcgaaaaaatggtttgttggtgaggttttcttactctcaagattcggcacctccaccactaaatgacccccatcatttaaagtttcatacatttttttaataacgtttcgtggttgagcaaggtgctcaagaacgtggaataaggtgatagtgttaaatttttgtttctgtgaaatggcagacagatcttttacttctagtggtacttggtacgcatcacgtccaaattcgagataaccaatgtttagatcgatgccgctggctttgaacccattggccgttgccaaatatgtaaactcacctccgccggcgccaacatccaggagtgatgatccggtttgcacgaagggcttcatcttttgaagtcgctcggcagccattttcccagcacgatagatgtgctttggtttgggctgcgaaatattcttgtattttttgcgataggctattgagtaaaattcagacaattcgtcagcagttggcatttgtgcggtctgaactgtgccgcaggtttggcagcaagcaattctaattggctcagaggttttggcgtcctttaagttgcgatggcacgccgtagatccgctgcaaattagacatgagaaattcaagagcgccttcattcagttaaaacctctcaaaaactacttgataggctaaatgatatcgacagaccttttgtcccaaaaccatttttcaagtctaagtcttgataggcaagccgggtatttaaaactatttggtctaaaggcttcgtgattgatatttcagctgttgtccctttcttgcgtgtgctggaaagccgatgcgacggaaggttatctctattaagatcgattttggaggctgcaaggtcgatgtttagcccgctcacttcatgctttacgtacaggcttaatgccttgctctcagtgtcgatggaatggcccataacacgcccatggtgtgtatagcctgacgtgtagtgcccatttcgatacgcggtgttgggcccgcaccatccgccttctgtcctgtccaccgtagtatcggccgcttcgatcgtgataatgagcggccggccttgcaaacgggcctctttttctattccaaaaagtttcgagtagcaggacggcagacctccagattcatcttcgccatatccttgtaaataaaaacgataggagcgatcactaaaactaggcgtgtaagatgcactaaaaccaccgagctggttgtagtcgaattcatcggaatggttttcaccggaaagcattttcaagaaaccattaggcgagctgttgaaatttnnccccccccattgcgcggtgcggaagagcccaagatccagatctctagttggggaaaatttgaaacgtgcgccaaaaagcattgcaccgggaacacccctggcctgctctaattgcccgttgaaggtctccgcctctatcggaccaaagtatttcaacagcggcacgtctaaagcaaaatcggtgcggtagcgcaaatataccgatggaacaggccgagcattctgagacaaaatgagcgaattgtaacgggacggagaccagtgtcggccttttttgcccaccccaaacaaccaattctgggatttatattcaatgtaggaaccatcccacattatatccccgtcggttgccgtagcagataaatttgcataaagatcttcgactgtgaataatttttggagtttaactccgctatcgtcgcgacgccaaatactggggctgtcacctgaatttaattgcaaagtcacctcatttgcagaggataaactttgctctttttgcagttcgcttgctgataatttaacagcngacaaatttaaaattaaggctattaaaagggacaaaaaaaatggcttgggaaagaacatattcataataacatnttctnccgtttagtttcatttcgagacgnattacatccgttgacattattacgcaagcccttcgcaaaaatactcggaacgtcgctttcngattacacttcaattgttgcgaacaatgtttagccttatattactacgcttcaacatgngntntttttnnntnnananntnntnnntnnnnntttnncnannntnnnnnaannntttnnnnnnntnnnnnnannaannntaatnntgnnnacnccannnnaannnntnnnnnanactnnnannnangangnannaaannnnnnnnncgannntnnaanannncnnngnnnntnnttnntannnntnnnngcnnntnnnttnttnnttnnnnntgnnngtgnntnnnnnntcntnnnggnnnnnnantanncnnnnnntgcggntnnnnaantnannnnnncnnctanttnnanaatnnnnnnnnnnnngnnnnncnncnnnncnctngnnggnnnnnnnggnnnnnnggccancttngctggatnnnngngcnnnnnngctnnntcaactnnnnnaannnntatngnnanngnnannantttnatngannancnngangcnnanttnnatnncnangnngaccnnnacntnnacncannnnnnnnnnacgcnntcnancnncnttggaagtccntcataaagcgtgcnatcggctggcaaaaancttncncnnacccncaagaggccatgtggcagggcatcgtngnaanntanacnaaaagtnttgnnctggangaaacnnnngacggggctgntaaaattgtgaccacgcatgngaacccnnagcgngcggcngaaattncnaacacaattatgnatgaaatnatctccactttagaaaataagagaaanactgaacaggacgcgcagctgtcctacctgtccaanacattggcnaaggccctnantgacttggaggcgtcacagtctagtctcaagcaattcgccctagagaacagcgcactgcccctagaaagttttgccgccaggtctttgcagcttgatggattgcgtgaacaactgagccgaaccaccgagctgcatgatgcggttgtcgtgctttcgtcaatnctgnagaataagacaacagatcaggagagttatctggcgctgcgcaagcagtttcccatcgttgatcaagttgagttccgccgggtcttgggacaaaatgaaattatcggctcctggagttggccggaggctagctctgtggacgcagttgttgatacgttgactgaacgcaaaagtagactgcagtcgcaaataaatgcggcgcagatagatgcggagcgcgaaggtctggccctagaaacttacgcgaaattggagcgtgaagctaaaattgccgaggcgacctacaccgtaatgattgagcaa

SEQ ID NO: 238 - DNA, 4000 bp, Escherichia coli
  misc_feature (1)..(30): n is a, c, g, or t
  misc_feature (32)..(44): n is a, c, g, or t
  misc_feature (46)..(46): n is a, c, g, or t
  misc_feature (48)..(70): n is a, c, g, or t
  misc_feature (72)..(72): n is a, c, g, or t
  misc_feature (74)..(77): n is a, c, g, or t
  misc_feature (79)..(102): n is a, c, g, or t
  misc_feature (104)..(142): n is a, c, g, or t
  misc_feature (144)..(178): n is a, c, g, or t
  misc_feature (180)..(187): n is a, c, g, or t
  misc_feature (189)..(194): n is a, c, g, or t
  misc_feature (196)..(211): n is a, c, g, or t
  misc_feature (213)..(303): n is a, c, g, or t
  misc_feature (305)..(323): n is a, c, g, or t
  misc_feature (326)..(345): n is a, c, g, or t
  misc_feature (347)..(354): n is a, c, g, or t
  misc_feature (356)..(365): n is a, c, g, or t
  misc_feature (367)..(394): n is a, c, g, or t
  misc_feature (396)..(396): n is a, c, g, or t
  misc_feature (399)..(426): n is a, c, g, or t
  misc_feature (428)..(474): n is a, c, g, or t
  misc_feature (476)..(495): n is a, c, g, or t
  misc_feature (497)..(502): n is a, c, g, or t
  misc_feature (504)..(505): n is a, c, g, or t
  misc_feature (507)..(508): n is a, c, g, or t
  misc_feature (510)..(510): n is a, c, g, or t
  misc_feature (512)..(519): n is a, c, g, or t
  misc_feature (521)..(529): n is a, c, g, or t
  misc_feature (531)..(532): n is a, c, g, or t
  misc_feature (536)..(536): n is a, c, g, or t
  misc_feature (538)..(551): n is a, c, g, or t
  misc_feature (553)..(567): n is a, c, g, or t
  misc_feature (569)..(586): n is a, c, g, or t
  misc_feature (588)..(589): n is a, c, g, or t
  misc_feature (591)..(594): n is a, c, g, or t
  misc_feature (596)..(605): n is a, c, g, or t
  misc_feature (608)..(620): n is a, c, g, or t
  misc_feature (622)..(626): n is a, c, g, or t
  misc_feature (629)..(631): n is a, c, g, or t
  misc_feature (633)..(642): n is a, c, g, or t
  misc_feature (645)..(651): n is a, c, g, or t
  misc_feature (653)..(655): n is a, c, g, or t
  misc_feature (657)..(658): n is a, c, g, or t
  misc_feature (662)..(662): n is a, c, g, or t
  misc_feature (664)..(669): n is a, c, g, or t
  misc_feature (673)..(673): n is a, c, g, or t
  misc_feature (675)..(679): n is a, c, g, or t
  misc_feature (684)..(684): n is a, c, g, or t
  misc_feature (688)..(689): n is a, c, g, or t
  misc_feature (692)..(692): n is a, c, g, or t
  misc_feature (698)..(698): n is a, c, g, or t
  misc_feature (700)..(700): n is a, c, g, or t
  misc_feature (707)..(707): n is a, c, g, or t
  misc_feature (709)..(709): n is a, c, g, or t
  misc_feature (711)..(711): n is a, c, g, or t
  misc_feature (714)..(715): n is a, c, g, or t
  misc_feature (717)..(720): n is a, c, g, or t
  misc_feature (722)..(723): n is a, c, g, or t
  misc_feature (725)..(725): n is a, c, g, or t
  misc_feature (727)..(728): n is a, c, g, or t
  misc_feature (730)..(731): n is a, c, g, or t
  misc_feature (734)..(734): n is a, c, g, or t
  misc_feature (736)..(738): n is a, c, g, or t
  misc_feature (741)..(742): n is a, c, g, or t
  misc_feature (744)..(745): n is a, c, g, or t
  misc_feature (749)..(749): n is a, c, g, or t
  misc_feature (752)..(753): n is a, c, g, or t
  misc_feature (757)..(763): n is a, c, g, or t
  misc_feature (765)..(768): n is a, c, g, or t
  misc_feature (770)..(778): n is a, c, g, or t
  misc_feature (784)..(785): n is a, c, g, or t
  misc_feature (788)..(789): n is a, c, g, or t
  misc_feature (792)..(792): n is a, c, g, or t
  misc_feature (812)..(812): n is a, c, g, or t
  misc_feature (880)..(880): n is a, c, g, or t
  misc_feature (967)..(967): n is a, c, g, or t
  misc_feature (985)..(985): n is a, c, g, or t
  misc_feature (994)..(994): n is a, c, g, or t
  misc_feature (1272)..(1272): n is a, c, g, or t
  misc_feature (1714)..(1714): n is a, c, g, or t
  misc_feature (2038)..(2038): n is a, c, g, or t
  misc_feature (2047)..(2047): n is a, c, g, or t
  misc_feature (2230)..(2230): n is a, c, g, or t
  misc_feature (2329)..(2330): n is a, c, g, or t
  misc_feature (2348)..(2352): n is a, c, g, or t
  misc_feature (2354)..(2354): n is a, c, g, or t
  misc_feature (2357)..(2359): n is a, c, g, or t
  misc_feature (2377)..(2377): n is a, c, g, or t
  misc_feature (2412)..(2415): n is a, c, g, or t
  misc_feature (2443)..(2443): n is a, c, g, or t
  misc_feature (2530)..(2533): n is a, c, g, or t
  misc_feature (2535)..(2536): n is a, c, g, or t
  misc_feature (2539)..(2539): n is a, c, g, or t
  misc_feature (2542)..(2542): n is a, c, g, or t
  misc_feature (2545)..(2545): n is a, c, g, or t
  misc_feature (2548)..(2548): n is a, c, g, or t
  misc_feature (2552)..(2552): n is a, c, g, or t
  misc_feature (2555)..(2555): n is a, c, g, or t
  misc_feature (2558)..(2561): n is a, c, g, or t
  misc_feature (2563)..(2563): n is a, c, g, or t
  misc_feature (2948)..(2948): n is a, c, g, or t
  misc_feature (2959)..(2959): n is a, c, g, or t
  misc_feature (2990)..(2990): n is a, c, g, or t
  misc_feature (3017)..(3017): n is a, c, g, or t
  misc_feature (3023)..(3023): n is a, c, g, or t
  misc_feature (3027)..(3027): n is a, c, g, or t
  misc_feature (3147)..(3147): n is a, c, g, or t
  misc_feature (3169)..(3169): n is a, c, g, or t
  misc_feature (3188)..(3188): n is a, c, g, or t
  misc_feature (3192)..(3192): n is a, c, g, or t
  misc_feature (3213)..(3213): n is a, c, g, or t
  misc_feature (3217)..(3217): n is a, c, g, or t
  misc_feature (3219)..(3219): n is a, c, g, or t
  misc_feature (3224)..(3224): n is a, c, g, or t
  misc_feature (3226)..(3226): n is a, c, g, or t
  misc_feature (3229)..(3229): n is a, c, g, or t
  misc_feature (3231)..(3231): n is a, c, g, or t
  misc_feature (3233)..(3233): n is a, c, g, or t
  misc_feature (3244)..(3244): n is a, c, g, or t
  misc_feature (3246)..(3247): n is a, c, g, or t
  misc_feature (3257)..(3257): n is a, c, g, or t
  misc_feature (3260)..(3260): n is a, c, g, or t
  misc_feature (3262)..(3262): n is a, c, g, or t
  misc_feature (3265)..(3265): n is a, c, g, or t
  misc_feature (3270)..(3270): n is a, c, g, or t
  misc_feature (3436)..(3436): n is a, c, g, or t
  misc_feature (3485)..(3486): n is a, c, g, or t
  misc_feature (3537)..(3538): n is a, c, g, or t
  misc_feature (3723)..(3723): n is a, c, g, or t
  misc_feature (3731)..(3732): n is a, c, g, or t
  misc_feature (3734)..(3738): n is a, c, g, or t
  misc_feature (3740)..(3744): n is a, c, g, or t
  misc_feature (3747)..(3747): n is a, c, g, or t
  misc_feature (3750)..(3760): n is a, c, g, or t
  misc_feature (3762)..(3769): n is a, c, g, or t
  misc_feature (3772)..(3799): n is a, c, g, or t
  misc_feature (3801)..(3801): n is a, c, g, or t
  misc_feature (3804)..(3812): n is a, c, g, or t
  misc_feature (3815)..(3816): n is a, c, g, or t
  misc_feature (3818)..(3826): n is a, c, g, or t
  misc_feature (3828)..(3831): n is a, c, g, or t
  misc_feature (3833)..(3847): n is a, c, g, or t
  misc_feature (3849)..(3852): n is a, c, g, or t
  misc_feature (3854)..(3859): n is a, c, g, or t
  misc_feature (3861)..(3884): n is a, c, g, or t
  misc_feature (3886)..(3891): n is a, c, g, or t
  misc_feature (3893)..(3893): n is a, c, g, or t
  misc_feature (3895)..(3896): n is a, c, g, or t
  misc_feature (3898)..(3920): n is a, c, g, or t
  misc_feature (3922)..(3939): n is a, c, g, or t
  misc_feature (3941)..(3944): n is a, c, g, or t
  misc_feature (3946)..(3948): n is a, c, g, or t
  misc_feature (3950)..(3961): n is a, c, g, or t
  misc_feature (3963)..(3971): n is a, c, g, or t
  misc_feature (3973)..(3973): n is a, c, g, or t
  misc_feature (3975)..(3986): n is a, c, g, or t
  misc_feature (3988)..(4000): n is a, c, g, or t
nnnnnnnnnnnnnnnnnnnnnnnnnnnnnnannnnnnnnnnnnncntnnnnnnnnnnnnnnnnnnnnnnntngnnnngnnnnnnnnnnnnnnnnnnnnnnnnannnnnnnnnnnnnnnnnnnnnnnnnnnnnnnnnnnnnnngnnnnnnnnnnnnnnnnnnnnnnnnnnnnnnnnnnntnnnnnnnnannnnnncnnnnnnnnnnnnnnnntnnnnnnnnnnnnnnnnnnnnnnnnnnnnnnnnnnnnnnnnnnnnnnnnnnnnnnnnnnnnnnnnnnnnnnnnnnnnnnnnnnnnnnnnnnngnnnnnnnnnnnnnnnnnnnagnnnnnnnnnnnnnnnnnnnngnnnnnnnngnnnnnnnnnnannnnnnnnnnnnnnnnnnnnnnnnnnnngnggnnnnnnnnnnnnnnnnnnnnnnnnnnnntnnnnnnnnnnnnnnnnnnnnnnnnnnnnnnnnnnnnnnnnnnnnnnntnnnnnnnnnnnnnnnnnnnntnnnnnnanntnntntnnnnnnnnannnnnnnnnanntttnannnnnnnnnnnnnntnnnnnnnnnnnnnnngnnnnnnnnnnnnnnnnnntnntnnnnannnnnnnnnnttnnnnnnnnnnnnnannnnnttnnnannnnnnnnnnttnnnnnnngnnngnntttnannnnnnaaantnnnnnaaaanaagnnaantaaaananaccagtnantnttnnannnncnngnannannaanannnttnntnnaganacnnctannnnnnntnnnncnnnnnnnnngggatnngannttnaaaagggttcaggttttaangttataggatcaagcgaataagtgcatatggtggatgccttggcgattacaggcgatgaaggacgtgntagcctgcgtaaagtttcggggagctggcaaataagctttgatccggaaatgtccgaatggggaaacccacccgcaagggtaaccgntcctgaatatataggganatggtggcnaaccgagtgaactgaaacatctaagtagctcgaggaaaagaaatcaaccgagattccgtaagtagtggcgagcgaacatggaatagcctgttatttttagcacatgcgatagtagaacggaatggaaagtccggccatagagggtgatagccccttatacgaaatcccgtgtgtggaactagggtaacgacaagtagggcggggcacgagaaaccttgtctgaacatggggggaccatcctccaaggctaaatactcgtaatcgaccgatagtgaacnagtaccgtgagggaaaggcgaaaagaaccccgggaggggagtgaaatagatcctgaaaccgtatgcatacaaacagtgggagcggacttgttccgtgactgcgtaccttttgtataatgggtcagcgacttacattcagtagcaagcttaaccgataggggaggcgtagcgaaagcgagtccgaatagggcgtctagttgctgggtgtagacccgaaaccaagtgatctatccatggccaggatgaaggtgccgtaacaggtactggaggtccgaacccacaaatgttgaaaaatttggggatgagctgtggataggggtgaaaggctaaacaaacttggaaatagctggttctctccgaaaactatttaggtagtgcctcgtatatcattctcgggggtagagcactgttatggctagggggttcataagaacttaccaanccattgcaaactccgaatactgagaaatgcaattacgggagacagaccatgggtgctaacgtccgtggtcaagagggaaacaacccagaccgacagctaaggtcccaaatgacgtgctaagtggaaaacgaagtgggaaggcatagacagccaggatgttggcttagaagcagccatcatttaaagaaagcgtaatagctcactggtcgagtcgtcctgcgcggaagatgtaacggggctaagcacgtaaccgaagcttcggatgctgcattcttcggaatgtatgcatggtaggagagcgttctgtaggcctgcgaaggtgtnctgtgaggnatgctggaggtatcagaagtgcgaatgctgacatgagtagcgataaagggagtgaaaagctccctcgccgaaaacccaaggtttcctgcgcaacgttcatcggcgcagggtgagtcggcccctaaggtgaggcagagatgcgtagctgatgggaaacaggttaatattcctgtacctgtatanaatgcgatgtggggacggagaaggttaggtcagccgggtgttggatgtcccggttcaagcgtgtaggcagattctttaggcaaatccggagagtcaatnntgaggcgtgataacgagnnnnntngtnnntgaagtgattgataccangcttccaagaaaagccactaagcttcagttgtatnnnnaccgtaccgcaaaccgacacaggtgggnaggatgagaattctaaggcgcttgagagaacccgggagaaggaactcggcaaattagcaccgtaacttcgggagaaggtgcgccccnnnngnntgnagnganttnctcntgnagnnnnanggggttgcagtgaaaaggtggctgcgactgtttaataaaaacacagcactctgcaaacacgaaagtggacgtatagggtgtgacgcctgcccggtgctggaagattaaatgatggggtgcaagctcttgattgaagtcccagtaaacggcggccgtaactataacggtcctaaggtagcgaaattccttgtcgggtaagttccgacccgcacgaatggcgtaacgatggccacactgtctcctctcgggactcagcgaagttgaaatgtttgtgaagatgcaatctacccgcggctagacggaaagaccccatgaacctttactgtagctttacattggactttgacaagatttgtgtaggataggtgggagactatgaagcggngtcgctagatntcgtggagtcaaccttgaaataccaccctgntgttgttgaggttctaacctaggtccntaatcnggantggggaccgtgtatggtgggcagtttgactggggcggtctcctcccaaagagtaacggaggagtgcgaaggtaacctaggtacggtcggaaatcgtactgatagtgcaatggcataaggntgcttgactgcgagacggacangtcgagcaggtgcgaaagnaggncatagtgatccggtggttctntatngnagggncntcncncnacggataaaangnnctctgggganaanangcngattnctcccaagagttcatatcgacgggggagtttggcacctcgatgtcggctcatcacatcctggggctgtagccggtcccaagggtatggctgttcgccatttaaagtggtacgtgagctgggtttaaaacgtcgtgagacagtttggtccctatctgccgtgggcgntggaaatttgaagggacctgctcctagtacgagaggaccggagtggacnnatctctggtggaccggttatcacgccagtggtatagccgggtagctaaatnnggaagagataaacgctgaaagcatctaagcgtgaaactcgccttgagatgagatttccctgggggtttaacccccctaaagagtcgttcgagaccaggacgttgataggacggatgtggaagcgcagtaatgcgttaagctgaccgttactaattgctcgtgaggcttgatcctataaccttaanacttgaannannnnnannnnntgnttnnnnnnnnnnnannnnnnnnaannnnnnnnnnnnnnnnnnnnnnnnnnnnangannnnnnnnnttnntnnnnnnnnntnnnnannnnnnnnnnnnnnnannnngnnnnnnannnnnnnnnnnnnnnnnnnnnnnntnnnnnnanannannnnnnnnnnnnnnnnnnnnnnnannnnnnnnnnnnnnnnnncnnnncnnncnnnnnnnnnnnngnnnnnnnnncnannnnnnnnnnnngnnnnnnnnnnnnn

SEQ ID NO: 239 - DNA, 4000 bp, Escherichia coli
  misc_feature (854)..(854): n is a, c, g, or t
  misc_feature (873)..(873): n is a, c, g, or t
  misc_feature (876)..(876): n is a, c, g, or t
  misc_feature (1202)..(1202): n is a, c, g, or t
  misc_feature (1933)..(1933): n is a, c, g, or t
  misc_feature (1937)..(1937): n is a, c, g, or t
  misc_feature (1939)..(1939): n is a, c, g, or t
  misc_feature (1945)..(1946): n is a, c, g, or t
  misc_feature (1957)..(1957): n is a, c, g, or t
  misc_feature (1961)..(1961): n is a, c, g, or t
  misc_feature (1966)..(1967): n is a, c, g, or t
  misc_feature (1987)..(1988): n is a, c, g, or t
  misc_feature (1997)..(1997): n is a, c, g, or t
  misc_feature (2005)..(2005): n is a, c, g, or t
  misc_feature (2253)..(2253): n is a, c, g, or t
  misc_feature (2283)..(2283): n is a, c, g, or t
  misc_feature (2286)..(2286): n is a, c, g, or t
  misc_feature (2290)..(2293): n is a, c, g, or t
  misc_feature (2338)..(2338): n is a, c, g, or t
  misc_feature (2528)..(2528): n is a, c, g, or t
  misc_feature (2544)..(2544): n is a, c, g, or t
  misc_feature (3801)..(3801): n is a, c, g, or t
gaattgaatgactccattagcttgtcaaaatcaataaccccagaatcatatcttttgagttttgtttttgtatttttaagaaaccttttaacagtgctttttctgactagtctatgagcattaaaaatcctgtagccgagaaaatcaattcctaattcaattggaaagatgttggctttttttggatgaagtgttaatttcattgaagcaaaaaatgttttgatattttcttttacttcatgcaagtattgttttgactcatgcaatatgacaaaatcatccatatatctaacataatactttattttcagttcatattttatgtactcatctaatttgttcagataaatattggcaaataattgagaagttaaattgccaattggaattcctttttgttgagaactttgtatttttggttcttgacaattagaaaaattagatttttctgagtctgtactgtctattatgctgtctaacaactgcaataattttttgtctgcaattttttctcttagaatttttttcagaatttcatgatttacacttggaaagtattttgaaacatcgcattttaagacataatatttattgccagcttttcttatgaatttttgaattctatttgcacttgcatgagtaccttttccctttctacaagcataagaatcatagataaatcttttttcaaatattggctcaattatattgcatacagcatgatggattattctgtccctgaaaggcagggcagagattttcctttcttttggctcaaaaataataaaatgcctgtattttcctgttttaaaagtctggttttttaattcatcttgcagtttaagcaattcatnttctaaattataagtaaanctnagaacttctgctacatcattctttcctcttcttgcttttagaaaagcattatgaagattttcatatttgcagacttcctgaaacaaatttttatgtgttttcatatcatcctcttttttattataaaaaaccagcagggttcaatcagcattttgcttcatcttactaaccactggtttttgatttagtatttggctttacagcctggatttggattgatgtagtctcattgcactgttcattatctccgtaaagatatgaatctggcttttggactattgcagcagcgaaagccaatgttgttgttcgtattcgtgggggcattnttcagattcgcacaaaaagggcctgcattagccccattattccaattgccaccgcgtttcacagcgcgctgctaatcacaatccaacccattcctatgaaggaatatcagtatattttttgtaccaacctcccagcattctgccgatttcatttatcaagttagagccatattcatattgagcaaaactaataaactgcaagtccttggaaagcctgaaaaagattcttaatttatccagttcaataattgctttttgcagtgattcttttttatcaaaatcgttgtttgattgaatgatgctttccaaaaaatttagggaagtgttttctattttttgtgccattgtgtatttttcagatttagggaatttattcagcaaggtatgaacccatttgataaattcgtatgttttgtggaaaatcttcatatcttcaatcattgtaatacctctttgaatgtgataaattctgataaattgagaaaaaagtgctttgcccccttccaattgtgaaaggcagactctttttttcctgtatttcattttttcctgtctcttgccttttattttttaaattccccattttgttcaaatactcttcagttatcattttctctttctccctttttcatattttttcttcacctatttttttcgcgcgccccttcgggctttttggattaccagattccagacgccagattaactactgcagcagcgaaagccaatgntgtngntcgtanncgtgggggcantatncaganncgcacaaaaagggcctgcannagccccatnaccccaancgccaccgcgtagcacagcgcgccctgttgttgtagttggaaaataagttccatcatttccatatattgcagttgctgctcctgttgttgtctgccatcctcctgttgaatttgcatatttccatcctgcagtgccatcaggatttgtaacatcaactgtttcattagtccactcccaaacatttcctgtttggtcatagacgccttctgatgaataacagccagaaggacagccatttttattgcancctgtctggcatgcttctccgcttccaggnctnttannnnaacaataagtacttgagccagtcacacaataataagggcttacancaaggtttgttgctaaattgtaatattctccttgcatattagcagctccaagccattcttcatctgtgcataaatgtttttctgcattactgcaagctgttcttgcttttatctggctaatataaacccagactgttttgtttaaagcagagccagcttttccacctgcagcaataagagtgtcagtatntgcagcagattgaggnggtgttgcttctgagccatctgaattcaaagcatgggcttcatacttgtcaatgcaatatccattcaacttgttgatgtaagccatgccttctgggcattggattctttgctcatgccaggttaaattttgataagaagagtttcctccagtatctaatatcttgcttgtgtagtttccagaatcataagagagattaagctgaactgcattatttgttgtattatattcagtttggttgtatgttccttcatcaaaatctgcttgtgttaaggtttgaaaaagcgatgcaacactataaactaagccagttaaattaaatcttgaagaagtaacattagcattttctggaagagcgagataatctgtctgatttcctgcttctgtaaaagtcaaaaccttagaagattctcctccgaataaagtgtttagaactactgcacctgcaatagaaataataacagagagaaataagattatgaaaattgttaaaactctctttttattgcttcttttctgcttcgcccccccaattggaaggtcagggtttttatttatcctctttttttggtttggcatttttatcacttgtttaattatagttgtggtggtttaataaattttttcttttatttttgttctgattttttcaatcttttctgaatccaacccactaagcaaagttttgcatttcaatatgaactttttaacatttgattcatcttctaatacaatatttttaagataatattgcgcctgaatcctgtctccttttaatttttttaaatactccgtctcatctatatcaaaaccaaataattccatcagctctaaactgcaatcatgaatttcacatcttattccgcatcgcattagcaaggcataaaaggcattataacacgcataataagcagttattaatttccattttcctttagcagaaaaaacattttctaaagtttcatctgcttcttttacataagattcgcttaaatggggctttagctcaattaatttaatccctttattctgcttcaagcaccactttattttatcttctttcatattctctcctccaaaaaatatctacaatttttgaaacctcgccaaataaaacatgatttttcattatctctattgataaaggatttttggattttagtatcctggcaaattcaatataagacacatgatgttcattaatttgtataatctgtttttgttttattttcttaatttcctctttattacacctgcntaaaattacaatatctaggtcggattctttactgaaactatcggaagcataggagccaaaaataatcaaactttcgcaatatttcaagatttcatttattactacagggatttcttttatttttaactgaaactgcagggctttttgattttcaataaagtttaagattatttttgttgtttgtttttcaagatcaaaa

SEQ ID NO: 240 - DNA, 4000 bp, Escherichia coli
  misc_feature (25)..(25): n is a, c, g, or t
  misc_feature (77)..(77): n is a, c, g, or t
  misc_feature (394)..(394): n is a, c, g, or t
  misc_feature (476)..(476): n is a, c, g, or t
  misc_feature (478)..(478): n is a, c, g, or t
  misc_feature (488)..(488): n is a, c, g, or t
  misc_feature (573)..(573): n is a, c, g, or t
  misc_feature (575)..(575): n is a, c, g, or t
  misc_feature (589)..(589): n is a, c, g, or t
  misc_feature (591)..(592): n is a, c, g, or t
  misc_feature (1981)..(1981): n is a, c, g, or t
  misc_feature (1990)..(1990): n is a, c, g, or t
  misc_feature (2508)..(2508): n is a, c, g, or t
  misc_feature (2517)..(2517): n is a, c, g, or t
  misc_feature (2524)..(2525): n is a, c, g, or t
  misc_feature (3404)..(3406): n is a, c, g, or t
  misc_feature (3409)..(3411): n is a, c, g, or t
  misc_feature (3413)..(3413): n is a, c, g, or t
  misc_feature (3415)..(3415): n is a, c, g, or t
  misc_feature (3418)..(3420): n is a, c, g, or t
  misc_feature (3422)..(3424): n is a, c, g, or t
  misc_feature (3426)..(3428): n is a, c, g, or t
  misc_feature (3431)..(3441): n is a, c, g, or t
  misc_feature (3443)..(3443): n is a, c, g, or t
  misc_feature (3445)..(3445): n is a, c, g, or t
  misc_feature (3448)..(3450): n is a, c, g, or t
  misc_feature (3453)..(3458): n is a, c, g, or t
  misc_feature (3462)..(3462): n is a, c, g, or t
  misc_feature (3466)..(3466): n is a, c, g, or t
  misc_feature (3468)..(3470): n is a, c, g, or t
  misc_feature (3472)..(3473): n is a, c, g, or t
  misc_feature (3475)..(3475): n is a, c, g, or t
  misc_feature (3478)..(3478): n is a, c, g, or t
  misc_feature (3482)..(3484): n is a, c, g, or t
  misc_feature (3486)..(3487): n is a, c, g, or t
  misc_feature (3489)..(3492): n is a, c, g, or t
  misc_feature (3495)..(3495): n is a, c, g, or t
  misc_feature (3497)..(3499): n is a, c, g, or t
  misc_feature (3502)..(3504): n is a, c, g, or t
  misc_feature (3506)..(3516): n is a, c, g, or t
  misc_feature (3518)..(3520): n is a, c, g, or t
  misc_feature (3522)..(3523): n is a, c, g, or t
  misc_feature (3526)..(3529): n is a, c, g, or t
  misc_feature (3531)..(3531): n is a, c, g, or t
  misc_feature (3533)..(3534): n is a, c, g, or t
  misc_feature (3536)..(3544): n is a, c, g, or t
  misc_feature (3547)..(3547): n is a, c, g, or t
  misc_feature (3549)..(3550): n is a, c, g, or t
  misc_feature (3552)..(3558): n is a, c, g, or t
  misc_feature (3560)..(3563): n is a, c, g, or t
  misc_feature (3566)..(3567): n is a, c, g, or t
  misc_feature (3569)..(3576): n is a, c, g, or t
  misc_feature (3578)..(3582): n is a, c, g, or t
  misc_feature (3585)..(3598): n is a, c, g, or t
  misc_feature (3600)..(3601): n is a, c, g, or t
  misc_feature (3603)..(3606): n is a, c, g, or t
  misc_feature (3609)..(3613): n is a, c, g, or t
  misc_feature (3615)..(3615): n is a, c, g, or t
  misc_feature (3618)..(3619): n is a, c, g, or t
  misc_feature (3621)..(3621): n is a, c, g, or t
  misc_feature (3623)..(3626): n is a, c, g, or t
  misc_feature (3630)..(3634): n is a, c, g, or t
  misc_feature (3636)..(3636): n is a, c, g, or t
  misc_feature (3639)..(3639): n is a, c, g, or t
  misc_feature (3641)..(3641): n is a, c, g, or t
  misc_feature (3643)..(3649): n is a, c, g, or t
  misc_feature (3652)..(3652): n is a, c, g, or t
  misc_feature (3654)..(3655): n is a, c, g, or t
  misc_feature (3658)..(3662): n is a, c, g, or t
  misc_feature (3664)..(3665): n is a, c, g, or t
  misc_feature (3667)..(3668): n is a, c, g, or t
  misc_feature (3670)..(3674): n is a, c, g, or t
  misc_feature (3677)..(3677): n is a, c, g, or t
  misc_feature (3679)..(3679): n is a, c, g, or t
  misc_feature (3682)..(3682): n is a, c, g, or t
  misc_feature (3685)..(3686): n is a, c, g, or t
  misc_feature (3688)..(3693): n is a, c, g, or t
  misc_feature (3695)..(3695): n is a, c, g, or t
  misc_feature (3697)..(3699): n is a, c, g, or t
  misc_feature (3701)..(3702): n is a, c, g, or t
  misc_feature (3704)..(3704): n is a, c, g, or t
  misc_feature (3706)..(3706): n is a, c, g, or t
  misc_feature (3708)..(3708): n is a, c, g, or t
  misc_feature (3710)..(3712): n is a, c, g, or t
  misc_feature (3715)..(3715): n is a, c, g, or t
  misc_feature (3717)..(3717): n is a, c, g, or t
  misc_feature (3719)..(3721): n is a, c, g, or t
  misc_feature (3723)..(3723): n is a, c, g, or t
  misc_feature (3725)..(3726): n is a, c, g, or t
  misc_feature (3728)..(3731): n is a, c, g, or t
  misc_feature (3733)..(3736): n is a, c, g, or t
  misc_feature (3738)..(3738): n is a, c, g, or t
  misc_feature (3740)..(3741): n is a, c, g, or t
  misc_feature (3743)..(3744): n is a, c, g, or t
  misc_feature (3747)..(3747): n is a, c, g, or t
  misc_feature (3749)..(3749): n is a, c, g, or t
  misc_feature (3751)..(3751): n is a, c, g, or t
  misc_feature (3756)..(3756): n is a, c, g, or t
  misc_feature (3854)..(3860): n is a, c, g, or t
  misc_feature (3862)..(3867): n is a, c, g, or t
  misc_feature (3869)..(3870): n is a, c, g, or t
  misc_feature (3872)..(3878): n is a, c, g, or t
  misc_feature (3881)..(3887): n is a, c, g, or t
  misc_feature (3889)..(3901): n is a, c, g, or t
  misc_feature (3904)..(3907): n is a, c, g, or t
  misc_feature (3909)..(3918): n is a, c, g, or t
  misc_feature (3920)..(3920): n is a, c, g, or t
  misc_feature (3922)..(3923): n is a, c, g, or t
  misc_feature (3925)..(3926): n is a, c, g, or t
  misc_feature (3929)..(3934): n is a, c, g, or t
  misc_feature (3936)..(3937): n is a, c, g, or t
  misc_feature (3939)..(3946): n is a, c, g, or t
  misc_feature (3949)..(3951): n is a, c, g, or t
  misc_feature (3953)..(3953): n is a, c, g, or t
  misc_feature (3955)..(3955): n is a, c, g, or t
  misc_feature (3957)..(3967): n is a, c, g, or t
  misc_feature (3969)..(3970): n is a, c, g, or t
  misc_feature (3972)..(3976): n is a, c, g, or t
  misc_feature (3979)..(3980): n is a, c, g, or t
  misc_feature (3983)..(3987): n is a, c, g, or t
  misc_feature (3989)..(3989): n is a, c, g, or t
  misc_feature (3992)..(3996): n is a, c, g, or t
  misc_feature (3999)..(4000): n is a, c, g, or t
aaaagaaactaacaaggattccccnagtagcggcgagcgaagcgggaagagctcaacttgaaaatcgggcaacagcncgagttgtagtctagaggcagttggttagtggaaggatcccggacctaagtaccaatgaaatttgtcgccagagagggtgaaagccccgtacgtcctggagtccgacccgtgtaatcagctaccgcagagtcgggttgcttgggagtgcagccttaagtgggaggtaaacttcttctaaagctaaatactaacgggagaccgatagcgaacaagtaccgtgagggaaagatgaaaagaactttgaaaagagtaattaaacagggcctgaaactgttaagaggaaaagcgttggaaaccaaccgcgcgtggagtattnaacaaagcgaaagccgagtgcagagcttcatgcatgtcagtatcagctggcgctgtggtagacgccgtcgtgcgagatgtcntnccttcggggnggatccacgataaagccaccatcgcgccgactgaggtgaacagccgcacgcttagcgaccggggtctgtcctggcaatcgataangntatccttcgggtananntaatcggttgtcatgatgggttaccagagatctgtgcggcagggatactggcgaaatggttttcaatgacccgtcttgaaacacggaccaaggagtctaacacatatgcgagcagtagggtggaaaacccggatgcgcaatgaaagtgaacggtgggatccgcaaggtgcaccatcgaccgacctgccgcaaggctggtttgagtaggagcatatttgttgggacccgaaagatggtgaactatgcctgaatagggtgaagccagaggaaactctggtggaggctcgtagcgatactgacgtgcaaatcgttcgtcaaatttgggtataggggcgaaagactaatcgaaccatctagtagctggttcccaccgaagtttcccccaggatagctggaactcgtacaagttttgtcaggtaaagcgaatgattaggagcctcgggggcgtaatgccctcgactcattctcaaacttttaataggcaagaaaattcggttacttcattgaaccgggttattgaattggagttcttagtgggccatttttggtaagcagaactggcgatgcgggatgaaccgaaagctgggttaaggtgctaaactgctggctcatttagaccccataaaaggtgttggttcatttagacagcaggacggtggccatggaagtcggaatccgctaaggagtgtgtaacaactcacctgccgaatggactagccctgaaaatggatagcgcttaagccggcgacctagacccagccgtcagcacaaatgcgatgtgctgacgagtaggtgggcgtggaggccgtaccgcagccttgggcgtgagcccgggtgaaacggcctctagtgcagatcttggtggaagtagcaaatattcaaatgagaactttgaaggccgaagtggagaaaggttccacgcgaacagcatttgaacgtgggttagtcggtcctaagagatagggaaattccatatcaagggcgcacttgtgcgccgcctatcgaaagggaaactggttaatattccagtaccagactatggatattgtatggtaacatgaaagaactcggtgacgctggcgagtgccctgggaagagttgtcttttctttttaacagcctaccgccctggaatcagattgcctggagatagggctcaatggctggcaaagcaccttgcttcatgaggtgtccggtgcgcactcgacggtccttgaaaaactgagggaaaggtttattttctagtctggccgtactcataaccgcatcaggtctccaaggtgaatagcctctggtccatagaaaaatgtagataagggaagtcggcaaaatggatccgtaacttcgggaaaaggattggctctaagggctgggcattcggggctttgcncttgaacgnaattgatagtttgggctctccgagaacaggcttgacgcttcgcgaaggggctttgctaggcttgccgaccggtgctatgaacagctaacttagaactgtaacggacaaggggaatccgactgtttaattaaaacaaagcattgtgaaggcgttaaaacgtgttgacacaatgtgatttctgcccagtgctctgaatgtcaaagtgaaggaattcaaccaagcgcgggtaaacggcgggagtaactatgactctcttaaggtagccaaatgcctcgtcatctaattagtgacgcgcatgaatggattaacgagattcccactgtccctatctactatctagcgaaaccacagccaagggaacgggcttggaagaatcagcggggaaagaagaccctgttgagcttgactctagtccgacattgtgaaatgacttagaaggtgtagaataagtgggagcgcaagcaacagtgaaataccactacttttaatgttattttacttaccccgttaagtagaancgaggcgcnagcctcnncttctggatttaagcccttcggggtgatctacgcgggagacactgtcagatggggagtttggctggggcggcacatctgtaaaacgataacgcaggtgtcctaaggtgagctcaatgagaacagaaatctcatgtagaacaaaagggtaaaagctcacttgattttgattttcagtatgaatacaaaccgtgaaagcgtggcctatcgatcctttagcccgtggaagtttcacgctagaggtgtcagaaaagttaccacagggataactggcttgtggcagccaagcgttcatagcgacgttgctttttgatccttcgatgtcggctcttcctatcattgcgaagcagaattcgccaagtgttggattgttcacccactaatagggaacgtgagctgggtttagaccgtcgtgagacaggttagttttaccctactgatgaaaggttgtcgcaatagtaatccagcttagtacgagaggaaccgctggttcagataattggtcttttcacttggctgaaaagccattggtgagaagctaccatctgtaggattatgactgaacgcctctaagtcagaatccatgctagaaagcggcaacgttagctccttcgttgcgtaaatataggcttcggccctagaccagaagacgttcggatggctgcctcaatagcagtcacctgcgccacatgacaactcagaacgggagctatacagatcatttgaagacgacttaaactgtgagtgggtattgtaagagtcaagagtagacttgtttctacgattctctgagattcagcccatttcaccgatcggttcggaaacgaacacaaaacctccttcgcatttacaaatgtgaggggtttggtttatattgaacnnncannncngngcnnncnnnannnagnnnnnnnnnnncncngtnnnaannnnnngggntttntnnntnntntgncccnnncnncnnnngantnnnccnnncnnnnnnnnnnngnnntnnggnnnntntnnannnnnnnnngcngnncnnnnnnntnnnnganntnnnnnnnncnnnnnccnnnnnnnnnnnnnntnncnnnnttnnnnncnaanncncnnnngacnnnnncnccngnannnnnnnctncnngtnnnnngnntnngnnnnnatncnccncanncnnnnnncncnnnanncnangncnnngtngntnnntnanncnnnncnnnncntnncnngcncncnaggancctttccatatgcctgtgcttctcccccagcttctgccatgtccccgatcccccgcagctcaaatttagcctttttgccgtagttgctaatctgctgnnnnnnngnnnnnngnnannnnnnnacnnnnnnngnnnnnnnnnnnnnggnnnngnnnnnnnnnngngnngnngcnnnnnnanngnnnnnnnngcnnngngncnnnnnnnnnnntnntnnnnnccnnttnnnnntntgnnnnnacnn

SEQ ID NO: 241 - DNA, 4000 bp, Escherichia coli
  misc_feature (156)..(156): n is a, c, g, or t
  misc_feature (195)..(195): n is a, c, g, or t
  misc_feature (363)..(363): n is a, c, g, or t
  misc_feature (389)..(389): n is a, c, g, or t
  misc_feature (437)..(437): n is a, c, g, or t
  misc_feature (439)..(439): n is a, c, g, or t
  misc_feature (1012)..(1012): n is a, c, g, or t
  misc_feature (1076)..(1076): n is a, c, g, or t
  misc_feature (1078)..(1079): n is a, c, g, or t
  misc_feature (1081)..(1081): n is a, c, g, or t
  misc_feature (1120)..(1121): n is a, c, g, or t
  misc_feature (1175)..(1175): n is a, c, g, or t
  misc_feature (1312)..(1312): n is a, c, g, or t
  misc_feature (1487)..(1488): n is a, c, g, or t
  misc_feature (1730)..(1730): n is a, c, g, or t
  misc_feature (1874)..(1874): n is a, c, g, or t
  misc_feature (1932)..(1932): n is a, c, g, or t
  misc_feature (1941)..(1941): n is a, c, g, or t
  misc_feature (1952)..(1952): n is a, c, g, or t
  misc_feature (1961)..(1961): n is a, c, g, or t
  misc_feature (1989)..(1989): n is a, c, g, or t
  misc_feature (1994)..(1995): n is a, c, g, or t
  misc_feature (1997)..(1998): n is a, c, g, or t
  misc_feature (2001)..(2001): n is a, c, g, or t
  misc_feature (2012)..(2012): n is a, c, g, or t
  misc_feature (2018)..(2019): n is a, c, g, or t
  misc_feature (2022)..(2022): n is a, c, g, or t
  misc_feature (2479)..(2479): n is a, c, g, or t
agccactgagcaggagcagatcgccatccagcgcgcggcggacctcgccgtcgcgacgaaggcggcgcaggacaacgagtcgcgagcgatcgcgcaagagcgcctttcgacgcagaagacgaacgacgtgttgtcgttgtcggcttcgaaggattnggaggagctagtcgctcgcgcggagaagttgtggccggngcatccggagatgatttcggagtacgagaaatggttggccgaagcacgcgcgctgatcgatggtcgtccggcagatcctgcgcacgacatcaagaagcgaccgagcctcgaagagcacaaggcgaagctggcggatctgcgagggcgcgcgacgaagcagagcgaggnagaagccaaggccgcgcgcgagtcgnacccacgcttcgaggagctgacggcgaagcgggcggagctgacttggngntcgcgcatgctcgagctggagccgtggccgaatgaggcggaggtcgaagcgcaactggcgaaagaaaccctcccgacggacgcgaacgggctgaacacgctggcctggccgttggtcgattcggacaagcccgtgtacggcaacgaagtgagaggtctcttgctcgccaagcgcgcggttgccgcagccacggactcggagcgctcaggcattcgcgacagcctggcctgggcgaacttccgccttggtcgcctggacgaagccgttgcggaagaagagcgcgcggtggacgaagctccggcggacaagacgaaggaattcgagggctacgtcgcgaagatggaaaaggccgtcgaacgctggaagggcgaggctgcgcttgcagcgcgtcgcacggagcgcgacgcgctgcttgcggaggtcagcgacctcgatcgcgtggtgagcgaacggcggacgtgggccttcgagaaacccgaagacgcttggtggcaagtccagctttcgaagttggtgtcggatctggaagcgttgcgcgatcccaagaccggactgatgggcgacacgttggcngagcccttcggctggggggttcgcaagcgctacgagttcgcgaagacgattgcggagcgcagcntnnanggtcccgaggcgcagcagcgctgggctgaggcgattgcnncgatcgcgtcctcgccgaagtacggcgggctgcagatgacgccgcagctgggtntggttccgattggcgaggatccggaatcacacttgtgggagttcgcgcacctgcagacaggcgagccggcgatgcgtggcgcagacgggaagctggtgctttcacaagagacagggcttgtcttcgtgttgattccnggtgggacgttttggatgggcgcgcagaaaaaagacccaacgggccagaacttcgacgcaggagccggatccgatgagtcgccggtacacgaagtggaactcagcgcgtacttcttgtcgaagtacgagatgacgcagggtcagtggcagcggatcgcggcgcgcaatccgagcnnctatggaccgagtgcgaacttcgccggtcatcagcacaacttgttgcacccggtggagcaagtgagctgggacgagagcatgggcctgatggcgcggctgggtttgtcgttgccgagtgaagcgcagtgggagaacggttgtcgtggtgggacggcgacgtcgtggtggacgggtcaagagcgcgagagtctgcgtgggaaggtgaacatcgcggacaagacggcctcagatgcgggcgcgncatggggcgatatcaaggactggccagatcttgttgacggctgggtgttgcacgccgcggttgggagtttcccagcgaacccgttcgggctggacgaggtgcacggcaacgtctgggagtggtgcgctgacggctacgacggtngtttctacgccaagagcccgaagactgacccatttgcgccgattgcaggctccgcctnccgcgtganccgcggcggcngcttcaacnatgccgcttcgaatgcgcgctcggcganccgcnncnncancacgccggagnaccgcnncancaacctcggcttgcgtcccgccagggcatcacttctttctgcttcaccacttcaccaatcagggaagtgactttgggccgtttcgaggcgcacggccgaccggcgtgcgaagccgccgaaggaggccgagcgccggcgcatttgcatgtgtgcgactttttgtgcagattttcgattttcaggtggcgttggggacgggaggcggggcagggagcaaggcaatgggtttttgcgcccattccccagtcccatgcgcatcaaactgctgaccttccgctactccgccacgctcggcggtttcgacgatacggccctcgctgacttcacgcgcgacaaggaagtgatcgcgtttcgcgaacacttctacgcggtgaacgagacaccgcacctgacgtgcatcgttcattaccaggaagcgatcgtgccacgcgcagcgctggacacagcacgcgagatngctccgcgtccggtgtcgaacacgccgcgtttccaacgccgcgacggtgcgcccgatccttgcgaaggcatgaacgacagcgagcgagcgctattcaaccacttgcgcgagtggcgctcgacgcaggcgcgcgaagagggcgttccgccctacctgttgctgacgaacaggcaactcgtcgcggtcatccgcaagcggccggaatccttgacggcgctcgggcatctcgacggcatcggaccaggcaaggtcgagcgctacggtgcggccatcctgcgcgcgctgcacggcggcagtgcagggtccgctgcaagcgccgatcccgcaccggaggccgccccgaagctgacggatgccgccgagatcgaagtcgtcgaactcgccgcagccgaggtcgtcgcatgagcgcgccctcgttccgtccgccggcgcgcgaggccggtccagagcttttgtgcctgcagaagtgggaggaaacgctcggatggctgctcgagcacacggccaagtggccgaagtcggcgcgcttcagcctggtgcagaaggtggatcggcacgcgctcgacgtgctcgagatgctggtcgtcgcgcgctacgaaccgggcgcgcgcaagaagcacctgcgcgagatcaacctgcgcctggagctgctgcgttatctgctgcgcatcgctcgcgcgcgcaacgtgatgccggcgacgggcttcgagactgccatgcgcggactcgacgaactggggcggatggtccacggctggcgcgtcgcgatcggcgaacgcggcgcgctggatccgggcacagtcgaggccgaacttgttgcggcggggacggagacatgagcggctcgcagtgggacgagatcacctccttcgccaacttgtgcgccgcggcccgacgtgcggcgctgggcaagcggggcgtgcgcggggccgcgcgcttcctggagcggctggaacccgaggcgctggccttgcagcgcgagctgctcgggtggagctggcggccctcggttccgacgacgttcgtgatccacgatcccaagacgcgcgagatcacggcggcgccgtttcgcgaccgcgtcgtgcatcatgcgttgatcgatccgctcgaagcgctcttcgacgccgcgctcgtgccacagactttcgcctgccgacgtggcaaaggcatgcaccgcgcgcttgggcatgcacgcgctctggtgcgcagccactcgcatttcctgaaactcgatgtcgaagcctgcttcgcttcgatcgagcacgaaatcgtcctgaaaaccctgcgcgaactcgatctggagcaagaggtgttgcggctttccgcgcgcatcctcggcggagcgggcggccggctcgggatcggcctgccgatcggcaatctgaccagccagtggttcgcgaacctcgtcctgggccgtctcgatcgcttcgtgcttgctcttccgggcatccgaggctacgcgcgctacatggacgactgcgtgctgttcgcggacgacaagcaggtgctgcgcgacgc

SEQ ID NO: 242 - DNA, 4000 bp, Escherichia coli
  misc_feature (203)..(203): n is a, c, g, or t
  misc_feature (1969)..(1969): n is a, c, g, or t
  misc_feature (1971)..(1971): n is a, c, g, or t
  misc_feature (1974)..(1976): n is a, c, g, or t
  misc_feature (1984)..(1984): n is a, c, g, or t
  misc_feature (1986)..(1986): n is a, c, g, or t
  misc_feature (1988)..(1988): n is a, c, g, or t
  misc_feature (1991)..(1991): n is a, c, g, or t
  misc_feature (1996)..(1996): n is a, c, g, or t
  misc_feature (1998)..(2000): n is a, c, g, or t
  misc_feature (2002)..(2002): n is a, c, g, or t
  misc_feature (2005)..(2006): n is a, c, g, or t
  misc_feature (2008)..(2008): n is a, c, g, or t
  misc_feature (3965)..(3965): n is a, c, g, or t
ctatttcgtagttccaggtctgttcgggcttgtagacggtggcggattttgcatccggattctctcccgcatcggggaagtatttgcccaccagctctttgtaggcatccggcacgttgggcataatcgcctctttgctttgccgcatcatgtcattcttcaaactggattgcagcaggtcggagaacatctgcacgttgtancctcccgaacggtaacctttgctgaccgttgcatacacatttcctctgtttcgcgcaaagtcatactgcaaagcaaacttgggcaacagctgaagataatccttatcaatgtttccttggtagcgcgactctacggtcagcgccgtctccggcatcatctctatttcgcggatgacgacgtcgccccgcttcatttctcccttgatgcccaccttgtagtccaggctggtgccggagttgtaatccatcttcatacgctcataatccaggcgtaacccggcagtgaacgacactcctttcagcccgaataaatctctgaaggtggattgatgaaagagtgccccattcagcagcggagtgttgaaactgcccccgatgggcatggtccggctgctgatgcccagtgagggcaggatattcatactcatggatggtcccatctctacttgtatttgcgatgggatgacactgcccaacatctggttcagcatccccattccggcttccctgaaagtgacgggagcttccgtattcagccattggtagaagccgaaggcgccggtggtccattgccagcggctgccgcttttactcttcaagatgatttcctcgctcagtgcgtgggagcgttgtttctgttgcagggtatagatgtcgttggcggtgaagtcttggtctatgtccatgcagtcctttagaaactggtagccggtgaccatgctcaacgtgaagtgctgtgcctggtattccaggttcagacccgtgttcagcaggttgcggtagtagttgctacgggcgttattggagatttttccgatgtagggcttcagcggctcgctctgtgcttcgggggccaggctgccttggtagaaatacgggtagccaccctggtcgctgtattcgtagttgatgtttaggtccaccttccagttgtccgaggggaggtagatggcgcggatgcgtccgcctgccgattgccccttgtccgctttctcgtccctcaccgtgttgcggaagaatcctccttgataatcgtaaaaacctccggtggaaaaggcgaaccgttccgaaaggcggtgatagtgggtcagcgaggtattataggcattgtacgtacctgcccccatgcggaagtccgtcccctggtaggagaagggcgatttggtgtgcaccttaatcaatccgcccatggcattgcgcccgtagagcgtgccctgcggaccgcgtagcacgtcgatgcgctctacgtcggcatagctgaagtcgaaggctgacttgtctatataaggtatattgtctacataaagtcctacggagggagtgttgatgcgcgagccgatgccgcggatatagactgccgaagtcagtcgcgagccgtagtcggggataaacatattgggcactacggatgtcagattcttgatggagttcacctgtgcgttctgcatgtcctgctgcgaaagcagggtgacggcggcgggctgctcgcgcagtttccggttttctttgggggcggcaatgacggttatttcctctacatccaccactttcaaggtgtctgcctcttcggcaagtacgttgccggttgccaggaggcagaagataccggtcaaaattctatatctattcataaactggttttttagcgcctgcaaagtaaagggattcttgcggaagggacaatcctcatttattaggatttcgttcctggagtgctaatcttaaatcgttccatcatgcggaaaatatcgttcctccgtgggggnanaannnttcccccncngnggnacgantnnntnttnncncattagcacactaattggggcgaagtttttctgaaaagacttcgcttctgatgtatccggttgtaggattatattctgtccgcttccacatatccgtgcatcacggcatagatagtcagcccggacacggacttgatacccagcttctcggtgatattcttgcggtgtgagatgacggtggtcaggctgatgttcagtttgtcggcaatctccttgttgatgagacctttggtaatcagcaccagcacttctatttcgcgggcggaaaggtcgtgcccggcggctgtatttattgccatatccgagtgtctggcgggtgccggctttccgtggttttgtctgtattggtttccgtattggcgcagctgcagaatgttttttgccagattttgttcgtcctgatagatgtttagcgtcggcatgcccgacagttgggggacggtttcaccattgaccagcacaatggttttgggcttgcgctccagaaagaaagcggtatgctcgaagtaaatctgtgaagagatgaaataatgcacatacatgtcaggcgtatcatccatcagttcgccaaaggaacggaaagagcggatgatggctgtcgggatgatttcctccagcaagttctgcagtcccagacaggagagggtgttggagtcgacgattgctatttcaggagtcattctcgtttttttgtttctgcaaaaatacggattattttttagggtttgtctgtgcggggctgcaaaatgaaaaattctcctatgcagaactattctccctctccttttggggaacggggagtgtctcctttcgcatattggctggggctgacattgaaatatttcttaaagacttcccggaagtatttcccatcgcagaaaccggttctttctgctacttcagtcacggaatatttcccttctttcaacagctcggcagcatgtttcaaacggatattccgtacgaaatctgccggtgcctggccggtcagcgctttcagtttactgtagaaactggtacggctcatattcaggagcgagcacaatacgtccactgtgaaatcgggattatccatgttctcctcgatatgtctctttacattcgacatgaatttccagtcgagactgttggagcaagtggtagttgtggagggctcttcttctgtattgatttccaaattcgcatatctcttgcgcagcaatgcgcggttggcaagcagattggcaatgctggctttcagtatgtttatgctgaaaggttttacaatatattcgtccgcaccgatatggagtccttcgagaatgttcttttcatctcccagtgccgtcagcagtactaccgggatgtgggatgtttcaatatcgttcttgatggcgatgcataattcgtcgcctcgcatttccggcatcatgatgtcggaaagaatcagttccggccagaattgttttacaatggtcagcgcttccttgccgttgttgcatacttgtacattgtaaatcggagagaacgactggaagagatagttgcgcagctcgtcattgtcttctacaatcaagatgcgatgcagtttgtcattgtcttcagtccggagttctccggcaagtttcaaaggaacggtggggacatccggttcatagaaggtcttcttatccttaacggacagagtgaagttcttgaactgttctttctctttgggaaggatgattctgacagtactgccttggcattcggtgctctcaatgtatatttttccattgtgcaggcttaccagcttccgcaccagcatcagaccgataccgcttcccgttattttggagttgatggcatttgttccacggaagtgcatcttgaacagttttctttgttctttggcgggaattcctattccattatctttgacttccagtctccaggagcttttcatgtcataaacagaaatgagtatatcgccattttngggagtatacttcagagcattggatatgacatttt

SEQ ID NO: 243 - DNA, 4000 bp, Escherichia coli
  misc_feature (3)..(4): n is a, c, g, or t
  misc_feature (22)..(22): n is a, c, g, or t
  misc_feature (102)..(102): n is a, c, g, or t
  misc_feature (139)..(139): n is a, c, g, or t
  misc_feature (676)..(676): n is a, c, g, or t
  misc_feature (1027)..(1027): n is a, c, g, or t
  misc_feature (1253)..(1253): n is a, c, g, or t
  misc_feature (1295)..(1295): n is a, c, g, or t
  misc_feature (1955)..(1955): n is a, c, g, or t
  misc_feature (1974)..(1974): n is a, c, g, or t
  misc_feature (1984)..(1985): n is a, c, g, or t
  misc_feature (2274)..(2274): n is a, c, g, or t
  misc_feature (3791)..(3791): n is a, c, g, or t
aanntttagaccaagaatcatntgactcggtagccacaaagtatattccactttaatattaaacaaaacactaatacttaaaaacagaaaaagcttttatgnagtatttcactccataaaagcttctatatattttganaaattacagatcttgtaagatctaaagttaattctagtcttctgctaactcaggagcaggaatgattacctgacctctatagtacatagctccatcatgccagtacgctctgtgcatttggtgcgcttcaccagtcactttacagatagatatctgtggtgctgtagctttgtagtgagttcttctttttgcttttctctgcttagaaattttactctttggatgtgccatttctattttttttattgaagtgtaaaatgtatcacttcgttgttattaataattctgacctttattggtccagatttaaatcgtttaaggtatcccaaataggatttgttttgacttcacctccgtctccatcagcttctttttcgaaacggctgaggatttcttcattgcaattcgcattagggtcagactcacaagtctttatcataggtattgacaaatgtatgtattcatatatatactgagccacattaagcctatctagcctcggatgaatgtatataatctcatctgtagattccatancttcttcactatacttagcatgcaggatatatttaccatgtataggtaagataatatcttccatacatctatcacaatcagtaataacggtaccttctagactaaagtctagcacagccatatgcgaccttttatcaagctcaagagttatagcaactttacctttttttacttgcgaattttcatactcagtaaagaaagcattgtcaacttcgaatttcaattgatgaagaccaactttcaatcctataaaaggaatggaaaaatgatctaggacttccatagttattgaactttttcaatttggagtgcaaagataagttttgttctggaaaaatcaagggtttggangattttagagctatcgctatctttatttgtggcctataaccatataatgtaacctcaaatgagccctatcttgaaaatctcactagtgcagcccaataacaaactacgcccaatttagaccttgtagatagcctaatagctgatattaaagacactaatctcatcgttttaccagagatgcggaatactggcttctctatgactcctcagccagtagcaactattntgtatggtatcgtggtgcaacagatagaaatttgggcatctnaaaaattagtaattgttggtggaaatgtgattgtcgaagctaatggaagatactacaatagattcctactagttgatagtaacggtccaattgctttttatgataagagacttctatttaccttagctggagagcagaaagcttactctgcaaataatgagcgaatcacttacgcttatgttgacagggatattaacctcaatgtatgttatgatcttaggtttcgaatttgaagtcgaaatactgatagatatgatgttctaatctatgtggccaattgacgttctccaaggcaccttgcatgcagggcgcttcttcaaactagagcaatagaaaatcaatgttatgtaataggttgtattagagtaggtactgatactgatactaatggacagacatatttaggtggatcagctatgatagattatagaggcagcgagctgccagaattgagagacaaacaaagtattgcaagtgttgagactaacaaatcagaccttttggatttccggtcgaaattagattttctgtcaaatagaaatgaatttagtattgtcatcccagattcaggattctcattattgaaatatatcttcattttcagggttttatttaaaagtagtctaaacgaaagtggctcaattgttgatgtattaaaantaataataatatgtaagcngttgttaaannaataaatagctcaataccaaagatgctgagttattagaacatacaataattaagcttactaactaacgatacttaattgttcgtgataaaacttatttcaattagttcaataacactacaatgataaaaaacggtcttatgcgcttttcgctacttggagcattattaatcttcttgatgacagcctgtagtacaccaagatatagtcacaatggaagtcgtagctcatctagcaaaacgaagaaatacgccaaaaaaactcgaaaaccctatattgacaaggcaaaanccaatagatcaactacaaatagaaaagcttcagtagctaaggtcgacaaactcgatcttaggctcaacgtagtagcttccgctgaaaaatttctcggtctcagatataaatggggaggaaaaacaccaaaatctggatttgactgctcaggatttacaagttttgtaatgcaagaaaatggtgtaaacgtacaaggagcctcttatcatcaatcaaaactaggaaaaaaagtttctaagtctaaagttgcccctggagatctaatattcttcggaaaaggctcaaaggtttctcacgtagccatagttaaagctaatactggtaattcactagaggtaatacacagtaccagtggatcaggagtgagagtagatgacattaataactcaaattattggaataagagatacctttacgcccggcaagtcataaattaggcggaacaataacagtcttcagtcatatatatgttataattcaagaagtcaattgaactttaagagatgtggagcaagttaattcaatgggttttggatatttttgccaaccctaacagcaaatcaagtaattcaatgatgaatatcattctctttggtcctccaggatcaggtaaaggaacacaagctaacagtatagcaaagaaatataatctgctgcacatttctacaggagatctttttagatacgaaattggcaattctactgaactaggtcaactagctaagtcttatataaataagggagaactggtacccgatgatgtaactattggaatgctcaaaaacaaagtagatgcttatccagatgtggcaggatatatttttgatggtttcccgaggaatgtgtatcaatctgaagaattggatcgtttcttagataaaaaaggtcagacagtgaatgcgttactacaacttgatgtagatgatgaagagatcgtgaaaagaattcttaatagaggaaagacatcaggaagagaagatgataatgatgagatgataatacgcaatcgtatttctatcttcaatgatgagacctctccggtatacaattactacgataaatctggaaagtcaacaagcataaatggtataggtagcttagaagaaattttctctagactaagtgttgctatagacgcagccaagtagtaatacacatacattaggaaggtcaactgatcgtctattttaacaataagtaaaatcaactgacgattttctaaacgatcaatagtacaacacaataatatgtctcagcaaaacttcgtcgactatgtaaagatgcatgtcaaatctggtaacggaggcgctggatctaactatatgtttcgtgacaactataccgctaaaggggggcctgatggtggtgatggtggccgtggtggtcatattgtccttagaggtaatgagcagctatggacactactttcactaagattccgaaagcacgtaaaagctggacatggaggaaatggaggaaagtcacgtagttttggagcctttggtgaagatgtaatnctagacgtaccactaggtactgtagcaagagattttgaaactggagaagtccactttgagatcactgagcacggagaagagcaaataatgatgctaggtggaaaaggtggtagaggtaacgttcacttcaaatcatctacaaatcaaaatcctaattactgtcaacctggcctcaacggtgaggaagcatggaaagtattagagttgaa

SEQ ID NO: 244 - DNA, 4000 bp, Escherichia coli
  misc_feature (3)..(3): n is a, c, g, or t
  misc_feature (447)..(447): n is a, c, g, or t
  misc_feature (723)..(723): n is a, c, g, or t
  misc_feature (863)..(863): n is a, c, g, or t
  misc_feature (1329)..(1329): n is a, c, g, or t
  misc_feature (1926)..(1926): n is a, c, g, or t
  misc_feature (1946)..(1946): n is a, c, g, or t
  misc_feature (1952)..(1952): n is a, c, g, or t
  misc_feature (1954)..(1955): n is a, c, g, or t
  misc_feature (1963)..(1963): n is a, c, g, or t
  misc_feature (1976)..(1976): n is a, c, g, or t
  misc_feature (1988)..(1988): n is a, c, g, or t
  misc_feature (1990)..(1990): n is a, c, g, or t
  misc_feature (2002)..(2002): n is a, c, g, or t
  misc_feature (2008)..(2008): n is a, c, g, or t
  misc_feature (2015)..(2015): n is a, c, g, or t
  misc_feature (2771)..(2771): n is a, c, g, or t
  misc_feature (2927)..(2927): n is a, c, g, or t
  misc_feature (3869)..(3869): n is a, c, g, or t
  misc_feature (3972)..(3972): n is a, c, g, or t
atnagagctcagatctcaatgtagcacaggcattatctacaggaggctcctctggagctatcacaatggatatagctgtaaaggatgaggtagaaagccctcattatgagggagtaggcgttggaatggcgtttacaaaaatcattacccacgatattaacagcaaagcaactaacagcggtaatactactgtagcaagccctgtaaacacagctacagttattacaataaattaaagaaaaggagtgtgataaaatgggtgcttttaagagtgcagtaatcacaaaaaaaggacaggaactcttagcaaaagtggtagcaggtactactaagctggagtttactaagatcaaggtatccgatactaagttatctggagatctggcaagtatgacaggtatcggtactatcaaacaggaggaaaaggtagcctctgtagtgagaaanaatggatctaatgttacagtatccgctagtttctctaatcagaccttagggcagggttattatgtaagaaacttaggactttatgcaaatgatccacaggctggagagatcctctacagtatctcagtggcagatgagagtaccgctacagcggattatatgcctccatttaatggtatcggtgtaagctcccttatggtggatcttgtaacagcggtatctaatgcctctagcgtaaaggtaaacgtagatcctaccgctggagccacagtagcncagatcgttaatttacaggagcagattgacgatgttaagagctttgtaggctatgagagctccgatgtatacggtgtggagattgattttcctaataggcggtttaccagaattgcaggagcagaaaatcttaccgctgnagctgattttgataagctcaatccgtggggcggtagaaagagatgtatcttagctgatgatggtacagtacttgcatacagaggagaaacaggatacacagaggcaggagctactactgtagagcttaaaaagacagtagacggagcagaaaaaacctatgctagtggtactaaggtacaggtaatggtagaacagcctgtattttatgttaaggctgtacctgtaagctctaagaacgctaccagcggtaagggtaagcagtacactaagggtagattttatatcagccctacacctaaggcaggatttacagctcctagagccttttacgataatcacggtatcgtacaggataagatctatctctcagcgtttgagggctgtatttatgatacagatgctaaaaagtatcttacagcggatgagcaggtagcggattttgctacagatatgctctcatctatngcaggtgctaagccagccagtggacttacacagaacctcacaagagcgaatgtgagaaagctctgtgctaacagaggtgcaggctgggaaagtcatagtatttttgctatggcggttacagagtggctccttatgattgagtatgctagtttagatgctcagcgtaaagtaggtagaggcgtttgtgattttaccgatgatggtaaaactaatatggctgtagtaacaggtgctacctctggattaggtaatggatctggtattgatcctaacggtggtgtagatggtaagtgctcagtatcttacagaggagaggaaaatctctggggcaatatctggacttggctggataaggtaaatatcttagctaaaggacagaatgaggtatttgtgcatgagatcggagctacagtagcagatgatactaccacaggatacaagagcttaggctatcactggagccatagtaacggttatcaaagtgcctttggtattgatccagagcatccagagttacttatccctacagaggctagtggatcggatgtattcacaggtaactttgtatggcagaattacacctacaacggtttcttnattgctatattgggcggtanatggantnntggctctngttgcggtttcgntctgcatggtantnatgcctctggtnatcgcnatcgtantgtcggcggtcgcttgctgtatgtgcctcaaacaaaggttgcttaaatctttgaggaaaaataaataaaatcaaaaagggtaataggaggagctggaaagctcttttttattaccctttttgtcggtagctgataaggtttcttaattactaaattaggcagtaaatggaataatggctctaattgcagtttcaatctgaatggtaataatacctctggtaatcgcaatcgtaatatcagcagtcacttactatatgtgcatataaaaataaaagaaaatcagagaaatatgtgttcactgtgacacttattttacattaagtgagtaacagctaccgtggctcttgccagaacataaaactcctctatgaggagcggtaaaaaatagctaagagggtgcttatgtgcggagaaatccgtaaaccatgttagcctagcaagctaagaactgattgttatgtgaacgatagcacaggggtactacagcaggtagttagctccctcttatgcacatacaaaattatgataaggtgggtgccaaaacacatgaaagatactggagatttattttctaagatatgcgatatggataatcttagaaaagcccacaagaacgcaaagagaggtaaagggtggtatgcagaggtaaagcgtatagaaaaagatctggatcattacctaaggaggctacaggaaaatctaatagaacacaggtatcatacctcagactatgaaacttttgtaagaaaagagggnagtaaggagagggagatttataagttaccgtactatccagaccgtatatgtcaatgggctatcttacaggttatagagccctacttacttaattccatgacaaaagatacctatagtgcaatccctaacagagggatccagcctattatcaatcanttacgagggtataagaaaaagattaagaaagatggaaaagtagtagcggagaagtggatacccagtattttagtatcagatccagaggctacaaagtattgcttaaagctggatgtaagaaagtattatcccagcattgtacacgatgtactaaaggctaagtatagagagctctttaaggatgaggagcttatctggttaatggatgagatcatagatagtattagtacttgtccagccacagaggaaaatatagagatcctccagaggctaggtgtggcggtaaatattatcatagacgataacggtagagagtttgtggatggcgtaggtattcctattggaaactatgttagccagtatgacggtaattttaatctatctgtagtagatcactggctcaaagaggttaagggcgttaagtactactttagatacatggatgatatggttattttcggtagcagtaaagaggaattacacaaactcaaaagagagttagatgagtttatggcggtaaatcttaagcaggtgcttaagcataactggcaggtatttcctactaaggtaagaggtgtagattttgtaggctatagatttttcggagaatataccttactcagaaaatcgacttgcaaaacatttaagcgtaggatgcttagcatctccagtaaaagagaaaacaatgtgagccctacttatagtgagtggtgctcatttaatagctatgtgggctggctacagcattgtgatagctttaggctataccagaaatatgtagagcctaatgtagaatatatgcacaattattacttaaaggaggtaaaaggtaatgcagaaatttgtaaacgtaagaactacagcggagagcgtaaagcctcttgagattgatgattaccatgtatatgtaaatacaggtatcaaagagatccatgaggaggntaaggagggagatcttagctctgggtttgatgggtttgaaattgaaacacaggagatctatgagaaagatgagtacatccagctcatggcagagaaaaacagntccttagaggagcaggctacagatttac

SEQ ID NO: 245 - DNA, 4000 bp, Escherichia coli
  misc_feature (748)..(748): n is a, c, g, or t
  misc_feature (760)..(760): n is a, c, g, or t
  misc_feature (872)..(872): n is a, c, g, or t
  misc_feature (2584)..(2584): n is a, c, g, or t
  misc_feature (3313)..(3313): n is a, c, g, or t
  misc_feature (3454)..(3454): n is a, c, g, or t
aaacgtgcgcagatcctcggccgtttcgaattctacgaggcgtgcggcccgctggtcgacgccgaaactgttgcgcccgcgcaggctgatttggtgaaattctcgaatcatggtatgcaaagttagaaattatttttaactttgagattcaaacctgaataactcaatggtgtggctgatctgcatactgctgtccttgcttgcgctgatccgtttttttggcggcgattcccggcgcaaacgtcggaggcaccgcaggtttggcaatcggtgaccatgtaaacgataacagaatatgttcgacgaaaaagatttgcagcaaatccgggagcacggactcactcccgaacaggcggagacccagttggagaatttccgccgcggattccctttcctgaatgtcgtgcgggccgcatcgccgggcgacggcgtgctggttgtcggcgcggcggaggccgatgccgccgtggaacgctatgaaaaagagtctgccggactgggggtggtgaagttcgtgcccgcttcgggggccgccacgcgcatgttcaaggagctgttcgagttcgtcaacgacggcaaacgcggcaagggcatcgacacgctgctggaaaatatcgggaagttcgccttctggcccgaacttcgcgccgtgctgcccgccggggccgacgaccgtgcgatcgtgaatgccatcgtcggcgacgggctgaactacggccgcaagcccaagggcctggtcaccttccangcctatcccganggggcgcgcaaggccgtcgaggagcacctggtcgaaggggcggcctacgccgcggccggaggcgtcgtgcgcatccatttcaccgtctcgcccgagcacgtcgcgggcttcnaggagctgctcgccgcaaaggtccccctttacgaaaagcggttcggcgtccgttacgagatctcgttctcggtgcagaaaccttcgaccgacaccctcgccgtgaatcccgacaacacgcctttccggcaggacgacggcacgctgctgttccgtcccgcgggccacggggcgctgatcgaaaacctgaacgagatcgacgccgacctgatcttcatcaagaacatcgacaacgtgacgaccgatgcccgccgcggggacacggtccgttataaaaaggtgcttgcaggggttctgctcgacctccaggggcgcgccttcgagtacctcaaggccctcgaagtgggcggcgccgagctggaacccatcgccgaattcatcgagaaacagctctgcgtgaaactccccgccgagtacgattcggcgctgctgcgcgccgtgttggaccgtccgatccgcgtctgcggcatggtccgcaacgagggcgagccgggcggcggcccgttctgggtcgggaaccccgacggcacggagtcgcttcagatcgccgagtcgagccagatcgcgcccgacgacctgccgctgatgcagtcggccacgcacttcaatccggtggacctcgtctgcggcgtgcgcgattcgaaggggtgcaagttcgatctgcgccggtacaccgatcccgcgacgggattcatctcgtcgaaatcctccggcggccgcgatctgcgcgcgcaggagcttccgggactctggaacggtgcgatggcgaagtggaacacggtcttcgtcgacgttcccgtcacgacattctctccggtgaaggtggtgcaggatcttctgcgcccccagcaccaataggtttaaggttttgcgggtgtctttcgcccgtcttgtccgggccggccggggaatgcgtttgtatctcccggccggcccggatcgtgtcgcgccgaagccggactgcccttattgcagatgcaggaccagtctgtcgagtccgaagaaacactccgtgaatccgggagccggggcgacggcctctatcgtcagcgtgtttccgcccttgcggatctgtccgttgccgaacgcaacctctttggcgatcagttccggggcatgtcccgggcctgcggcggccgccattgcggtgcggcgggcctgcggttatacatctgctccatttgtgccggaaatttgtcaaaataggataaattgctgttcagtatccccgattgtagataatcttttttatatttgtgcgttaaaaccgaaaaacaataatcaaaactaaataacgctatggaaaacaaacttcaacagttgacgcagaagctctacgacgaggggctggagaaagggcgcgccgaggccgacaagctggtggccgacgccaaggccgaggcccggaagatcgtcgccgaggcccgcgccgaggccgaagagatcgtcaaaaaggcggaggccaaggccgaggacgtttcgaagaacaccatgaccgagatttcgctggccggcaagcaggccgtcggcagaatcaagtcggagatcgcctcgctgatcatcgccaaggctacggcccggggcgtgaaggaggccgtcgtggacccggcgttcatcaaggagatgctcgtcgccgtagctaaaaactggaacggttccgattcgggcaaggtcgaattgcaggccctgctgcccgagggcgagcgcaagaanctcgacgcggcgttcgaggagagtgcgaaggagctgctcgccgccggtgtcgaggtgggctggtcgaaggaggtgaagaccggcttcaaggtgggcgccaaggagggcggctactacatttcgttcgccgacgccgacatcgaagcgctgttggcagagtacctgcgcgacaaggtgttccaattgttgttcaaggcgtaaggcatgtttgcgacccaatattattgtctggtagcctccctgaaggagtacgcgctcgacgccgacaccaagggcttcgacgcccgggccatcgtctccgggattctggaggaggtgaaccgcggcgacgcccgcgaggtgcggctcctgtacggctactacgactgtgagaatatcgccgccctgcgtgcggggcgctcggcgcacaatccgctgggcaacttcacgcgcgaggagctggcggaggagctgaaagctccgaagcggcttcccgaggcggttgcccgcgtggtgagggcctatgccgatcccgagggcgaggacgccgagacggtcgacacgtcgcggcgtttcgagaaggagctgttcggggcctactacgccgcctgcggaaaggccgggagccgcttcctgcgcgagtggtccgctttcgaccggaacctgcgcaacgtttcggcggccgtcacggcgcgcgccgcagggcgtgcggtcgaggaggtcgtcgtgggcggcggcgatgtcgccgancagttgcagcgcagttctgcggccgatttcgggcttcggggcgaacttccctatatcgacgcggtgatcgcggcggtgaacgacgaggccaacctcgtggagaaggagcacaagatcgacctgatccgctggaacgaagcngcggagctggcgaccttcgactatttcgacgtcaacgccatcctttcctacctggtgcggatcaacatcgtcgcccgctggacgctgctcgacgctgcgcgcggccgcgagatgttcgcccgcctgcttgccgaactggacggcaaggagctgattaataaggaataaacaataaaaacatacaatgaaaactacaggacgtgtaaacggtatcatctccaacatcgtgatcgtcaaggccgacggacccgtgggtcagaacgagatctgctatgtctggacgggcgataccaaaatgatggccgaggtcatcaaggtcataggcgacgcggcctatgtccaggtttttgacagcacccgcggtctgaagatcggcgaccgggtcgaattcgagggtcacatgctcgaagtcacgctggctccgggccttttgtcgcgcaactacgacggtcttcagaacgacctcgaaaagatggacggtctgttcatcgcccgcggttcgatcaccgatccggtcgactacgatgccgagtgggaattttcgcc

SEQ ID NO: 246 - DNA, 4000 bp, Escherichia coli
  misc_feature (709)..(709): n is a, c, g, or t
  misc_feature (948)..(948): n is a, c, g, or t
  misc_feature (1564)..(1564): n is a, c, g, or t
  misc_feature (1988)..(1988): n is a, c, g, or t
  misc_feature (2954)..(2954): n is a, c, g, or t
  misc_feature (3298)..(3298): n is a, c, g, or t
  misc_feature (3300)..(3300): n is a, c, g, or t
  misc_feature (3515)..(3515): n is a, c, g, or t
  misc_feature (3521)..(3521): n is a, c, g, or t
  misc_feature (3535)..(3535): n is a, c, g, or t
  misc_feature (3586)..(3586): n is a, c, g, or t
  misc_feature (3613)..(3613): n is a, c, g, or t
  misc_feature (3629)..(3629): n is a, c, g, or t
  misc_feature (3638)..(3638): n is a, c, g, or t
  misc_feature (3644)..(3644): n is a, c, g, or t
  misc_feature (3649)..(3649): n is a, c, g, or t
  misc_feature (3661)..(3661): n is a, c, g, or t
  misc_feature (3667)..(3667): n is a, c, g, or t
  misc_feature (3998)..(3998): n is a, c, g, or t
gcagctcctgagctggtcgtcggcgtcgcgtccgattcgaacaagcgctgccgcaacctctgctcgtagttgggcgcccgcatcacgttcgcgggcgctggcggtggcgtcggacaagcgaccggtatgacaggcggcgaggtcgttgcgcaaccggagactgccagcacgcaggccagcaaccacctctgtttccacttcggccgcacgctctcgatcttgttcatgctgttctcccagcgaggccatcgccccggtctgtaccgcctgccgttcgcgcgctgcgcgctcggcctgcattgcctcggcatgctgcagcgacgcaacctctgcctttgcggcatcgctgcgatcgccacgccagccccagcctgccgcgaacatcaccgacgaccacagcaccagcagcgcaatcgcgatcaatgtgcgtggcatccctcactgctccgccaggcagcgggcatgacgctgttgctgccgttgccatacgccccaacacaccttgttgggctgtccgttgacccgggtcgagcagtcgtagccccctgcccgcttccacagcagcagcgcatcgcacgcttggcggtactcacctcgcaggagatgccggcgcgtggatgatccattccagttgccgatcccatactggtaaaggaagtcgacataggtgtcgtactcaccctgtgtcagcgcgacgcccggcaacgangcgcggaactgcgattcctcgcgcgccaggtgcgcttccacggtgcgcagcgcacggacgggcgtagtccggtctccgagccggaccggcgtgccgtcctcgcgccgggtcgagccaaaaccataggtaggccgatcattgcgggtcggcaccaccgccgcgtcggtatagccctcatgctcgacaatggcgatcaggcctgcggcactgaggaccagcgcggcaaccaggcggcgcancggcaacgctgtgggcggcgtactcattcgcgtcccttccgccgccactcgcgcagccagcgccagcacaggtaagcgatctgtgcggcgagatagatgatggtcaggaccaccaccaggcggtccagggtgatgccggcggcaagtgcaccggcaacggttaccggcggagccgatttggccgccgctgcgcccactgcgctgaagatttcttctttcatggaaagtccaggatttgatgctggccacgacataccgaggtggccgggagaggtgcccgcctcgctgccggctgggcgcgagggttcatccggtcgggagacgggcgaaagttgagcccaccgctcatgcggcctgggcgatgccttccatccagccgcgcacgcgctggaagcccagctcgaccaggttcaggtaatgccggttggagaccggtcgctgcccgcagttggcgagcagcagattggcggtctcgaagcgctcgaccttgcgacggccgcgaccgcagtagtagccacgcagtgcgcaggccatcgccacgttgtcacgggcaactgcggtgatgatgtcttcgatctgctgcgccagcaggtccgtctccagtggcttgtacccntgcgcacggccgggcatgtcgccgccatgctcgatcaatacggccagcaggttgcgtgattggaagcccaggtattcgcagtcgcgatgcagggcgtattccccgccccagtgctccagacggctgcggacgtattcgccgaacgtatcaagctgcatggtgggcttctccctggatggacgacggacccggcgcgaacacatccgggcgcaggaattcacgacggaccgcaccggccgtggccagctcgatgcgtcggcacagacgggcgccaggcaacttgtggccgcgggcgatcatgtagagggtccgcagcgcacagccggtctggtgggccagacggcgcatcacggggcaactgggggtgccgtagcccccttgggagatggcgtagtcgatgaggttcatggccccacattaccgncccggtaatgccaagtcaataccgttttggtcatttgctggattggtaatgcagagcaccatttgcagatggacgccagtaccgcccgcaccctcaacatgcgcctccgcgttgccgctgccggcggcccggccgaatgggcccgcctgttcggcggcacccgctgggcgcagccccaggtcagccagtggatttcggagagcaacccgaagagcatcggccatcgtctggcacgcgatctcgagtcggcaatgcaactcccgcacggcacgcttgatcgtgccgatcaggacgttgagatgtcgcttcagtctcaatctacgggactggatttcgagaagatgagcgctgcggtcaaggtgctttcgcactacctggagctggtcggcgatccaccggaatggatctacgatcctgtgctgctggagaccgcattcatggtcgtggacgagttcggtcagccttcggccccggacaatgtgctcgacctgacgaagcttctggcaaaacggatcagggaggcgaaggatgactcacacgcgactcgaggagctcgcacagcggttggccgctaggacgcaggaactgcgcggcggtcgcaacccgacacctgccttgcgggtggtggccggtgaggcacatgcagccccgggagaacggcggatggacgccatcatgcgcgagtggcattgccgcatgatccgcaacgtacgccggcgctggggggagccgatgcagcatgtgatcgaccaggcctgttgcggggtggtggacatcgaccagctcgccgacgatgcgctgatccagctgcacaaggatatggaacgcgccgaggagtgcatccgcgaggggatttccttccacgatgcggggcttctacgcgcgcactacggttgaaagagacctggccggtcgattctgaccggccaaaaccgcacgatccattactttttattcccgaattanttaccttaaaggtaattaattggtgttgctggaagatttcctgcgccggcgtcgcggcatgccgaccgtggctgcacgcgggcaacaaaaaagcgcctctcggcgctttctgggttgcccggcaggtgatgccggcgctgtctgcgatggtgggccgtgatggattcgaaccatcgaccaaaagattaaaagtcttctgctctaccgactgagctaacggcccatgcaacatccctgcctgtcggcggggtgggcattctaccctactttgtgcggtagagagaaatcgtcgcagtatcggcctgcagttaaaccgttccatgccgcggacgcatctcatgcanantccttcgtccttcggagccacggatgcgcctgcccttctttctgttcgcctgcctgctgctgccctgcaccgtcaccgccgctgcggccccatcggtacagatagatgacatcgcccgattctggagtacctacgatgccgtgcatgccgagcccgatgccgcgcagcgggtggccctggtccgccagcactacgtcgagccgggcagtgccggnctgcangcgctgatgaaggngcgcaactacaccgccgccgaatacgcacaagcaatgctcgcctggccgcncttctgggcctcggtgcggccgctgancgccaacgcccggcangccagcgcnacgctngagcnggatctggctgngttccncaggctttaccccgccctgcgcccggccagcatcacctatgcggtgggcgtgctgcgcacaggcggcaccacgctgggggaccaggtgctgatcggcgcggaaatggcactcggcgatgcaagcgtggatgtcagcgaactgccggagccgttgcgcagtcgcctgcgggtcttctacgacagcgcgcccggcgcgaacaacgcgcagaacaacctgcatgagtacgtgcacacccaacagcgcgagactacgggatcgctcgcacagtacgcggtgcgcgaaggcgtggccgagtacatcgccgagcggatcagcggtcgccgcccggcnct

SEQ ID NO: 247 - DNA, 4000 bp, Escherichia coli
  misc_feature (1967)..(1967): n is a, c, g, or t
  misc_feature (1976)..(1976): n is a, c, g, or t
  misc_feature (1989)..(1990): n is a, c, g, or t
ataaataaattttcatctaattttggattatcattaatgtcttattaattattacattattattttcattaactcagttatttatatttatattaatattcttattaccttttcgactttaacatcaagaattttttcaacattatattcttcttctccaacttcttcttctacttcaacatccttacccgagtcgattaattcattttcaacaacttcttccttttttttacttctagtttgtctcttgctagacactaattaaataaaggagaaataataataataataatgaaaaagtaaatagtaattattaatattaaaaaaaaagtttgtaaagaaaaaagaaaataaaatttgaacgaatttttacgaaaaaattaaaattattattcaattattgaatgtatattatttagatcaaatattttaatttaaaagtaattttacacaattttattataagtacattaaaaaaaagaaataaaaaacaaaatatatattcatttattatattacttacttttgtatatgattaattactgattaaaataaataatttacaataaattactttatatatgaaaaaaaaaatatattaaataaatatttctattagatttattaaattaatagatttcattgtacaatactttaaaaaatttttagatatctagaaaaaatatagatcacgtgatatatcgttaattagttgtataaaaattaattgaaatttataaaatatatattttcttaattttagaaaaaatagttcagaaaaaaataggctattttcttataaagttatacataatagaatataatcttaataatgtataatacttacagattgaaatatatcacgcttaatataatattaatttaatcctatataaatgttaattataggatataaatattatagtactttcattaatggttgtattataatataaataactaaggtaaaaataatttcggattaatattcattcttttttaaatcatattcaattaagttattatgaattatgatttgaataagtgtatgatttattgtctatttttgggtctcgcaaaatttcattagggttagggttatagtaagaatatatatatatatatatatatatatatactaccatgaaaaaaaacaaaatttttcctactttgaaattgtggtattatatataaagtagggaataatgtgacgtgacgtttagagcagttcaacattcttttaccatgataaatttcaatatatcacgtgatctggattgattggcttagtggattagatttgttaaatatcgtacaatgacttttaacaatgtacataggtactagtgaactaatgttaataagacagtaaggccaatctaacattttcagtatagttgcttcgctactgtggtctttagcttagggatatacactacggcatttaacggaaaaaggctattttattaatgttcattttgattttataattataatacaaataataaataaaaaataataaaaaaacattttctataattatggcattttaaaaattaaaaatatttcaaacattgtctccctgaccatatattttaaaatttatcatgtactacaaaaaaaggctttatttttaattatactagtgttacaaaaaaaaagtgttgttgtatatatgtaataaatattattatttttaaaatttatagattttattgtgttacaactatacacaatttttatggtaaaatactcagatgtttttaacatatttaatgatagattaatataaatatattatcattaattataattaatagtaatttatcaatataaaaacatgatgaacatcttattttattatttattaatttaaatatacatacattaataatagttgatatctattaaaatgattcttaattctactaataatataggataaaaaaaaaaaaaaaaaaaaaaantaaataacntaaaaatagattnntattaaaaaaatattttaatatttattaataattttttataaaattatacatatttaaataaatatattctattattaatagcgattaattttatttagtaagatttaaaaactaaattaaaaaagaataacatattaaaattaaagactatataaaaattaattattgctcttcagaatcccatgggaagttatctaaatttgaatttttaattttatccaactgtgttctaattcttcctggattatccaaagagtattgatcactttccctacagaaactttgcattaaagttttattatgttcccatttcattttttcatcctatatatttaaaatataaaataatatattaatgagtttatatattttatttataaaaaaacataatattattttgttaaaagatggttataatttacaactggttggtctaaactctctaaatatttttttcttttttcgtccatttctggtgtaacctttaagtccttttcgttccacgactgtggttcatttaatttactaattataatatatatatgcatttattaaaaagttttttttgatagaaaatgtatatatgtattaagatattataccttcttctccaatcatgattacgctccctctgtgaattttccatttctttttgttttttatcattctatttttttaaaaataaataataataaataagagttaatcatttataaaaaacattttaatgattaataattaactatacatttttataattacctttgcagccgcaacataattatcaatatattcacttatatcttcaatttttgaaacattttcaagttgagattgattatttacatcagttgtagattttaatttattatttaaactatttgatctgtgtaatgaggatgattcatttagtattgatgttgattttttcgttgaaggcgtgccttttattattaaaattataatatataatataattttatattgtaagtaaccaaattttagataataataatatcattgttaattataattaaaaaaaaaaaaaaaaaatacttggtttattagaggatttagattcttctttgatttctttaattgttttagaaacatgattttcatcttttgaaatttcactaacttttttcgatttacgttttacttctagtttttcatcattttcttcatctgttatttgttctggttcttcagttttcattggaatatcaactacttcttttataccctatattcaagattatattattatatgaattaattattacggtagtcaccagtgataatatttcagaagaaaaagatatatattttaatatattttaaaagttaaatttggaatctttaaagtagcatttagatacaataccttacgattgtcattctctgaataaattaaccaattaataattaatatatataataacaataagttagtaattatttatagatttgaatatatatataactgcatattttaaatataataataaaataacaataacaacaacaacaacaacaacaataataataataataataataataataataataataataataataataataataacaacaacaacaacaacaacaacaataataataataataataataataataataataataataataataataacaataataataataataataattattataataataataataataatataataactaaacaaaaatatgtataataaaataaaataattaataaataaacaactttacaatgaaataaaacatgtaaatatatataatatataatgattgaatattattgtatattatataataattattataataataacaatagtgacaataacaattatcattgtttgatttaaaatactgaatatcataataaataaagaaaaaaataccacaaattaaaattaaagaaagaaataataactgatacaaatatatcattatttagattataatataatattttatta

SEQ ID NO: 248 - DNA, 4000 bp, Escherichia coli
  misc_feature (1984)..(1985): n is a, c, g, or t
  misc_feature (1987)..(2013): n is a, c, g, or t
  misc_feature (2050)..(2079): n is a, c, g, or t
  misc_feature (2116)..(2145): n is a, c, g, or t
  misc_feature (2182)..(2211): n is a, c, g, or t
  misc_feature (2248)..(2277): n is a, c, g, or t
  misc_feature (2315)..(2343): n is a, c, g, or t
  misc_feature (2380)..(2408): n is a, c, g, or t
  misc_feature (2446)..(2475): n is a, c, g, or t
  misc_feature (2477)..(2477): n is a, c, g, or t
  misc_feature (2481)..(2490): n is a, c, g, or t
  misc_feature (2492)..(2493): n is a, c, g, or t
  misc_feature (2496)..(2498): n is a, c, g, or t
  misc_feature (2500)..(2501): n is a, c, g, or t
  misc_feature (2503)..(2503): n is a, c, g, or t
  misc_feature (2505)..(2505): n is a, c, g, or t
  misc_feature (2507)..(2507): n is a, c, g, or t
  misc_feature (2511)..(2511): n is a, c, g, or t
  misc_feature (2513)..(2530): n is a, c, g, or t
  misc_feature (2532)..(2543): n is a, c, g, or t
  misc_feature (2547)..(2556): n is a, c, g, or t
  misc_feature (2558)..(2559): n is a, c, g, or t
  misc_feature (2562)..(2564): n is a, c, g, or t
  misc_feature (2566)..(2567): n is a, c, g, or t
  misc_feature (2569)..(2569): n is a, c, g, or t
  misc_feature (2571)..(2571): n is a, c, g, or t
  misc_feature (2573)..(2573): n is a, c, g, or t
  misc_feature (2577)..(2577): n is a, c, g, or t
  misc_feature (2579)..(2606): n is a, c, g, or t
  misc_feature (2608)..(2609): n is a, c, g, or t
  misc_feature (2613)..(2622): n is a, c, g, or t
  misc_feature (2624)..(2625): n is a, c, g, or t
  misc_feature (2628)..(2630): n is a, c, g, or t
  misc_feature (2632)..(2633): n is a, c, g, or t
  misc_feature (2635)..(2635): n is a, c, g, or t
  misc_feature (2637)..(2637): n is a, c, g, or t
  misc_feature (2639)..(2639): n is a, c, g, or t
  misc_feature (2643)..(2643): n is a, c, g, or t
  misc_feature (2645)..(2675): n is a, c, g, or t
  misc_feature (2679)..(2688): n is a, c, g, or t
  misc_feature (2690)..(2691): n is a, c, g, or t
  misc_feature (2694)..(2696): n is a, c, g, or t
  misc_feature (2698)..(2699): n is a, c, g, or t
  misc_feature (2701)..(2701): n is a, c, g, or t
  misc_feature (2703)..(2703): n is a, c, g, or t
  misc_feature (2705)..(2705): n is a, c, g, or t
  misc_feature (2709)..(2709): n is a, c, g, or t
  misc_feature (2711)..(2741): n is a, c, g, or t
  misc_feature (2745)..(2754): n is a, c, g, or t
  misc_feature (2756)..(2757): n is a, c, g, or t
  misc_feature (2760)..(2762): n is a, c, g, or t
  misc_feature (2764)..(2765): n is a, c, g, or t
  misc_feature (2767)..(2767): n is a, c, g, or t
  misc_feature (2769)..(2769): n is a, c, g, or t
  misc_feature (2771)..(2771): n is a, c, g, or t
  misc_feature (2775)..(2807): n is a, c, g, or t
  misc_feature (2811)..(2820): n is a, c, g, or t
  misc_feature (2822)..(2823): n is a, c, g, or t
  misc_feature (2826)..(2828): n is a, c, g, or t
  misc_feature (2830)..(2831): n is a, c, g, or t
  misc_feature (2833)..(2833): n is a, c, g, or t
  misc_feature (2835)..(2835): n is a, c, g, or t
  misc_feature (2837)..(2837): n is a, c, g, or t
  misc_feature (2841)..(2841): n is a, c, g, or t
  misc_feature (2843)..(2858): n is a, c, g, or t
  misc_feature (2860)..(2873): n is a, c, g, or t
  misc_feature (2877)..(2886): n is a, c, g, or t
  misc_feature (2888)..(2889): n is a, c, g, or t
  misc_feature (2892)..(2894): n is a, c, g, or t
  misc_feature (2896)..(2897): n is a, c, g, or t
  misc_feature (2899)..(2899): n is a, c, g, or t
  misc_feature (2901)..(2901): n is a, c, g, or t
  misc_feature (2903)..(2903): n is a, c, g, or t
  misc_feature (2907)..(2939): n is a, c, g, or t
  misc_feature (2943)..(2952): n is a, c, g, or t
  misc_feature (2954)..(2955): n is a, c, g, or t
  misc_feature (2958)..(2960): n is a, c, g, or t
  misc_feature (2962)..(2963): n is a, c, g, or t
  misc_feature (2965)..(2965): n is a, c, g, or t
  misc_feature (2967)..(2967): n is a, c, g, or t
  misc_feature (2969)..(2969): n is a, c, g, or t
  misc_feature (2973)..(2973): n is a, c, g, or t
  misc_feature (2975)..(3005): n is a, c, g, or t
  misc_feature (3009)..(3018): n is a, c, g, or t
  misc_feature (3020)..(3021): n is a, c, g, or t
  misc_feature (3024)..(3026): n is a, c, g, or t
  misc_feature (3028)..(3029): n is a, c, g, or t
  misc_feature (3031)..(3031): n is a, c, g, or t
  misc_feature (3033)..(3033): n is a, c, g, or t
  misc_feature (3035)..(3035): n is a, c, g, or t
  misc_feature (3039)..(3063): n is a, c, g, or t
  misc_feature (3065)..(3068): n is a, c, g, or t
  misc_feature (3070)..(3071): n is a, c, g, or t
  misc_feature (3075)..(3084): n is a, c, g, or t
  misc_feature (3086)..(3087): n is a, c, g, or t
  misc_feature (3090)..(3092): n is a, c, g, or t
  misc_feature (3094)..(3095): n is a, c, g, or t
  misc_feature (3097)..(3097): n is a, c, g, or t
  misc_feature (3101)..(3101): n is a, c, g, or t
  misc_feature (3105)..(3105): n is a, c, g, or t
  misc_feature (3107)..(3137): n is a, c, g, or t
  misc_feature (3141)..(3148): n is a, c, g, or t
  misc_feature (3150)..(3150): n is a, c, g, or t
  misc_feature (3152)..(3153): n is a, c, g, or t
  misc_feature (3156)..(3157): n is a, c, g, or t
  misc_feature (3161)..(3161): n is a, c, g, or t
  misc_feature (3163)..(3163): n is a, c, g, or t
  misc_feature (3165)..(3165): n is a, c, g, or t
  misc_feature (3167)..(3167): n is a, c, g, or t
  misc_feature (3171)..(3171): n is a, c, g, or t
  misc_feature (3173)..(3194): n is a, c, g, or t
  misc_feature (3196)..(3203): n is a, c, g, or t
  misc_feature (3207)..(3212): n is a, c, g, or t
  misc_feature (3214)..(3216): n is a, c, g, or t
  misc_feature (3218)..(3219): n is a, c, g, or t
  misc_feature (3223)..(3223): n is a, c, g, or t
  misc_feature (3226)..(3227): n is a, c, g, or t
  misc_feature (3229)..(3229): n is a, c, g, or t
  misc_feature (3231)..(3231): n is a, c, g, or t
  misc_feature (3233)..(3233): n is a, c, g, or t
  misc_feature (3238)..(3269): n is a, c, g, or t
  misc_feature (3273)..(3273): n is a, c, g, or t
  misc_feature (3277)..(3280): n is a, c, g, or t
  misc_feature (3282)..(3282): n is a, c, g, or t
  misc_feature (3284)..(3285): n is a, c, g, or t
  misc_feature (3289)..(3289): n is a, c, g, or t
  misc_feature (3292)..(3293): n is a, c, g, or t
  misc_feature (3297)..(3299): n is a, c, g, or t
  misc_feature (3302)..(3325): n is a, c, g, or t
  misc_feature (3327)..(3335): n is a, c, g, or t
  misc_feature (3338)..(3339): n is a, c, g, or t
  misc_feature (3343)..(3344): n is a, c, g, or t
  misc_feature (3347)..(3348): n is a, c, g, or t
  misc_feature (3351)..(3351): n is a, c, g, or t
  misc_feature (3354)..(3355): n is a, c, g, or t
  misc_feature (3358)..(3359): n is a, c, g, or t
  misc_feature (3361)..(3361): n is a, c, g, or t
  misc_feature (3363)..(3365): n is a, c, g, or t
  misc_feature (3367)..(3401): n is a, c, g, or t
  misc_feature (3405)..(3421): n is a, c, g, or t
  misc_feature (3424)..(3425): n is a, c, g, or t
  misc_feature (3427)..(3431): n is a, c, g, or t
  misc_feature (3434)..(3434): n is a, c, g, or t
  misc_feature (3436)..(3453): n is a, c, g, or t
  misc_feature (3455)..(3460): n is a, c, g, or t
  misc_feature (3462)..(3473): n is a, c, g, or t
  misc_feature (3475)..(3483): n is a, c, g, or t
  misc_feature (3485)..(3498): n is a, c, g, or t
  misc_feature (3500)..(3502): n is a, c, g, or t
  misc_feature (3504)..(3509): n is a, c, g, or t
  misc_feature (3511)..(3514): n is a, c, g, or t
  misc_feature (3516)..(3554): n is a, c, g, or t
  misc_feature (3556)..(3563): n is a, c, g, or t
  misc_feature (3566)..(3571): n is a, c, g, or t
  misc_feature (3573)..(3590): n is a, c, g, or t
  misc_feature (3593)..(3599): n is a, c, g, or t
  misc_feature (3601)..(3601): n is a, c, g, or t
  misc_feature (3603)..(3607): n is a, c, g, or t
  misc_feature (3609)..(3623): n is a, c, g, or t
  misc_feature (3625)..(3630): n is a, c, g, or t
  misc_feature (3632)..(3682): n is a, c, g, or t
  misc_feature (3684)..(3703): n is a, c, g, or t
  misc_feature (3705)..(3804): n is a, c, g, or t
  misc_feature (3806)..(3830): n is a, c, g, or t
  misc_feature (3832)..(3848): n is a, c, g, or t
  misc_feature (3850)..(3909): n is a, c, g, or t
  misc_feature (3911)..(3919): n is a, c, g, or t
  misc_feature (3921)..(3937): n is a, c, g, or t
  misc_feature (3939)..(3986): n is a, c, g, or t
  misc_feature (3988)..(4000): n is a, c, g, or t
tacaccgtattatgcgcgtcatgattctagtctacaaatagctagacaaatttcttggaaagaagatgtaaaatgtgaagtatggactgctattattgcacaaaagatattgaatcaatcatactatttgggagaatgttctttctttgagaaatctcaatcaattatggagttatatcatggtttagaacagtttgatcctagtaatcgtgagggtcactctgccagaatttattttaatacacttttcggtaatgactttactagggaaagtgataatgatatcaatgcagcgctagattatggttatactttattattgagtatgtttgcacgtgaggttgtcgtctgtggttgtatgacacaaattggtttaaagcatgctaatcagtttaatcaatttaaccttgctagtgatattatggaaccatttagaccaattatagatagaattgtttatcaaaatcgacataagaattttgtcaaaatcaagaaagaactcttttcgattttttcagaaacctatctctacaatggaaaagagatgtatttatcaaacattgttagtgattatacaaaaaaagttataaaagtgttaaatcagttaggtgagggaattcctgaatttagaatatgagttacagatatatgcgaatgatattaatgttcgatatgccaacagatactgctgaagagaggaaagcgtatcgtaagtttaggaagtttctattaagtgaaggttttattatgcaccagtattcggtttatagtaaacttttgttaaacaataccgcaaatacagcaatgattggacgacttaaggctaataatcctaaaaaaggaaatataacaatattaacagttactgaaaagcaatttgctcgtatgatttatttgtacggagataagaacaccagtgttgccaattcagacgaaaggttagtgttcttaggagaagattattgtgatgaagattaatttttcgcttttggatgagcctatggagattagccaggggacagttctcgtaattgaggatgtgagtgtgtttgctcaaatagttaaggaattctatcagtatgatgaacaatcgaatttaacaatatttgatagtaaaataaggagtataaagtcctctgaattgcttttaataacagatattttaggttacgatattaatacttctcaggtattaaagttgcttcacacagatattgtaagccagttgaatgataaaccagaagttagatcagaaatagattctttgatatcattaattactgatattatcatggcagagtgtttagaaaatgaactagatatagagtatgatgagattacacttttagaactaattaaatcgttaggtatcagaatcgaaactacgtcttgtacggtttttgaaaaaatatttgagattttacagattttcaaatatttagttaaaaagagaattttggtgttcgtcaatagtttgtcgtatttttctaatgatgaaatttatcaaatcttggaatatacaaagttattacaagctgatgtattatttttggaacctagaaagattaaaggtattcaacaatttattttggataaggattacattttgatgccttacaataactagtaatttggtaataagtatagatagtcttgagttatttcaagactatcttttagtatttagtagtttctacatgaagttgagtggaagaatcattttgttagagagtaggttataagctatctgataggtgagaaggtaagttgattggaaaaagatttctaaaattttttcgatatagcgacagctctatttgttaaaacgttgttatataaggctttttaaggtataataaacataaaaatggaatcattttgaagctgaagtcaggctgagatgaatagcgcgattacgaaatctggtagagaaaaatgacctacgaggttttagagctgtgttgtttcgaatggttccaaaacnntnnnnnnnnnnnnnnnnnnnnnnnnnnngttttagagctgtgttgtttcgaatggttccaaaacnnnnnnnnnnnnnnnnnnnnnnnnnnnnnngttttagagctgtgttgtttcgaatggttccaaaacnnnnnnnnnnnnnnnnnnnnnnnnnnnnnngttttagagctgtgttgtttcgaatggttccaaaacnnnnnnnnnnnnnnnnnnnnnnnnnnnnnngttttagagctgtgttgtttcgaatggttccaaaacnnnnnnnnnnnnnnnnnnnnnnnnnnnnnngttttagagctgtgttgtttcgaatggttccaaaaccnnnnnnnnnnnnnnnnnnnnnnnnnnnnngttttagagctgtgttgtttcgaatggttccaaaacnnnnnnnnnnnnnnnnnnnnnnnnnnnnnagttttagagctgtgttgtttcgaatggttccaaaacnnnnnnnnnnnnnnnnnnnnnnnnnnnnnngntttnnnnnnnnnntnnttnnnanngntncnaaancnnnnnnnnnnnnnnnnnnannnnnnnnnnnntttnnnnnnnnnntnnttnnnanngntncnaaancnnnnnnnnnnnnnnnnnnnnnnnnnnnnanntttnnnnnnnnnntnnttnnnanngntncnaaancnnnnnnnnnnnnnnnnnnnnnnnnnnnnnnntttnnnnnnnnnntnnttnnnanngntncnaaancnnnnnnnnnnnnnnnnnnnnnnnnnnnnnnntttnnnnnnnnnntnnttnnnanngntncnaaannnnnnnnnnnnnnnnnnnnnnnnnnnnnnnnntttnnnnnnnnnntnnttnnnanngntncnaaancnnnnnnnnnnnnnnnntnnnnnnnnnnnnnntttnnnnnnnnnntnnttnnnanngntncnaaannnnnnnnnnnnnnnnnnnnnnnnnnnnnnnnntttnnnnnnnnnntnnttnnnanngntncnaaancnnnnnnnnnnnnnnnnnnnnnnnnnnnnnnntttnnnnnnnnnntnnttnnnanngntncnaaannnnnnnnnnnnnnnnnnnnnnnnnannnnanntttnnnnnnnnnntnnttnnnanngnttcnaaancnnnnnnnnnnnnnnnnnnnnnnnnnnnnnnntttnnnnnnnntntnnttnngaangntncnaaancnnnnnnnnnnnnnnnnnnnnnnannnnnnnntttnnnnnntnnntnntttnganngntncnaaaannnnnnnnnnnnnnnnnnnnnnnnnnnnnnnntttnagannnntntnntttngannggtnnnaannnnnnnnnnnnnnnnnnnnnnnnannnnnnnnnttnnaganntgnnttnttnnganngntnnnannnnnnnnnnnnnnnnnnnnnnnnnnnnnnnnnnntttnnnnnnnnnnnnnnnnnganngnnnnnaanannnnnnnnnnnnnnnnnntnnnnnnannnnnnnnnnnnannnnnnnnntnnnnnnnnnnnnnnannnannnnnntnnnnannnnnnnnnnnnnnnnnnnnnnnnnnnnnnnnnnnnnnnannnnnnnnaannnnnntnnnnnnnnnnnnnnnnnnaannnnnnntntnnnnntnnnnnnnnnnnnnnngnnnnnnannnnnnnnnnnnnnnnnnnnnnnnnnnnnnnnnnnnnnnnnnnnnnnnnnntnnnnnnnnnnnnnnnnnnnntnnnnnnnnnnnnnnnnnnnnnnnnnnnnnnnnnnnnnnnnnnnnnnnnnnnnnnnnnnnnnnnnnnnnnnnnnnnnnnnnnnnnnnnnnnnnnnnnnnnntnnnnnnnnnnnnnnnnnnnnnnnnnannnnnnnnnnnnnnnnnannnnnnnnnnnnnnnnnnnnnnnnnnnnnnnnnnnnnnnnnnnnnnnnnnnnnnnnnnnnannnnnnnnnannnnnnnnnnnnnnnnncnnnnnnnnnnnnnnnnnnnnnnnnnnnnnnnnnnnnnnnnnnnnnnnnannnnnnnnnnnnn

SEQ ID NO: 249 - DNA, 4000 bp, Escherichia coli
  misc_feature (90)..(90): n is a, c, g, or t
  misc_feature (106)..(106): n is a, c, g, or t
  misc_feature (260)..(260): n is a, c, g, or t
  misc_feature (462)..(462): n is a, c, g, or t
  misc_feature (562)..(562): n is a, c, g, or t
  misc_feature (801)..(801): n is a, c, g, or t
  misc_feature (860)..(861): n is a, c, g, or t
  misc_feature (924)..(924): n is a, c, g, or t
  misc_feature (1980)..(1980): n is a, c, g, or t
  misc_feature (1985)..(1986): n is a, c, g, or t
  misc_feature (1994)..(1995): n is a, c, g, or t
  misc_feature (1997)..(1998): n is a, c, g, or t
  misc_feature (2003)..(2003): n is a, c, g, or t
  misc_feature (2009)..(2010): n is a, c, g, or t
  misc_feature (2018)..(2018): n is a, c, g, or t
  misc_feature (2024)..(2025): n is a, c, g, or t
  misc_feature (2030)..(2031): n is a, c, g, or t
  misc_feature (2804)..(2806): n is a, c, g, or t
  misc_feature (2852)..(2852): n is a, c, g, or t
  misc_feature (2859)..(2859): n is a, c, g, or t
  misc_feature (2868)..(2869): n is a, c, g, or t
  misc_feature (3065)..(3065): n is a, c, g, or t
  misc_feature (3071)..(3071): n is a, c, g, or t
attagttgttttctatggttatatttattcttcaatacaaacttttcaaaatgtccttcgatataaacatattcccaccattcaggaagnaacatcgctgcaattntacggcggatattgtacgttgcaaagtgtttcatcaggccataataagagttcatcgtactcacaaacttctcaacatacgcttctgcaaatccattttcagctattctattaaatttcctgacagcgttatatgtgttaccaaccaccctgtnagatacataaattctaccaggcaaaatgaacgcccctacaaacaagactccttttttataatgctgaagatacagtttgcgtggatgcaaccgtaaaaggagttgttctttcaggaaaccatcaagaagatggactttggacaatatttcttccggtgatttcactacgatacaaaagtcatcaacaaagcgtacataatanatgaatcccagtatttccatcacgaaataatcatatacagacgccagaaagttggctatgagttgcgacggcaggttcccgatagccactcccctgtcanggtcattatgaaacagacttttattactgggaagtttgtcccacatggagacgggagagcgtctgatacacttattttgtggacaatgaaagatagtaacggctagaaggtaaagcagacattcaatatcatcgcctttataattgtcccttacgaatatgttcagcatttcccataccaacgatttcgagatagacatgaagaaactgaacaggtcatctttgaaaatgtacgcatcngcagtataattctcactgacctcgactatcatgttattcagatagtgcacggcagacanncatccctcacctttccggcagttcttcgagacgttcccttgttcccgaaaacgttcctctaanatcggctcgatacgaagagcgatccagtgatggacaacacgatcaatgaaagcggcggcaaaaacctcccgatataccgggtaagtccgtatgaatacttttgaaaagtccggtacatattcaccgtaaataatagaataccatagccgcaccaatgcagactgataatcattataaaactcaacacaatccgtactcgttcttttctgcctggcacaatcttcggatgcttcgaaaatactgctaagaagtatgtcatagattatattacctgttgcggcgaggggacgaacccggttcgcgttctggcggttgttcgtgttgacgttgccgttgttgaagttcacgttccaactgctggaagccgttgcatccgctatcttagtctttcccggctcatcaccggggggatgcccaataaataattctaattgctcactcataatccccttggcgattatgactccggctttgcgacttgttgcgatccgttagctttttgccgttggagatctgcaaccgtttttttgtaccagccggtactttgcttaccgatactctctgcaagcagacagatttcggctgtttgagtcaggctggtcaaatgtcgttcttcacacactcttagcagtaatttcaatgcatcaaactcacacaaaaacttcatcagataatctgcacggtgctcaaggttcatatctgtatttgcataacggatatattcgcaacaatgaacggcaagcatcatcaactccgtaccaaattcataccggaacgccttggggaattgttgccgggcatcaatgataaggttcagaagcttatacatcgaatttgatataggaaggtcttgtgtaagtgccatgttaattttttaatattttaatgtatgtattagagggcgcaaagttaataactgtaaagcaattaacacaattttagctcaaaaaagtgaaaccaaaaagcccctaccggggcttttatttagttaaccctctaagggataaagaattaaagggataaagtgtttattgcggcgaggggacgaacccggtncgcgnnctggcggnngnncgtgntgacgnngccgtagntgaagnncacgnnccaactgctggaagcgtcatattcggtactagaccaataccagtcgtttgtaaatatattttgattaccaaacatagaagttatgagctcattgatttcggttttatacttggccataagcataagttcacccaatgcgggcaggttccacacggttgtatcttcaattccgtcagattcaagcgtacaggctttataggctctggcaacttcggcggcaggggcaccgacagttccctgggtgtccttgacgcctgcaagggtttctattataacatcggtattttctttgccgtcgaaggtatcatagagtccttggttaccactgccgtagtttttcaggccgcgcaggtcggtaccgtagccaccccatttgaacgttttgttgccgcctgcgtcaatgcagtcgcttttggcgataatgaactggtggcattcggcgcgaagtcggatgccgatacggatatacttggagcggttattcgcgctcatggagttccattcggaagccgtgaaaaagacttgttcaccgtcttcaattcggagcgtagccaaagaaaggtcaagaagcgtacctgaccattgcatatatttggcgatgtcgcttgcgggggtgttttcattcacggttgtaaaacctattgattttaaggcttctatctggtcttgtttattcaagcgcagaagcatggcgttggcgatatttttatccattttattgtataatattaagttaatactattcggaagcaacagctctcacatgaagaagnnntgaatttttgttttgattcgtaatacgcccggtattcagttcgaangcccagncggagttannatcccaaattgttgatgaccagtagtatttatcagtcatcagcatactgtcactactccaaaaggtacgcatcatctcattgattttatcgcggtagcggtacatcagaagcatttggccagatgaaggaaggaaccagttggattcatcctcgataccgtcactttccaaagtgtaggcacggtatgcacgggcngcttcngcagctggcgcaccgatcacaccactattattttggtctttcagagttgcgataatgaggtcagtatcttcctcacccgtgaagcagccatacatggcgcccagtcctttttgattcaggccatctatggctttgccctgaccgccccagtagaaggtggtagtcatgtcggcattatagcactcctgggcggaaattacgaaggagtgtccatgtgcccggatacgaagaccgcgtttgataaacaactgtttgttggtaaccgtgagggaatcccattcctcacgggtgaaataccatttggagttatccgagatgcggttacaggcaagattcaaatcaagcaggccggcagcccacttgatacgttgtccaaattcagatgcgcgggaattctcggtgacatccgagaagcccacggcgttcagtgctgccacttgtgcctgtttattcaagcgaagcagcgttgcgctttgttcattcgtcatagttacttgttgattaaatcattaatatccatattgtcttcagcgaagcgttcgagatattcttcgtaggtttcgccgttataatattcaaggacttcattgatgttgtccagcgttacgttatcgtagtacggttctccgccataagactcattattgaaccagttgatcaggtcgatgtaggcatctatgacggtaaggatgacaaggccgtcgataccggattcaagggattcgatttcatccgtttcacggataactgtcagttcatacgtgccgttgactaccggtttatcctgtctgttgccgtcctcatccattccggcaactccatattcgagaatggcaagaagctcggagccgtcagccttcagtgtcatgttcgagatacggagcatggaaagtttacgggatgccgtttgtgaagcgaggacgtcacgg

SEQ ID NO: 250 - DNA, 4000 bp, Escherichia coli
  misc_feature (1)..(847): n is a, c, g, or t
  misc_feature (918)..(918): n is a, c, g, or t
  misc_feature (1488)..(1488): n is a, c, g, or t
  misc_feature (1791)..(1791): n is a, c, g, or t
  misc_feature (1990)..(1991): n is a, c, g, or t
  misc_feature (1998)..(1998): n is a, c, g, or t
  misc_feature (2296)..(2296): n is a, c, g, or t
  misc_feature (2308)..(2308): n is a, c, g, or t
  misc_feature (2332)..(2332): n is a, c, g, or t
  misc_feature (2702)..(2702): n is a, c, g, or t
  misc_feature (3269)..(3269): n is a, c, g, or t
  misc_feature (3696)..(3696): n is a, c, g, or t
  misc_feature (3714)..(3714): n is a, c, g, or t
  misc_feature (3717)..(3717): n is a, c, g, or t
  misc_feature (3729)..(3729): n is a, c, g, or t
nnnnnnnnnnnnnnnnnnnnnnnnnnnnnnnnnnnnnnnnnnnnnnnnnnnnnnnnnnnnnnnnnnnnnnnnnnnnnnnnnnnnnnnnnnnnnnnnnnnnnnnnnnnnnnnnnnnnnnnnnnnnnnnnnnnnnnnnnnnnnnnnnnnnnnnnnnnnnnnnnnnnnnnnnnnnnnnnnnnnnnnnnnnnnnnnnnnnnnnnnnnnnnnnnnnnnnnnnnnnnnnnnnnnnnnnnnnnnnnnnnnnnnnnnnnnnnnnnnnnnnnnnnnnnnnnnnnnnnnnnnnnnnnnnnnnnnnnnnnnnnnnnnnnnnnnnnnnnnnnnnnnnnnnnnnnnnnnnnnnnnnnnnnnnnnnnnnnnnnnnnnnnnnnnnnnnnnnnnnnnnnnnnnnnnnnnnnnnnnnnnnnnnnnnnnnnnnnnnnnnnnnnnnnnnnnnnnnnnnnnnnnnnnnnnnnnnnnnnnnnnnnnnnnnnnnnnnnnnnnnnnnnnnnnnnnnnnnnnnnnnnnnnnnnnnnnnnnnnnnnnnnnnnnnnnnnnnnnnnnnnnnnnnnnnnnnnnnnnnnnnnnnnnnnnnnnnnnnnnnnnnnnnnnnnnnnnnnnnnnnnnnnnnnnnnnnnnnnnnnnnnnnnnnnnnnnnnnnnnnnnnnnnnnnnnnnnnnnnnnnnnnnnnnnnnnnnnnnnnnnnnnnnnnnnnnnnnnnnnnnnnnnnnnnnnnnnnnnnnnnnnnnnnnnnnnnnnnnnnnnnnnnnnnnnnnnnnnnnnnnnnnnnnnnnnnnnnnnnnnnnnnnnnnnnnnnnnnnnnnnnnnnnnnnnnnnnnnnnnnnnnnnnnnnnnnnnnnnnnnnnnnnnnatttcacgggttacagagcaaccttcgggggttaatacaaactgggtagccagagatacatattctgctgnatataatgctgcaatcatgccacccaaagaagcattattcgagtcgatggcttctttgccggtaaatactacatcgtatttttcccgatcgcaaagagccgcaatttgtttggcaactgtatagctgtcgttagaaaccaaatcaattcgaaatgcttcatcccctccaagtgccaatgccttgcgaataatgggttcactgtcagctccgccaacacaaaccaagtgaaggatggtggcaggatctgattctttcaattcaatggcacgtaccaaggcataccattcgtcgtacgggttaataatccattgcacacccgcttcatcaaaacgagtattgttttcggtaaaggcaatccggctggtggtatccggtgttttactgatgcagaccagtattttcatacagttcgatataagggttacaaattagttgaggtagtaaatggttgtttatgcaactaattgcaaatataggaaggaatttcatagagttttcaaccaaatcgttaatttttttacacagtattttgaaaaaaatcaacccgtaattcggttgtatatttgaanatgaatcggatggaaaaattaaaagaatatctgaaagcgcagcccgacgacccttttctgaatcatgctttggctttggaatatagtaaagaaggggaactagatttagcgcgcgaactattcattcggctcttacagttgcatccagcatatgtaggttcttattatcacctggctgcccttttattgcagcaaaatcaaagagatgcagccattgaatggtatgaaaaagggatggccgcagccaaaaaagcaggggatgcccatgcattcaacgaattaagggcagcttatgatgatgtnatggatgtgtaagaaaaaaggctttctcagctacctctagagccacctgttttgatgggcttctttccaccaccgctggctttactggctcctggcttagcaataaatttagaactttgggcaccgggcttagtagatgaattgccggatttgccattttttttgttgttcacgggtaatgacatacagctcaatttgnnataaagntacgattttttttgcggatttcaagctaaacggctagggaggggttcaactgattcgcagccgcagttcagtatctattttggtaaaaagatggtagggtttatacgatctccattccggcaattccatcagctccatgtaataggggagcttttttttaataaagtcttgctgtgttgccggcggcatattcaaaataataatccatccttcttcctcgctcacctcatcataccattcgcggtaatattcattgtcgctgctgtgaaaattcaatacattttcggcgatgaaaatnaatttactaatncctttcttcatcaattcatccccnatttcccgcttcagcatcatgatatcgttttcaatcgcatcgttccattctccaattaattcaatcacacaaaagtgaagttcatagtctacatagatgatttttagataaagggttttgctgccaaaatcatcccattgcggatggatatagtaattgtaaatggtttgtgagaactcgaattcactgtacttcgtgccataaaagggggatagcctatcatcagctgcgatgtataaatgcctccagttataatagggctcgatagtatgcatagtatttttaatgcccgttttcggcggcttcaatcgctttttttacactaccatgcttcaacaaaaggtctttggcttgctcataatctttcagngccaatccctccattaccatcttcactcctcgatctaccagttttacattgctgagctgcatattcaccattttattgtcttctacccggcccaactgaatcataactgcggtagaaatcatattcaacaccagtttttgagcagttccgcttttcatccgggtacttccagtaacaaattcagttccaaccaccacttctaccggaaaatctgcttctctcgatacgggtgtattgggattacaactgatactgcccgtaataatgccctttcttctgcattgttttaaagcacctatcacataaggggtacttccgctggctgccaaacccactactacatctttgtcactcacaaaatgtttcattaaatcgttccaaccttcatctggatggtcctccgcaaattctacggccgtggtaatggctttgtcgcccccggcaatgatgccgattaccagtccatagggcactccaaacgtgggcggacattcactggcatccacaatacccaatcggccgctggtgccggctccaatataaaataagcggcctcctgccagcatnttgtcggagatagcggctactaatttttcaatttgtggaatagctttttcaaccgcatccggcacagttttatcttcccgattgatattttgtagcaaatcaggaatgctcattttttctaagtgtctgtattgcgagggaagctctgtatatcggataaactctttcatataattattgatgatattgaatcaaaccttgcaggggcgttttcataacccgacccagctttattccataatggttacaaagttcttgtaaaacatctttgaaaccaaaagcaatacttccagtaaaatgaaccggaagctgttcacgctctttgtatttgagtaagtggtgaaaaaagaactcgttacagccatcttccagtatattttctaccatatagtgacccctgttttcggccaaaaaaactgcgaaggangccagataacgattggcnagnggctttttgtanacattttccagtatgtcggctcgggtttgcttaaaacggctttcgaatgccgattgtaaagcctcatccatggtttcatacaaatagtattgtaccagtttttttccaagataagcgccacttccctcatcacctagtatatagccgatacccggactattttttacaatctttttaccgttatagtagcaggaattggaaccggttcctaaaatgcaggcaatccctttgctatggccgcataaggctcgggcagcggccaataaatcgg

SEQ ID NO: 251 - DNA, 4000 bp, Escherichia coli
  misc_feature (1)..(403): n is a, c, g, or t
  misc_feature (488)..(488): n is a, c, g, or t
  misc_feature (492)..(492): n is a, c, g, or t
  misc_feature (494)..(495): n is a, c, g, or t
  misc_feature (497)..(497): n is a, c, g, or t
  misc_feature (500)..(503): n is a, c, g, or t
  misc_feature (505)..(505): n is a, c, g, or t
  misc_feature (507)..(509): n is a, c, g, or t
  misc_feature (511)..(513): n is a, c, g, or t
  misc_feature (517)..(518): n is a, c, g, or t
  misc_feature (520)..(520): n is a, c, g, or t
  misc_feature (522)..(522): n is a, c, g, or t
  misc_feature (525)..(525): n is a, c, g, or t
  misc_feature (527)..(527): n is a, c, g, or t
  misc_feature (530)..(532): n is a, c, g, or t
  misc_feature (535)..(539): n is a, c, g, or t
  misc_feature (541)..(542): n is a, c, g, or t
  misc_feature (544)..(547): n is a, c, g, or t
  misc_feature (549)..(550): n is a, c, g, or t
  misc_feature (552)..(552): n is a, c, g, or t
  misc_feature (554)..(568): n is a, c, g, or t
  misc_feature (570)..(570): n is a, c, g, or t
  misc_feature (572)..(619): n is a, c, g, or t
  misc_feature (621)..(627): n is a, c, g, or t
  misc_feature (629)..(629): n is a, c, g, or t
  misc_feature (632)..(634): n is a, c, g, or t
  misc_feature (636)..(641): n is a, c, g, or t
  misc_feature (643)..(651): n is a, c, g, or t
  misc_feature (653)..(655): n is a, c, g, or t
  misc_feature (657)..(658): n is a, c, g, or t
  misc_feature (660)..(661): n is a, c, g, or t
  misc_feature (663)..(669): n is a, c, g, or t
  misc_feature (671)..(672): n is a, c, g, or t
  misc_feature (674)..(701): n is a, c, g, or t
  misc_feature (703)..(712): n is a, c, g, or t
  misc_feature (714)..(715): n is a, c, g, or t
  misc_feature (717)..(718): n is a, c, g, or t
  misc_feature (720)..(727): n is a, c, g, or t
  misc_feature (729)..(733): n is a, c, g, or t
  misc_feature (735)..(738): n is a, c, g, or t
  misc_feature (740)..(741): n is a, c, g, or t
  misc_feature (743)..(761): n is a, c, g, or t
  misc_feature (764)..(772): n is a, c, g, or t
  misc_feature (774)..(774): n is a, c, g, or t
  misc_feature (776)..(778): n is a, c, g, or t
  misc_feature (780)..(782): n is a, c, g, or t
  misc_feature (784)..(796): n is a, c, g, or t
  misc_feature (799)..(800): n is a, c, g, or t
  misc_feature (803)..(803): n is a, c, g, or t
  misc_feature (805)..(806): n is a, c, g, or t
  misc_feature (811)..(815): n is a, c, g, or t
  misc_feature (817)..(818): n is a, c, g, or t
  misc_feature (820)..(824): n is a, c, g, or t
  misc_feature (826)..(827): n is a, c, g, or t
  misc_feature (829)..(830): n is a, c, g, or t
  misc_feature (832)..(837): n is a, c, g, or t
  misc_feature (840)..(840): n is a, c, g, or t
  misc_feature (845)..(847): n is a, c, g, or t
  misc_feature (850)..(850): n is a, c, g, or t
  misc_feature (852)..(854): n is a, c, g, or t
  misc_feature (858)..(859): n is a, c, g, or t
  misc_feature (862)..(864): n is a, c, g, or t
  misc_feature (866)..(875): n is a, c, g, or t
  misc_feature (877)..(883): n is a, c, g, or t
  misc_feature (885)..(893): n is a, c, g, or t
  misc_feature (895)..(895): n is a, c, g, or t
  misc_feature (897)..(897): n is a, c, g, or t
  misc_feature (901)..(908): n is a, c, g, or t
  misc_feature (910)..(912): n is a, c, g, or t
  misc_feature (915)..(946): n is a, c, g, or t
  misc_feature (949)..(953): n is a, c, g, or t
  misc_feature (955)..(959): n is a, c, g, or t
  misc_feature (962)..(962): n is a, c, g, or t
  misc_feature (964)..(964): n is a, c, g, or t
  misc_feature (967)..(967): n is a, c, g, or t
  misc_feature (969)..(969): n is a, c, g, or t
  misc_feature (971)..(987): n is a, c, g, or t
  misc_feature (989)..(994): n is a, c, g, or t
  misc_feature (996)..(1012): n is a, c, g, or t
  misc_feature (1014)..(1017): n is a, c, g, or t
  misc_feature (1022)..(1032): n is a, c, g, or t
  misc_feature (1034)..(1039): n is a, c, g, or t
  misc_feature (1041)..(1050): n is a, c, g, or t
  misc_feature (1053)..(1056): n is a, c, g, or t
  misc_feature (1058)..(1062): n is a, c, g, or t
  misc_feature (1064)..(1090): n is a, c, g, or t
  misc_feature (1092)..(1101): n is a, c, g, or t
  misc_feature (1103)..(1132): n is a, c, g, or t
  misc_feature (1134)..(1144): n is a, c, g, or t
  misc_feature (1147)..(1148): n is a, c, g, or t
  misc_feature (1150)..(1155): n is a, c, g, or t
  misc_feature (1157)..(1161): n is a, c, g, or t
  misc_feature (1163)..(1164): n is a, c, g, or t
  misc_feature (1166)..(1168): n is a, c, g, or t
  misc_feature (1170)..(1171): n is a, c, g, or t
  misc_feature (1173)..(1178): n is a, c, g, or t
  misc_feature (1180)..(1180): n is a, c, g, or t
  misc_feature (1183)..(1187): n is a, c, g, or t
  misc_feature (1189)..(1196): n is a, c, g, or t
  misc_feature (1200)..(1200): n is a, c, g, or t
  misc_feature (1202)..(1202): n is a, c, g, or t
  misc_feature (1204)..(1204): n is a, c, g, or t
  misc_feature (1207)..(1212): n is a, c, g, or t
  misc_feature (1214)..(1218): n is a, c, g, or t
  misc_feature (1222)..(1227): n is a, c, g, or t
  misc_feature (1230)..(1247): n is a, c, g, or t
  misc_feature (1249)..(1249): n is a, c, g, or t
  misc_feature (1254)..(1255): n is a, c, g, or t
  misc_feature (1257)..(1260): n is a, c, g, or t
  misc_feature (1262)..(1263): n is a, c, g, or t
  misc_feature (1266)..(1277): n is a, c, g, or t
  misc_feature (1279)..(1286): n is a, c, g, or t
  misc_feature (1288)..(1308): n is a, c, g, or t
  misc_feature (1311)..(1311): n is a, c, g, or t
  misc_feature (1316)..(1316): n is a, c, g, or t
  misc_feature (1512)..(1512): n is a, c, g, or t
  misc_feature (1960)..(1960): n is a, c, g, or t
  misc_feature (1965)..(1965): n is a, c, g, or t
  misc_feature (1969)..(1969): n is a, c, g, or t
  misc_feature (1978)..(1978): n is a, c, g, or t
  misc_feature (1982)..(1982): n is a, c, g, or t
  misc_feature (1986)..(1986): n is a, c, g, or t
  misc_feature (1990)..(1991): n is a, c, g, or t
  misc_feature (2006)..(2006): n is a, c, g, or t
  misc_feature (2011)..(2011): n is a, c, g, or t
  misc_feature (2052)..(2052): n is a, c, g, or t
  misc_feature (2133)..(2133): n is a, c, g, or t
  misc_feature (2135)..(2136): n is a, c, g, or t
  misc_feature (2207)..(2207): n is a, c, g, or t
  misc_feature (2251)..(2251): n is a, c, g, or t
  misc_feature (2379)..(2381): n is a, c, g, or t
  misc_feature (2386)..(2391): n is a, c, g, or t
  misc_feature (2393)..(2393): n is a, c, g, or t
  misc_feature (2395)..(2397): n is a, c, g, or t
  misc_feature (2399)..(2401): n is a, c, g, or t
  misc_feature (2403)..(2403): n is a, c, g, or t
  misc_feature (2405)..(2410): n is a, c, g, or t
  misc_feature (2413)..(2415): n is a, c, g, or t
  misc_feature (2418)..(2424): n is a, c, g, or t
  misc_feature (2427)..(2427): n is a, c, g, or t
  misc_feature (2429)..(2429): n is a, c, g, or t
  misc_feature (2431)..(2431): n is a, c, g, or t
  misc_feature (2437)..(2442): n is a, c, g, or t
  misc_feature (2444)..(2448): n is a, c, g, or t
  misc_feature (2450)..(2450): n is a, c, g, or t
  misc_feature (2452)..(2455): n is a, c, g, or t
  misc_feature (2458)..(2459): n is a, c, g, or t
  misc_feature (2461)..(2461): n is a, c, g, or t
  misc_feature (2464)..(2464): n is a, c, g, or t
  misc_feature (2466)..(2466): n is a, c, g, or t
  misc_feature (2468)..(2468): n is a, c, g, or t
  misc_feature (2470)..(2473): n is a, c, g, or t
  misc_feature (2475)..(2475): n is a, c, g, or t
  misc_feature (2477)..(2477): n is a, c, g, or t
  misc_feature (2480)..(2482): n is a, c, g, or t
  misc_feature (2484)..(2485): n is a, c, g, or t
  misc_feature (2487)..(2489): n is a, c, g, or t
  misc_feature (2491)..(2493): n is a, c, g, or t
  misc_feature (2495)..(2497): n is a, c, g, or t
  misc_feature (2499)..(2502): n is a, c, g, or t
  misc_feature (2504)..(2505): n is a, c, g, or t
  misc_feature (2507)..(2507): n is a, c, g, or t
  misc_feature (2509)..(2509): n is a, c, g, or t
  misc_feature (2512)..(2517): n is a, c, g, or t
  misc_feature (2519)..(2522): n is a, c, g, or t
  misc_feature (2525)..(2525): n is a, c, g, or t
  misc_feature (2529)..(2530): n is a, c, g, or t
  misc_feature (2532)..(2533): n is a, c, g, or t
  misc_feature (2535)..(2536): n is a, c, g, or t
  misc_feature (2538)..(2539): n is a, c, g, or t
  misc_feature (2541)..(2550): n is a, c, g, or t
  misc_feature (2552)..(2552): n is a, c, g, or t
  misc_feature (2554)..(2555): n is a, c, g, or t
  misc_feature (2557)..(2563): n is a, c, g, or t
  misc_feature (2565)..(2573): n is a, c, g, or t
  misc_feature (2576)..(2577): n is a, c, g, or t
  misc_feature (2579)..(2581): n is a, c, g, or t
  misc_feature (2583)..(2587): n is a, c, g, or t
  misc_feature (2590)..(2591): n is a, c, g, or t
  misc_feature (2593)..(2594): n is a, c, g, or t
  misc_feature (2596)..(2601): n is a, c, g, or t
  misc_feature (2603)..(2603): n is a, c, g, or t
  misc_feature (2605)..(2606): n is a, c, g, or t
  misc_feature (2608)..(2609): n is a, c, g, or t
  misc_feature (2611)..(2613): n is a, c, g, or t
  misc_feature (2615)..(2615): n is a, c, g, or t
  misc_feature (2617)..(2618): n is a, c, g, or t
  misc_feature (2620)..(2625): n is a, c, g, or t
  misc_feature (2628)..(2632): n is a, c, g, or t
  misc_feature (2634)..(2634): n is a, c, g, or t
  misc_feature (2636)..(2636): n is a, c, g, or t
  misc_feature (2638)..(2638): n is a, c, g, or t
  misc_feature (2640)..(2640): n is a, c, g, or t
  misc_feature (2642)..(2643): n is a, c, g, or t
  misc_feature (2645)..(2645): n is a, c, g, or t
  misc_feature (2647)..(2649): n is a, c, g, or t
  misc_feature (2651)..(2656): n is a, c, g, or t
  misc_feature (2660)..(2662): n is a, c, g, or t
  misc_feature (2664)..(2668): n is a, c, g, or t
  misc_feature (2671)..(2677): n is a, c, g, or t
  misc_feature (2679)..(2685): n is a, c, g, or t
  misc_feature (2688)..(2692): n is a, c, g, or t
  misc_feature (2694)..(2701): n is a, c, g, or t
  misc_feature (2703)..(2704): n is a, c, g, or t
  misc_feature (2706)..(2709): n is a, c, g, or t
  misc_feature (2712)..(2734): n is a, c, g, or t
  misc_feature (2736)..(2736): n is a, c, g, or t
  misc_feature (2738)..(2739): n is a, c, g, or t
  misc_feature (2742)..(2742): n is a, c, g, or t
  misc_feature (2746)..(2747): n is a, c, g, or t
  misc_feature (2749)..(2750): n is a, c, g, or t
  misc_feature (2752)..(2754): n is a, c, g, or t
  misc_feature (2756)..(2765): n is a, c, g, or t
  misc_feature (2768)..(2768): n is a, c, g, or t
  misc_feature (2770)..(2775): n is a, c, g, or t
  misc_feature (2777)..(2779): n is a, c, g, or t
  misc_feature (2782)..(2782): n is a, c, g, or t
  misc_feature (2784)..(2790): n is a, c, g, or t
  misc_feature (2793)..(2800): n is a, c, g, or t
  misc_feature (2802)..(2804): n is a, c, g, or t
  misc_feature (2806)..(2809): n is a, c, g, or t
  misc_feature (2811)..(2825): n is a, c, g, or t
  misc_feature (2827)..(2827): n is a, c, g, or t
  misc_feature (2830)..(2834): n is a, c, g, or t
  misc_feature (2837)..(2839): n is a, c, g, or t
  misc_feature (2841)..(2841): n is a, c, g, or t
  misc_feature (2843)..(2845): n is a, c, g, or t
  misc_feature (2847)..(2849): n is a, c, g, or t
  misc_feature (2853)..(2854): n is a, c, g, or t
  misc_feature (2856)..(2856): n is a, c, g, or t
  misc_feature (2858)..(2858): n is a, c, g, or t
  misc_feature (2860)..(2862): n is a, c, g, or t
  misc_feature (2864)..(2868): n is a, c, g, or t
  misc_feature (2870)..(2870): n is a, c, g, or t
  misc_feature (2873)..(2874): n is a, c, g, or t
  misc_feature (2876)..(2878): n is a, c, g, or t
  misc_feature (2880)..(2880): n is a, c, g, or t
  misc_feature (2883)..(2885): n is a, c, g, or t
  misc_feature (2887)..(2887): n is a, c, g, or t
  misc_feature (2889)..(2890): n is a, c, g, or t
  misc_feature (2892)..(2892): n is a, c, g, or t
  misc_feature (2894)..(2900): n is a, c, g, or t
  misc_feature (2902)..(2905): n is a, c, g, or t
  misc_feature (2907)..(2907): n is a, c, g, or t
  misc_feature (2909)..(2911): n is a, c, g, or t
  misc_feature (2913)..(2913): n is a, c, g, or t
  misc_feature (2915)..(2917): n is a, c, g, or t
  misc_feature (2920)..(2931): n is a, c, g, or t
  misc_feature (2933)..(2939): n is a, c, g, or t
  misc_feature (2941)..(2942): n is a, c, g, or t
  misc_feature (2944)..(2949): n is a, c, g, or t
  misc_feature (2952)..(2954): n is a, c, g, or t
  misc_feature (2957)..(2957): n is a, c, g, or t
  misc_feature (2960)..(2967): n is a, c, g, or t
  misc_feature (2969)..(2970): n is a, c, g, or t
  misc_feature (2973)..(2979): n is a, c, g, or t
  misc_feature (2981)..(2983): n is a, c, g, or t
  misc_feature (2985)..(2989): n is a, c, g, or t
  misc_feature (2991)..(2993): n is a, c, g, or t
  misc_feature (2995)..(2995): n is a, c, g, or t
  misc_feature (2997)..(3001): n is a, c, g, or t
  misc_feature (3004)..(3004): n is a, c, g, or t
  misc_feature (3008)..(3009): n is a, c, g, or t
  misc_feature (3011)..(3017): n is a, c, g, or t
  misc_feature (3019)..(3023): n is a, c, g, or t
  misc_feature (3025)..(3028): n is a, c, g, or t
  misc_feature (3030)..(3030): n is a, c, g, or t
  misc_feature (3032)..(3035): n is a, c, g, or t
  misc_feature (3039)..(3042): n is a, c, g, or t
  misc_feature (3045)..(3045): n is a, c, g, or t
  misc_feature (3048)..(3048): n is a, c, g, or t
  misc_feature (3050)..(3050): n is a, c, g, or t
  misc_feature (3053)..(3054): n is a, c, g, or t
  misc_feature (3058)..(3059): n is a, c, g, or t
  misc_feature (3061)..(3062): n is a, c, g, or t
  misc_feature (3069)..(3071): n is a, c, g, or t
  misc_feature (3074)..(3075): n is a, c, g, or t
  misc_feature (3079)..(3079): n is a, c, g, or t
  misc_feature (3081)..(3081): n is a, c, g, or t
  misc_feature (3089)..(3089): n is a, c, g, or t
  misc_feature (3092)..(3096): n is a, c, g, or t
  misc_feature (3099)..(3099): n is a, c, g, or t
  misc_feature (3109)..(3111): n is a, c, g, or t
  misc_feature (3114)..(3115): n is a, c, g, or t
  misc_feature (3120)..(3120): n is a, c, g, or t
  misc_feature (3122)..(3122): n is a, c, g, or t
  misc_feature (3129)..(3131): n is a, c, g, or t
  misc_feature (3134)..(3134): n is a, c, g, or t
  misc_feature (3136)..(3138): n is a, c, g, or t
  misc_feature (3143)..(3143): n is a, c, g, or t
  misc_feature (3147)..(3147): n is a, c, g, or t
  misc_feature (3155)..(3155): n is a, c, g, or t
  misc_feature (3157)..(3157): n is a, c, g, or t
  misc_feature (3160)..(3160): n is a, c, g, or t
  misc_feature (3163)..(3166): n is a, c, g, or t
  misc_feature (3168)..(3171): n is a, c, g, or t
  misc_feature (3173)..(3179): n is a, c, g, or t
  misc_feature (3181)..(3181): n is a, c, g, or t
  misc_feature (3184)..(3193): n is a, c, g, or t
  misc_feature (3195)..(3198): n is a, c, g, or t
  misc_feature (3200)..(3203): n is a, c, g, or t
  misc_feature (3210)..(3215): n is a, c, g, or t
  misc_feature (3217)..(3218): n is a, c, g, or t
  misc_feature (3223)..(3238): n is a, c, g, or t
  misc_feature (3241)..(3241): n is a, c, g, or t
  misc_feature (3245)..(3245): n is a, c, g, or t
  misc_feature (3251)..(3252): n is a, c, g, or t
  misc_feature (3255)..(3287): n is a, c, g, or t
  misc_feature (3289)..(3298): n is a, c, g, or t
  misc_feature (3300)..(3309): n is a, c, g, or t
  misc_feature (3311)..(3312): n is a, c, g, or t
  misc_feature (3314)..(3324): n is a, c, g, or t
  misc_feature (3326)..(3326): n is a, c, g, or t
  misc_feature (3328)..(3352): n is a, c, g, or t
  misc_feature (3354)..(3354): n is a, c, g, or t
  misc_feature (3356)..(3357): n is a, c, g, or t
  misc_feature (3359)..(3383): n is a, c, g, or t
  misc_feature (3385)..(3385): n is a, c, g, or t
  misc_feature (3387)..(3439): n is a, c, g, or t
  misc_feature (3441)..(3460): n is a, c, g, or t
  misc_feature (3462)..(3495): n is a, c, g, or t
  misc_feature (3497)..(3497): n is a, c, g, or t
  misc_feature (3499)..(3500): n is a, c, g, or t
  misc_feature (3502)..(3504): n is a, c, g, or t
  misc_feature (3506)..(3512): n is a, c, g, or t
  misc_feature (3514)..(3536): n is a, c, g, or t
  misc_feature (3538)..(3556): n is a, c, g, or t
  misc_feature (3558)..(3559): n is a, c, g, or t
  misc_feature (3561)..(3582): n is a, c, g, or t
  misc_feature (3584)..(3588): n is a, c, g, or t
  misc_feature (3590)..(3613): n is a, c, g, or t
  misc_feature (3615)..(3634): n is a, c, g, or t
  misc_feature (3636)..(3639): n is a, c, g, or t
  misc_feature (3641)..(3645): n is a, c, g, or t
  misc_feature (3647)..(3649): n is a, c, g, or t
  misc_feature (3651)..(3655): n is a, c, g, or t
  misc_feature (3658)..(3659): n is a, c, g, or t
  misc_feature (3661)..(3692): n is a, c, g, or t
  misc_feature (3694)..(3701): n is a, c, g, or t
  misc_feature (3703)..(3747): n is a, c, g, or t
  misc_feature (3749)..(3749): n is a, c, g, or t
  misc_feature (3751)..(3755): n is a, c, g, or t
  misc_feature (3757)..(3772): n is a, c, g, or t
  misc_feature (3774)..(3798): n is a, c, g, or t
  misc_feature (3800)..(3804): n is a, c, g, or t
  misc_feature (3806)..(3823): n is a, c, g, or t
  misc_feature (3829)..(3829): n is a, c, g, or t
  misc_feature (3831)..(3838): n is a, c, g, or t
  misc_feature (3840)..(3841): n is a, c, g, or t
  misc_feature (3844)..(3862): n is a, c, g, or t
  misc_feature (3864)..(3878): n is a, c, g, or t
  misc_feature (3880)..(3880): n is a, c, g, or t
  misc_feature (3882)..(3905): n is a, c, g, or t
  misc_feature (3907)..(3932): n is a, c, g, or t
  misc_feature (3934)..(3946): n is a, c, g, or t
  misc_feature (3948)..(3956): n is a, c, g, or t
  misc_feature (3958)..(3963): n is a, c, g, or t
  misc_feature (3968)..(3968): n is a, c, g, or t
  misc_feature (3972)..(3975): n is a, c, g, or t
  misc_feature (3977)..(3978): n is a, c, g, or t
  misc_feature (3980)..(3981): n is a, c, g, or t
  misc_feature (3983)..(3985): n is a, c, g, or t
  misc_feature (3988)..(4000): n is a, c, g, or t
nnnnnnnnnnnnnnnnnnnnnnnnnnnnnnnnnnnnnnnnnnnnnnnnnnnnnnnnnnnnnnnnnnnnnnnnnnnnnnnnnnnnnnnnnnnnnnnnnnnnnnnnnnnnnnnnnnnnnnnnnnnnnnnnnnnnnnnnnnnnnnnnnnnnnnnnnnnnnnnnnnnnnnnnnnnnnnnnnnnnnnnnnnnnnnnnnnnnnnnnnnnnnnnnnnnnnnnnnnnnnnnnnnnnnnnnnnnnnnnnnnnnnnnnnnnnnnnnnnnnnnnnnnnnnnnnnnnnnnnnnnnnnnnnnnnnnnnnnnnnnnnnnnnnnnnnnnnnnnnnnnnnnnnnnnnnnnnnnnnnnnnnnnnnnnnnnnnnnnnnnnnnnnnnnnnnnnnnnnnnnnnnnnnnnnnnnnnnnnnnnnncgcgtcgtgtcccatgctggccacctgcaggtaccgcagatcccgcctagctcagttggtagagcgcaagactcttaatcttgtngtcntnngntcnnnncncnnngnnngagnngnangcnantgnnncgnnnnngnnannnncnntngnnnnnnnnnnnnnnntngnnnnnnnnnnnnnnnnnnnnnnnnnnnnnnnnnnnnnnnnnnnnnnnntnnnnnnntnttnnnannnnnntnnnnnnnnntnnntnnanntnnnnnnntnntnnnnnnnnnnnnnnnnnnnnnnnnnnnncnnnnnnnnnngnngnncnnnnnnnncnnnnncnnnnanncnnnnnnnnnnnnnnnnnnngcnnnnnnnnnanannnannnannnnnnnnnnnnnatnnaanannaattnnnnntnnannnnnannannannnnnntanaaatnnnttntnnntttnnttnnntnnnnnnnnnntnnnnnnntnnnnnnnnncncntctnnnnnnnntnnnggnnnnnnnnnnnnnnnnnnnnnnnnnnnnnnnnttnnnnntnnnnnttntnttntntnnnnnnnnnnnnnnnnncnnnnnntnnnnnnnnnnnnnnnnntnnnnttttnnnnnnnnnnngnnnnnntnnnnnnnnnnttnnnntnnnnnannnnnnnnnnnnnnnnnnnnnnnnnnncnnnnnnnnnngnnnnnnnnnnnnnnnnnnnnnnnnnnnnnncnnnnnnnnnnntgnncnnnnnncnnnnncnncnnngnntnnnnnncnggnnnnngnnnnnnnncggngngnagnnnnnntnnnnnacannnnnnaannnnnnnnnnnnnnnnnncncaaanncnnnncnnacnnnnnnnnnnnngnnnnnnnngnnnnnnnnnnnnnnnnnnnnncanacgantagtagctacctggttgatcctgccagtagtcatatgcttgtcttaaagattaagccatgcatgtctaagtataagcatttataccgcgagactgcgaacggctcattaaaacagttatggtttatttgatggttcctttgctacttggataaccgtagtaattctagagctaatacatgcacgaaggggcgactnacgaagccctgtatttattagattaaagccaaccacctccgggtgttcgtggtgaatcatagtaacttctcggatcgccggctctacgccagcgacgtgtcattcaaatttctgccctatcagctttagatggtaggatatgggcctaccatggcggtgacgggtaacggagaattagggttcgattccggagagggagcctgagaaacggctaccacttctaaggaaggcagcaggcgcgcaaattacccaatcctgactcagggaggtagtgacaagaaataacaataaaccggcttatgccggtttaattggaatgagtacaatttaaacatcttaacgaggaacaattggagggcaagtctggtgccagcagccgcggtaattccagctccaatagcgtatactaaagttgttgcagttaaaaagctcgtagttggatttctgnggggncggngcggccggncgcnactngcgnntcgagctagcgcttnccctncatcctgccgcgaaccgtgctaccattagtttggtggcgcnggggatcggctcgtttactttgagaaaaatagagtgttcaaagcaggccacacgccttgaataagttagcatggaataatnannaaggacttcggttctattttgttggtgttcgggactgaagtaatgattgatagggacagttggggcggtcngtattccaaagcgagaggtgaaattcttagaccttcggaagacnaacagctgcgaaagcgttccgcaaggatgttccctttgatcaagaacgaaagttgggggatcgaagacgatcagataccgtcgtagtctcaactataaactataccagctagggatcggccaacgttnnnttatnnnnnntngnnngnnncntnnnnnnaannnaannnnnnnggntncngggggnnnnnngnnnnnangnnnnaanntnaangnantnnnngnanggnnncnncnnncnnngnnncnnnngnntnanttnnnnnnannnnggnaaanntnncnngnncnnnnnnnnnnangnntnnnnnnntnnnnnnnnnttnntnnntnnnnnggnngnngnnnnnngncnntnntnnntngnngnnnnnnttnnnnngntnantncnntnannnannnnnncccnnncnnnnnaannnnnnngnnnnnnnttnnnnngnnnnnnnntnntnnnnggnnnnnnnnnnnnnnnnnnnnnnngnannttngggnnannannngnnnnnnnnnnccntnnnnnntnnnggncnnnnnnnggnnnnnnnngnnncnnnnannnnnnnnnnnnnnngnccnnnnnggnnntngnnnannntttnnancngnnncnnnnntnggnntnnncnttnnnantnntngnnnnnnnannnngnannncntnnnaannnnnnnnnnnnannnnnnntnnannnnnnccnnnccnttnnnnnnnncnnccnnnnnnncnnncnnnnnannntncnnnnnaantttnngnnnnnnncnnnnnannnngncnnnncctnnnnaanggnangcnnaaanncnnttaaatnnnaanntttngnggaagganaannnnnaanaaggtttccnnnggnnaaccngnggaaggnnnaanannnttcanaacncaaaaaananaanccnnnnannnntnnnnnnngnggnnnnnnnnnncnnnncnnnnttttttnnnnnncnnccacnnnnnnnnnnnnnnnnaanaaanaaaaannaannnnnnnnnnnnnnnnnnnnnnnnnnnnnnnnncnnnnnnnnnnannnnnnnnnnanncnnnnnnnnnnntntnnnnnnnnnnnnnnnnnnnnnnnnnananntnnnnnnnnnnnnnnnnnnnnnnnnncncnnnnnnnnnnnnnnnnnnnnnnnnnnnnnnnnnnnnnnnnnnnnnnnnnnnnnannnnnnnnnnnnnnnnnnnngnnnnnnnnnnnnnnnnnnnnnnnnnnnnnnnnnncncnncnnncnnnnnnncnnnnnnnnnnnnnnnnnnnnnnncnnnnnnnnnnnnnnnnnnngnngnnnnnnnnnnnnnnnnnnnnnncnnnnnannnnnnnnnnnnnnnnnnnnnnnncnnnnnnnnnnnnnnnnnnnnannnnannnnnannnannnnnaannannnnnnnnnnnnnnnnnnnnnnnnnnnnnnnngnnnnnnnngnnnnnnnnnnnnnnnnnnnnnnnnnnnnnnnnnnnnnnnnnnnnntntnnnnngnnnnnnnnnnnnnnnngnnnnnnnnnnnnnnnnnnnnnnnnngnnnnngnnnnnnnnnnnnnnnnnncccccncnnnnnnnncnnccnnnnnnnnnnnnnnnnnnngnnnnnnnnnnnnnnngngnnnnnnnnnnnnnnnnnnnnnnnntnnnnnnnnnnnnnnnnnnnnnnnnnngnnnnnnnnnnnnnannnnnnnnnannnnnnaaaanaaannnnannannannngannnnnnnnnnnnn

SEQ ID NO: 252 - DNA, 4000 bp, Escherichia coli
  misc_feature (1957)..(1958): n is a, c, g, or t
  misc_feature (1963)..(1963): n is a, c, g, or t
  misc_feature (1970)..(1970): n is a, c, g, or t
  misc_feature (1979)..(1979): n is a, c, g, or t
  misc_feature (1981)..(1982): n is a, c, g, or t
  misc_feature (1984)..(1985): n is a, c, g, or t
  misc_feature (1987)..(1987): n is a, c, g, or t
  misc_feature (1993)..(1994): n is a, c, g, or t
  misc_feature (2020)..(2020): n is a, c, g, or t
  misc_feature (2023)..(2024): n is a, c, g, or t
ggggcgaggggccaggcgctatccccatccttttttaaaagcccctgtcattccgagcccgaagggcgaggaaacccgcagtgaagaagttgcatgcagcgtctctacgccatcgcccgggtcagcgccggcatcataaggcgctaccgataggatggcttgaagcccaatgtcgtcaacttaagggttttcatggcctcggagaggcccaaagttggtagaaaaaccaggcgtaattcaatagggcctcggagaggcccaacgtttgttcggtattcacaccagcgatttaacgtttggcctctccgaggccccataaatacatgcaacatattcttcaaacgttgggcctctccgaggcctttgcgcttaagttgacgacattgggcttgaagccatcctatcggttaacgtcgtttttcaaaattttaattggaggaatgccggtgttttcgacttatgatacaccctccacaatacacgcaccaattatttcgtcctacgagtatattcgtaggacgaattatgtcccaaaaaaaaccgccctcgccttcagtccaggcctaccagcgctgacggtttatccccgggacaaacgcccgggttttttgtcccgaccactaagcgccgggagcggggcaatcgcctgttcagtgcatgccatccagccttccattgagctggggggaacgagcgacgcggaaaccattgttgttgttgcggttctccggcgtgttgttgttgcggttcgccacgcggcggcagttgtcggcgttgttgagccacgagccgccgcagagcacgcggagcgagcctttgcaggttgcccgttttagaaggagatggcaaatttgatgccgggtatttttttcggtataatcaaaaaaaccctatatttgtaaaaaaaagcatcgtacagatggtacaaaccgatcaacccatgagcaagttgcagcttgaactgctcaaattatatgcaactcacatttcagaccaacagttggaaatggttaaaaagttattggcggatttttttgctgaaatgatagacgccgaaatgaaggaagtatgggaaactcaaggttgggatgagcaaacgattgagcaatggaaaacagaacgaatgcgcataccatacaaagttaaatgatgcgcattgttttggacatcaacgtcttgctggtttcgattcctgtggattcaaggtatcgtttaatatttgatgccttaaaaaaaggtcggtaccagctgctgctctcaaacgaaatattagaagagtacgaggaaaaaattgcagaaaaaacaacaagacctgatattgcagccaatgtaatccgactattgctaaacctgtcaaatgttgagcaaatatcaagaatttattataaatggaacttgattacaaacgacccggatgacaataaatatacggactgcgctgtggcaggtaatgcaacaatgatcgttacgaacgacaaggattttaacatcctgaatacaatagaatttcccaaaataaaggtcatgagtggagattcttttttggaattattgaggattgaatcacctgcctcctaaggcccataaacgtataccaagtgagcaaagcccaataactgttcgccgacgccagaaagtcctcgtcgctaagggtgccgttttgccattgccactcccggtgccgcaagcggcgggtgatgcgccgcccgttgtggtaatgcagatccgcatgcgcttttttttaagttttcaccatatatacaccatatatacaaacagtggtgacacataaacactacgtggttatatatgcagcatatatgctgccgcatttggctccgcccgaaaaaaaacagggtgtgccagttgcctgacacaccccgctgaaatgtcctaaaaggtaaaaaggtaaaaagcctaaaaggttaaaaagtcctggcaaggcggaagccaacgnngttgnagcggtngtccggcgngnngnngntgcggnncgctacacggcagtaggtcgggtcgntgnnccacgacccgccgcgaatcacccggtaggagccggaagtggggccggtggggttggtctggctgccggtggggtaatcgccgtaccagtccgcacaccactcccacacattcccgctcatgtcgtacagccccaattgatttggttttttgccgcctacacgccgcgtacccgtatcgttcgtattctccgtgtaccaccccactgcatccagatcattgctgccggcgtacgtaaaattatctttcgcccctttttccccgccgcgggccgcgtactcccactctgcctccgtcggaaggcggtaggtttggccggtttttcggcttagccactggcagtaggctaccgcgtcgttccacgatacgcccgtgaccgggtggtttttgttctccctgctcacgcctctttttttgtagaaatcgttattacccgtctcgatatgataatcatttcccggctccaaccattccgggtagttgcctttggtttcctcgcagaaagccaggtattccccgatggtcacctcgtatttccccatgtaaaaattgctcagggtgacctggtgtacgggtttttcgtcactgctgccgtcttcactgcccatttggaaggtaccgccgggaatggagatcatgttccgctgtatggcggcgatgaccgcctgtacatccaccggcacgggtacctcaaccgggcatccatcggccgtaccgggtgcgggtttattggggcatttatcgttgcagtcgggtatgccgtccccgtcggtgtcggtgtcgggggttccgcatccgcaggcgccgggttgggttttgttggggtcgtcggggcagccgtcggcgtcgtcgggggtaccgtcggcgtcgcggtcgggtttgggcgccgggtctgtggtcgccggtgccgggtcagtcaccgtcaccggtggcgtccattcaaaggcaaacggcagggtgcgttcggcgagcagggtcttccggtcggcgtcggtgtacaggcgcaggcgcagggagtcggcgcgggcgggtttgccaggttcggtgagcaggaggatcagtgcatcctggtactggcccggggtggtattgggcagggtgatctgcgcgaaggagatgttttttccggccccgtcggtggcggtggcggttacgtggggcttcgtgttcaggcgttggccgatctggtaggtagcggtgatgcgcacggcgccgtcggtggtatttggcggctgcacatccaccgcgatcacgcggttttgggttatgcccagcagggtttcgaggttggggcgctgggtgagggattcgaagtaggccatgctttgcagcaggcggtacaggcgttcggcgtcggtgcggttgccggcgtagtagtcgcacaggccgcggccgtgcagggcgtcgagctggagggcggtggggccggtatcggcggggttcctcggctggagtaccagcaccccgtcggcttccaggatcagggcgccggcgtcggtcagtgcggacacaaaagcgcgtcgggcatcgtcgagcgcgtcggcgcgcagccggtcggcgccgtagttataccgcaccctggcgaggttttcctgcgccagggcgtatgggctgcgcagttgcagggcgcgctggaaaagggcggtgtcggcgccatgggccacgccgaggttgttgtatatcagggcgctgtcgggcgtccagcgttcgctgaagagcaggccggcgcgcagggtatcgcggccgggggtgaagtcgtttgtgcgtttcgggaaagccggcgccgggctttgggggcggcaggccatccagccggtagcgccgagcaaggctaagagggcggtcagggcggcggccttccaaaagtcgggggtaaaaaacggctttgcgggcttttccggttcggcgggtactggttcgcggtacttcagccactcgcgtatgttgggtacacgcgcgggcgccgtgccggcagcgg

SEQ ID NO: 253 - DNA, 4000 bp, Escherichia coli
  misc_feature (35)..(35): n is a, c, g, or t
gttcacacccatcacgaagtcgaaatgcatggggncggcgatatagcccttcttgtgcaggcggagcgccatttcgatcatactcttgtcgaagacctccagctcgggtttgatgccccgctcgatcatcttctggccgaagtacttgatcgtgttctccgtgttctcgaagatttcatcgccgccgaaattgagcgtgccgcagtcgagggtcgccatttcggggagcagctccgtaggttgcagccgttcgtcgttggtcatgccgacggcacctcccgtcgaaggctggatgattacgtccgggcaaaccgcacggatagcgtccataacctgtttgaagcggtttttatcctgcgtgggttggccgtcgtcgttgcgcacgtgcaggtggatgatgctcgcgccggcatcgtaggccgacttggcctcccgggcgcactcttccaccgtgtaggggactgcggggttgtgttccttgagtacttccgctccgcagatcgcggccgttatgatcagtttttccatggggtctttggttgaaaagtttgaaaatggttgaattccgttgctttgtccgatgtggcggctaaacctgttcggacctgttcgccgagaatttccggccgcatcggccgttttctctctccggcgctcctgcctgcggtcttcgcatcgcgggacgctttcgtgtccggaacgggccgaaaactccgttagcggctttcagggatgcgctggtcctctttttttacgacgcacgtaccgctggcacggcagaccacgacgggctctttgagtacgtcggccgcagagggcgagatgtcggggcgtgcagcgaccactttgcgggcttcgaagaccatcttgcgcgaggtgttgcccaccttcacgatttcgcccaccgcttcgatataatcgccggcatagaccggggcgagaaattcgacgttgtcgtaggccacgaacagtccttcgtcgccgtcgtgcatgatcaacagttcggtggccacgtcgccgaacagatgcaccatatgggcgccgtccaccagattgcctccgtaatgagcgtctttggcactcatccgaagccgtatcattgatttttccataacctgatatttttaattcgattgagatgcggatttgttctttcggccgttcggttatttggccggagcgaccatgtaatctacgaagatacccggcgtgcggaccgcttcgggggctatcgctccggtttctaccagctcccgcacctcggcgatcaccaggtcggctgcggtggccatcaacgggttgaaattctgtgacgtgcctttatagaccaggttgcccgatcggtcggccaggctcgcgccgagcagggctacgtcggcccgcagcggtttttcgagcaggtaatccttgccatcgacgttgatgatttgtttgccttcggctacgatcgttccgagtccgaccggagtgagcacaccgcccagacctgccccgcccgaacgaacccgttcggccagcgttccctgcgggcagaattcgatctccagttcgccgctgttcatctgctcgctggtgcaggggttggtgccgatgtgcgatacgatcactttgcggacctgcttcccggcgatcagccgtccgcagcctttgtccggataagccgtatcgttcacgatgagggtgaggtcctttacgcccgattcaaccagtgcgtcgatgatcgcgtgggggcttccgttgcccagaaagccgccgatcatgaccgtcattccgtcttttaccattcccgccgcttcggcagcagatataagcttcttcatatggtgattgattttacttaaaattaacaatatcagtctttaatctaacaaaattaaacatttgacgaatgatttgcaatgatttcgacgtttttttgtcgattttgtcgataatcggtcacttcttctccgaaagagtggaatcttcggatccgatcgcgcggaagcgggtgttcggaaggacctgagaaagtacggccggacgcctcgaggcgtccggccgtactttctgcggaacggttctttgcgggatcagagaagccggcagtgcaaacgttcgggcagcggtgcgctgttgttgcggcgccagaccatagcccgatcctgttcctgattgcccgagccgaagtcgaagtcgtccggcgcttcgaaaacgaccggaagcgaccggtcttcgaagccgaacggggcgtaaaagtccttgaggctttcctggcttgggataaggatcgcggcgtcggccccttcttctgcgatccgccgcatcgcctcgcgcatcaatccggaggccaggccccggccccggtagtcggggtcggtcgccacgccgtagatgtaggtcgtgcgccccagctcgctttcgaacgggatcaggtgcagcatggccgccagacggccgtcctcttcggctgcgagcatccgcttgcggctgtaatggccgatcaggaaggagtcgatgaaggtttcttcgtctccgaagcactttatccagagccgtttgcaggctatttcgtcggggtagaggcagagggccgtatatttcttctcgaggaatgccggatggtaggagagcttggcctgccgtagtcccggaatacccaggtcctcttcgcggtcgatgagcgtgtattgctcgggcaggtgcgccacgaactcccggttgatgatggtgaaagccccgtcgtattcggtgtcggccttttcgacatgaacacagaacgtatggtcgttgatcggtgagccgtaagtgaaagcgacgagtttatcaccgacgtagatgcagccaccgataagtcccagccggtcgaaatgggcgaaagcccgctgcatggcccgctgttcggccgacagctcgcccgtatgtccgctgcgggtcttgcgccattcggcttccagacgcatgcactccgcagcatggtcgcgggtcataggctcgtagcggtattcgtattccgcctcgaagcggttgatgtggttgcgtttggattggtatttccggccaggaaggtcgcgcaggtccgaagcgttgtatacatagtcttccagattgcggtcggaggcgaaagcgaactggcagtggcctacactgcggagtttttcgagcccttcaggtgtcatgtcgatgatccgaagccgttgtccggcagcgagtatatcctcctccagatgccgcaggacgggggtgaaatctcctgcgccgacaggctgcatgtagccgatccggtcgctgcccccgatctggaagcggatgaccagaaagccgtccactacgctccaggcggttttgaactggaattgccagcaaaacatgttggcgaacgccaggtcgcagttcgccggggcgtaaggcaatgtgaaggattcgatttcggccttgtcttcgatcgtaatgggtttgaaggtaatcataaattgtcttctacggtgtaatttttggcttccacatgcccgtaatactgttgaatcagggccttgagccgattttcgaccgacgcggtctgttcccggtccgaagtctcgtttcggaacgtcgcgccggtcatccattcctcgtcgaacgagaagagcgcttcgtccgttacgacccggaattccgaatcgtacatcacggcccacggttcgcggtcgggttcgttcagaatgtcgcgtccgaatgcgaaatagggttcccggtttcccaacagtcccagcagggtcggcatgatgtcgatctgctgcacggtctgtgccagaaattgcggtgcgagtgcgccgtcgggggtgtggatgaatccgacgatgtggtagttgccgggataggagcgggtttcctctgccattttctccgaggaaacgtggtccgcgacgaagacgaagattgtcctgcggaaccactcttcgtccttgaaacggcggtagaagttgcggaaggcgagatcttcgtaggctacgggtttgtgtattttggtcgttcccgccgg

SEQ ID NO: 254 - DNA, 4000 bp, Escherichia coli
  misc_feature (1962)..(1963): n is a, c, g, or t
  misc_feature (1968)..(1968): n is a, c, g, or t
  misc_feature (1980)..(1980): n is a, c, g, or t
  misc_feature (1986)..(1987): n is a, c, g, or t
  misc_feature (1998)..(1998): n is a, c, g, or t
  misc_feature (2001)..(2001): n is a, c, g, or t
  misc_feature (2013)..(2013): n is a, c, g, or t
  misc_feature (2017)..(2017): n is a, c, g, or t
  misc_feature (3734)..(3734): n is a, c, g, or t
  misc_feature (3737)..(3737): n is a, c, g, or t
  misc_feature (3747)..(3747): n is a, c, g, or t
  misc_feature (3753)..(3753): n is a, c, g, or t
  misc_feature (3758)..(3759): n is a, c, g, or t
  misc_feature (3770)..(3770): n is a, c, g, or t
  misc_feature (3776)..(3776): n is a, c, g, or t
  misc_feature (3782)..(3783): n is a, c, g, or t
  misc_feature (3792)..(3792): n is a, c, g, or t
  misc_feature (3797)..(3798): n is a, c, g, or t
  misc_feature (3804)..(3804): n is a, c, g, or t
cccgacgggcgatgtcggtgagctgactttcaaccgatgggcctcggacggctcggggcagacggctctcgtgctgccgactcaggctgatgcccagcgcgtggtaaacttcacgctcggcagcgacactttcgtctggaacatcggggaaaaagagttcgacgcaggcagtgaatacagctacaccgttacggtcaatcgcacgccgctgggtatcgcggcctcgattaccgactgggaaacgggcgagggcggctcgggggacgccgaataaccgcgccaatcgaaactggatgtaaaccatgaaaacttccggattatttttaacgttagcagcagcttcggtgctgaccgcctgcctgaaagaggaggacggcatccttgcggagcggcaggagctgcgtctcaggagcggcatcgaagccgtgacgcgcggcgaggtgcaatccacggcgatcgtcgcaggcgaaacggtctatgcgtgggtgacggacgccctgaccggcgaagcgctctacaatgcctgcacgctgaccgcacaggcgggaggcgctctcgcgggcacgacaccgatgtacttccctgcgacgggcaacggtgtgcgggttgcggccctgcacggactgctgaccgaaagccccgcggttgcggcgatgcccggttcgttcgcctttacggtctcccccgaccagagcgaagcgggcggcgcaaactatgtgcactccgatttgctctatgccgcacaaaccgtccagcgcacgaaagaggccgtagaactcgaatgttaccatctgctctcgaaaatggagctgaagatcacccggagcgacggagtgaccgatgcgatcaccgccgtgacgctcgacggcgtggtattgggcggtatgtttacccctgcggccgatgccgaccttgcgcagcggagcgtacgcgccgcgatgatcgttgccgacggacagcggggaacgatgacgctcggcgcgatgcctgcgggcgacaatccggacaatccgatcaccaacgatgcgatcgtcgtgccgcaggatgttggcggcaagaccctgactttcactctttccggcggcagcgagctgtcctatacgatccctgcgggcaggtcattcgagagcggtaaaaaacatgtgtacgaagtgacgctcaagcgcacggggctggaagtgacctccgaaagcggggattggaacgacggcggcagcgaagaggtgcagagtcgggaggtgctcgcctcttatacggccgacgacctcaaacccggcgattatttctactccgacggcacgacttccgatggcggcctgcgcaagctttatgccgacggaacgctggagatggcggtcgggaaacccgtgcccgaaacggacgggggtaaaacggtcgtcggcatcgtctttcagaccgatcccgaccggatcggacaggccgagaaagatgcgttggcggttcggggcgccaccgcgcgcgggctcgtgatggccgtaaagaacgccgcgacgaacatggaatggggaccttacggaacggatgaggggctgacgaaatgcgaaacgaaagcgcagaattacagcgacatcagcggttatggcaactgcgagcggatcagggcttcgcacggtgatctgagtaactatcccgctttcagggcggccgacgattacaacacggtctgcgcggttgccggggtgacgacgggttggtacctgcccgccagcggacagtggtgggatctgctgcaaaatctgggcggctgtgcgatgttggcagatccggcgcagcagacctcgtcggacagcggtgatttttactggtcgggacaaggtgacattcccgccgcactgaacagatggatggagtcgatcgccgctgatagtaaagacccgttcgccgactacaactggttttggtcgtcctcggagtactccggctacaacgcccggtactggnncgtgngctccgatggcnacgtgnnctgctactggnacnataaggacatcngcancgacgtgcgacctgttctagctttttagatgatctatttatctatttaatctatttatctattggatgatacccgcgcagcgggtcgaaaatattaaaccgaaccgaaatgaaacgatcgacccattcgatagcggcccttgcggcccggacggcggtgatggccctgacggccttcggcgccctgtcgctggccggatgctcgcaggaggagcaggctgtgcctgtcgggcaggggcagcggctttccatctcgatctgcgacgacggttatgccccggcggatgacgtccggcccgccttgtcgggcggctgcggaagccttgccgccgaccctgccggaagcctcgcgacccgcgcgacggagaacggttatgcgaccggatttactcccggcgatgcctgcggcctttccatcgtgcgtgacggcgaggtggtcgcagccaatgtgcggctgacggcttcggccggagccggcggcacgaacgaactcgtttggacacccgacccggccgcgggtgagctgtggtacgcctctggcgactgctatttcctctattacccgtggcaggctgcgccgcagggtgccccgaccgtgggggattcgttcgccccgtccgtccccggcgatgccggagcggagtttttcgccgcgctgatcgccgcatggacacccgccgcaaaccagagcgactatcccgcgggctacacggcttccgatctgatgacggccgaagcttcggtggggagtgcctccggcggggtcgtgccactcacgttctcgatgacccatcgcatggcgctcgccgtggtggagtttcctcggacggtttacaagttcgacaacggcgatacgatgattcccgattatgccgttgccgcatcgggcatcgcattttcgggtgcagcccaacctctcgcgacggatggcagcacctatcgctacctcgtcaatcccgccctggcagcggctccgattcttgcgggcggctacggcggcaaccgcgaattcaccatcgctcccacgggccttgaggcaggcagctacaaggtctataaggtggatggcggtagggtggagaaaaaccatacgttgcaggtaggcgattacttcctggcggacggaaacctgctgtcgaaagacgctgcggcggagatggtcgcacaggccgaggtcgcaggcatcgtcttccagaccgctccgtcgcggatcggggagggggaaaagaatgcattgggcggagaggcgcacggccttgtgttggccgcgaagaacgccgcaacgaatgtgcagtggggcccttacggaacggatatccccgatctgccgaacattacgacggtcgcagcctgttacggggacatcgacggttattccaacacccatacggtgtgggcgtttgacggttacacggccaatcccgccgattatcccgctttccgtgccgttgccgatttcaacacgacacatgccgctccgggcaatacgacaggatggttcatgccgtcggcaggtcagctctgggacgtgctggagcatctcggcggcgtgaaggcgttggccgatcaacgcacgaacggcgatcaggagtggtatggcaccgatccgggaaacgatatttgcgccagcctcaaccgatggcttgcccatgtaacggacgcggcgaaattcggcgacagctacaactggttttggtcgtcctcggagtactccggcnacnacgcccgggnctgggncgtgnnctccgatggcngcgtgngctgcnnctggaacgntaagnncgtcancggcgacgtgcgacctgttctagctttttagatgagctatttatctattcaatctatttatctattgcagggaacccgcgtaagcgggtcgattttggaaacgaggcgggagcagaggaggtttgcggccgggctctgcgcgcagaaaaaacgattgatagtttctgaaagatggctttgaccgagcaactgccga

SEQ ID NO: 255 - DNA, 4000 bp, Escherichia coli
  misc_feature (990)..(990): n is a, c, g, or t
  misc_feature (1981)..(1982): n is a, c, g, or t
  misc_feature (1985)..(1985): n is a, c, g, or t
  misc_feature (2221)..(2221): n is a, c, g, or t
cggacatccgggggcggcggcggaggcctcatccgccgggtcgtcgctccgttggccctgctgtggagcctcgggctcgtggcggccctgacgctgacaccgatggctctacctgggatcgccacccggcatctgccggcgctctcgacctcggtggggttgatggtgggcgcggtattgtatttcgttgtgatccggggtcgtcttcgtcgcggtgaagccgggcccccggaccgccgaaccgccgattccaccgagccctgagccatgagcccgagcgacccaagtattgacttccaagcctccccgaatccgctgatccggccggagccgagggtgttgcctcccgaataccctggtgcagcgaggtacgccgaggaggaggtcgacgcggtcgtccgcgtcgtgcgcaaccgttcgcccttccgctactatggaccccggcttggaggcgaggttgcccggttggaggatgagttcgcgtgttttctggccagttcgcccggcggaacatggcccgcgaattcgccttttcgggtcacggcggtcaactcgggcacgggcgcactggaggtcgccctcgacgcccttggggtcggcgccggcgacgaggtacttgttcagggttttctttggatctccagcatctcggccatcgtccgtcagcgggcgattcccgtgctagtcgactccgacgcgactttgaatctcgaccccgacgagatccgtcggcgcatcgggccgaaaacccgggtcatcatgcccgtcccgatgctgggcggatgcgcacggatcggccggcttgccgagaccgtgcgcacggtgaatgccgagagggcccggcagggattgccgccggtacggatcctcgaggattgcgcgcagtcgatgggggcgcacgcctatggaattccggggtcggttgagccgaccgcgcccgagggtatccatcgcgtcggcaccttcggcgacgtcggcatattcagcctncagattaacaagaacatcaccgccggcgagggcgggctgatcgtcacgcgcgatccggacctcgctcggcgcatcgatgccttgcacaacgccgggtacgcgcggggcaaggctccgccggtcaattggtacggggacgagccggtcggatggggtcacggccgacgtctgggggagatgcaaggagcggtggcccgcgtgcagttgcgccggttggacgaaatcctcgcggcgatgcgtcgggggcatgacagcattgaacggcatttgagatcgcttggtctaaagacccgcgcacgtgccgatgcagatgatcccggcgacacaggctactactgccagttccatctaccggatcgcggcgaggacgatgcggggcgcatcttgcgcgggcgccggatcgccgacgcactgcgcgaattcggccttcggccatggttcctgcacgacttcgaggtgcacgtctattacaacatcgagcccttggttggacgctggccactggccggaggtggtccttggccatcgggtgacgcgtcgggcgatccgcgatacgcctatgcgcgcgggacccttccgaaactcgaccgacttctgacatcgacgatcggtatccatgtgcccagcaccctttcgggcaccgaagaggcgtacatacggcaggcgctttcctgggtcatctccactgagaccgatcgctgaagcgccggtctggttgactttggggcttcgacgcggctggcgaacgggctgaacgagctggcgttgaccggcaaaaagtcttggaaagagctgccagtccggtgaccaggccgcgcaatttttctctgcgacttctgcgggcaacagtttgggtgcctggacctgcgcctgggaatgtgatctccccttaggcagtttctgcggtccggtcaaacttgtggggtcttacggaaaaatttgtgcatcagccaaacaaaaagttgcggggataagaaatcaccctagggtnncangcttcaatatgaagtttttccttctgcttcccatcctgatagggctctttggagccgttggagctttcggccaagggctcacaatcacagtcaactcaaccggaaacgacaacaacccagacgaccggctgacgctcgtcgaggcaatcttgatcgccaacgagcgtcttggacgtcccagttcggcagcagagtcgtccttggtcgttaaggggagctcgcgactgctggacgtncgcttcgccattcccggcgacggacctcacttcatcacaccgccacccgggggctttcccccgctgacgactggccttttcgatcaggttttgatcgacggattctcccaacctggagcgcgaccgaactccaacggaatcgagggcaccaacaacgccgcactcaagatcgttctcgactgtcggaagcttgccgccgatccggccacaggcgaaatgccggactggtcgtttaaaatcgccgcatcccgtgtccacttcagaggattttcagtcctggccggccgggacaccgacaactatggcgtatacttcagcgatggcgccgtcggagggcaagtcagcggttgctggtttggagtgtctccggatcagtcgatcctcgccggcggcgaggtcgcaatcgcggcgtacggaaccgagggcggtcaagtgttcgggtcggacggcaatggtgcggacgacctcgccgagatcaacatcatcgttgcgcacgccatcggcgtccaattcgaggagacaaagaatatcctcgttcagaacaacctcatcggggtgctgcctgacgggaagacattgcctcccgaggccatccgggaggccctcgaaggcgatgcggtggaaggcaacgccttggccggcaccatcactcttcggcgaaacctcatcgggggtatgcgcggggacgccatcgaattttatggtcctgcggaaagattgctgctgttggagaacaccatcggcgttgcctgggacggagtgacgccgttgccgaatggaaactttctcaaggtccaagccgtccaagccttcgtgggcttggacaaggggatggtaccgaccgccgcctcgggcaatcgtattgccaaccacaccggatatcttttccgacacaacaaagcggacacccggatcgtccatcgcggaaacgtgttgacgaaaaactcgggttcctatttcgaacaactggcgaattcactcactggtatgcggctcggacgcgcaactgacctttcgcccgtgcttgaggtaaactcgacccggcagatcctgcgggggacccttccgctgagtggccccggtcccgatgcgctaacggctgccacgattgacatctatgcctcggaagaatcgccagacccggatcgccctcctatcgggcgatggctggcatccttcaccgatggaggacctggagatctcgacccatcgacgggggcctttaccttggacctttctgcggtgcctgggttggacagtgtcacccacctagccgtcacgagcaccttggaggatgtcacgggtgcagacacatctccgttttcgaatatccttcggctccctcgcggcgccccccgcctttcactggcacgcaccggcgatggcatgacgctaacgctgaacaccacggagggtacccggtatcaacttcaatccagcctaaccctaggctcggcctggaccgatgtcggaaacgccttcatcggaacgggaagctccaaatccatccctctgcccaaggatcctacggcggcctttttccgagtgaggctttcaaactagggtgttttgaggcaatgcggtccagccccgacgaggccggtcacgaagcgaaagctcacgatgaggccgacttgtccattgcagtcgacataccgagctcagtgctagccggactttggcaaccgggctgcggttttcgctgatttgctccgatcgaccggtgtttttccccggaaaagcgactctttgaactctcggggtcaccgattttctctg

SEQ ID NO: 256 - DNA, 4000 bp, Escherichia coli
  misc_feature (1)..(22): n is a, c, g, or t
  misc_feature (24)..(65): n is a, c, g, or t
  misc_feature (67)..(282): n is a, c, g, or t
  misc_feature (284)..(564): n is a, c, g, or t
  misc_feature (566)..(646): n is a, c, g, or t
  misc_feature (648)..(662): n is a, c, g, or t
  misc_feature (664)..(697): n is a, c, g, or t
  misc_feature (699)..(750): n is a, c, g, or t
  misc_feature (752)..(752): n is a, c, g, or t
  misc_feature (754)..(757): n is a, c, g, or t
  misc_feature (761)..(769): n is a, c, g, or t
  misc_feature (773)..(785): n is a, c, g, or t
  misc_feature (789)..(802): n is a, c, g, or t
  misc_feature (805)..(806): n is a, c, g, or t
  misc_feature (808)..(810): n is a, c, g, or t
  misc_feature (812)..(834): n is a, c, g, or t
  misc_feature (836)..(847): n is a, c, g, or t
  misc_feature (849)..(850): n is a, c, g, or t
  misc_feature (852)..(852): n is a, c, g, or t
  misc_feature (854)..(854): n is a, c, g, or t
  misc_feature (856)..(857): n is a, c, g, or t
  misc_feature (859)..(859): n is a, c, g, or t
  misc_feature (862)..(867): n is a, c, g, or t
  misc_feature (869)..(869): n is a, c, g, or t
  misc_feature (872)..(873): n is a, c, g, or t
  misc_feature (875)..(877): n is a, c, g, or t
  misc_feature (879)..(881): n is a, c, g, or t
  misc_feature (884)..(890): n is a, c, g, or t
  misc_feature (892)..(901): n is a, c, g, or t
  misc_feature (905)..(915): n is a, c, g, or t
  misc_feature (918)..(919): n is a, c, g, or t
  misc_feature (921)..(921): n is a, c, g, or t
  misc_feature (924)..(925): n is a, c, g, or t
  misc_feature (928)..(948): n is a, c, g, or t
  misc_feature (950)..(967): n is a, c, g, or t
  misc_feature (971)..(971): n is a, c, g, or t
  misc_feature (973)..(975): n is a, c, g, or t
  misc_feature (978)..(978): n is a, c, g, or t
  misc_feature (980)..(983): n is a, c, g, or t
  misc_feature (1073)..(1073): n is a, c, g, or t
  misc_feature (1091)..(1091): n is a, c, g, or t
  misc_feature (1093)..(1094): n is a, c, g, or t
  misc_feature (1096)..(1096): n is a, c, g, or t
  misc_feature (1190)..(1190): n is a, c, g, or t
  misc_feature (1217)..(1218): n is a, c, g, or t
  misc_feature (1978)..(1980): n is a, c, g, or t
  misc_feature (1985)..(1988): n is a, c, g, or t
  misc_feature (1990)..(1990): n is a, c, g, or t
  misc_feature (1995)..(1995): n is a, c, g, or t
  misc_feature (1997)..(1999): n is a, c, g, or t
  misc_feature (2003)..(2004): n is a, c, g, or t
  misc_feature (2011)..(2012): n is a, c, g, or t
  misc_feature (2014)..(2016): n is a, c, g, or t
  misc_feature (2530)..(2533): n is a, c, g, or t
  misc_feature (2535)..(2537): n is a, c, g, or t
  misc_feature (2542)..(2542): n is a, c, g, or t
  misc_feature (2545)..(2548): n is a, c, g, or t
  misc_feature (2550)..(2552): n is a, c, g, or t
  misc_feature (2556)..(2556): n is a, c, g, or t
  misc_feature (2559)..(2559): n is a, c, g, or t
  misc_feature (2561)..(2561): n is a, c, g, or t
  misc_feature (2568)..(2568): n is a, c, g, or t
  misc_feature (2570)..(2570): n is a, c, g, or t
  misc_feature (2573)..(2575): n is a, c, g, or t
  misc_feature (2577)..(2577): n is a, c, g, or t
  misc_feature (2579)..(2580): n is a, c, g, or t
  misc_feature (2585)..(2585): n is a, c, g, or t
  misc_feature (2588)..(2588): n is a, c, g, or t
  misc_feature (2598)..(2598): n is a, c, g, or t
  misc_feature (2612)..(2612): n is a, c, g, or t
  misc_feature (2620)..(2624): n is a, c, g, or t
  misc_feature (2626)..(2626): n is a, c, g, or t
  misc_feature (2629)..(2629): n is a, c, g, or t
  misc_feature (2631)..(2636): n is a, c, g, or t
  misc_feature (2638)..(2640): n is a, c, g, or t
  misc_feature (2643)..(2644): n is a, c, g, or t
  misc_feature (2646)..(2646): n is a, c, g, or t
  misc_feature (2649)..(2650): n is a, c, g, or t
  misc_feature (2652)..(2652): n is a, c, g, or t
  misc_feature (2658)..(2658): n is a, c, g, or t
  misc_feature (2663)..(2664): n is a, c, g, or t
  misc_feature (2666)..(2668): n is a, c, g, or t
  misc_feature (2670)..(2671): n is a, c, g, or t
  misc_feature (2673)..(2675): n is a, c, g, or t
  misc_feature (2681)..(2682): n is a, c, g, or t
  misc_feature (2685)..(2685): n is a, c, g, or t
  misc_feature (2687)..(2687): n is a, c, g, or t
  misc_feature (2690)..(2690): n is a, c, g, or t
  misc_feature (2692)..(2693): n is a, c, g, or t
  misc_feature (2695)..(2702): n is a, c, g, or t
  misc_feature (2704)..(2705): n is a, c, g, or t
  misc_feature (2707)..(2717): n is a, c, g, or t
  misc_feature (2720)..(2744): n is a, c, g, or t
  misc_feature (2746)..(2747): n is a, c, g, or t
  misc_feature (2749)..(2755): n is a, c, g, or t
  misc_feature (2757)..(2769): n is a, c, g, or t
  misc_feature (2772)..(2778): n is a, c, g, or t
  misc_feature (2780)..(2798): n is a, c, g, or t
  misc_feature (2800)..(2818): n is a, c, g, or t
  misc_feature (2820)..(2824): n is a, c, g, or t
  misc_feature (2828)..(2836): n is a, c, g, or t
  misc_feature (2838)..(2863): n is a, c, g, or t
  misc_feature (2866)..(2873): n is a, c, g, or t
  misc_feature (2875)..(2877): n is a, c, g, or t
  misc_feature (2879)..(2896): n is a, c, g, or t
  misc_feature (2898)..(2908): n is a, c, g, or t
  misc_feature (2911)..(2920): n is a, c, g, or t
  misc_feature (2922)..(2950): n is a, c, g, or t
  misc_feature (2955)..(2966): n is a, c, g, or t
  misc_feature (2968)..(2979): n is a, c, g, or t
  misc_feature (2981)..(3011): n is a, c, g, or t
  misc_feature (3013)..(3014): n is a, c, g, or t
  misc_feature (3017)..(3036): n is a, c, g, or t
  misc_feature (3038)..(3060): n is a, c, g, or t
  misc_feature (3062)..(3082): n is a, c, g, or t
  misc_feature (3084)..(3084): n is a, c, g, or t
  misc_feature (3086)..(3089): n is a, c, g, or t
  misc_feature (3091)..(3096): n is a, c, g, or t
  misc_feature (3098)..(3128): n is a, c, g, or t
  misc_feature (3130)..(3166): n is a, c, g, or t
  misc_feature (3169)..(3212): n is a, c, g, or t
  misc_feature (3214)..(3218): n is a, c, g, or t
  misc_feature (3220)..(3229): n is a, c, g, or t
  misc_feature (3232)..(3250): n is a, c, g, or t
  misc_feature (3252)..(3252): n is a, c, g, or t
  misc_feature (3254)..(3287): n is a, c, g, or t
  misc_feature (3289)..(3291): n is a, c, g, or t
  misc_feature (3293)..(3299): n is a, c, g, or t
  misc_feature (3302)..(3310): n is a, c, g, or t
  misc_feature (3313)..(3314): n is a, c, g, or t
  misc_feature (3317)..(3322): n is a, c, g, or t
  misc_feature (3326)..(3334): n is a, c, g, or t
  misc_feature (3336)..(3338): n is a, c, g, or t
  misc_feature (3340)..(3385): n is a, c, g, or t
  misc_feature (3387)..(3396): n is a, c, g, or t
  misc_feature (3398)..(3403): n is a, c, g, or t
  misc_feature (3405)..(3429): n is a, c, g, or t
  misc_feature (3431)..(3434): n is a, c, g, or t
  misc_feature (3436)..(3437): n is a, c, g, or t
  misc_feature (3439)..(3453): n is a, c, g, or t
  misc_feature (3455)..(3455): n is a, c, g, or t
  misc_feature (3457)..(3470): n is a, c, g, or t
  misc_feature (3472)..(3491): n is a, c, g, or t
  misc_feature (3493)..(3494): n is a, c, g, or t
  misc_feature (3496)..(3498): n is a, c, g, or t
  misc_feature (3501)..(3502): n is a, c, g, or t
  misc_feature (3505)..(3508): n is a, c, g, or t
  misc_feature (3510)..(3531): n is a, c, g, or t
  misc_feature (3536)..(3538): n is a, c, g, or t
  misc_feature (3541)..(3554): n is a, c, g, or t
  misc_feature (3556)..(3558): n is a, c, g, or t
  misc_feature (3560)..(3562): n is a, c, g, or t
  misc_feature (3564)..(3565): n is a, c, g, or t
  misc_feature (3567)..(3572): n is a, c, g, or t
  misc_feature (3576)..(3581): n is a, c, g, or t
  misc_feature (3583)..(3593): n is a, c, g, or t
  misc_feature (3595)..(3611): n is a, c, g, or t
  misc_feature (3613)..(3642): n is a, c, g, or t
  misc_feature (3644)..(3664): n is a, c, g, or t
  misc_feature (3666)..(3683): n is a, c, g, or t
  misc_feature (3685)..(3702): n is a, c, g, or t
  misc_feature (3704)..(3711): n is a, c, g, or t
  misc_feature (3713)..(3728): n is a, c, g, or t
  misc_feature (3730)..(3747): n is a, c, g, or t
  misc_feature (3749)..(3770): n is a, c, g, or t
  misc_feature (3772)..(3777): n is a, c, g, or t
  misc_feature (3780)..(3791): n is a, c, g, or t
  misc_feature (3795)..(3796): n is a, c, g, or t
  misc_feature (3798)..(3799): n is a, c, g, or t
  misc_feature (3801)..(3827): n is a, c, g, or t
  misc_feature (3830)..(3841): n is a, c, g, or t
  misc_feature (3843)..(3844): n is a, c, g, or t
  misc_feature (3847)..(3863): n is a, c, g, or t
  misc_feature (3865)..(3904): n is a, c, g, or t
  misc_feature (3906)..(3924): n is a, c, g, or t
  misc_feature (3926)..(3946): n is a, c, g, or t
  misc_feature (3949)..(3949): n is a, c, g, or t
  misc_feature (3951)..(3955): n is a, c, g, or t
  misc_feature (3958)..(3961): n is a, c, g, or t
  misc_feature (3963)..(3963): n is a, c, g, or t
  misc_feature (3965)..(3998): n is a, c, g, or t
nnnnnnnnnnnnnnnnnnnnnngnnnnnnnnnnnnnnnnnnnnnnnnnnnnnnnnnnnnnnnnnngnnnnnnnnnnnnnnnnnnnnnnnnnnnnnnnnnnnnnnnnnnnnnnnnnnnnnnnnnnnnnnnnnnnnnnnnnnnnnnnnnnnnnnnnnnnnnnnnnnnnnnnnnnnnnnnnnnnnnnnnnnnnnnnnnnnnnnnnnnnnnnnnnnnnnnnnnnnnnnnnnnnnnnnnnnnnnnnnnnnnnnnnnnnnnnnnnnnnnnnnnnnnnnnnnnnnnnnngnnnnnnnnnnnnnnnnnnnnnnnnnnnnnnnnnnnnnnnnnnnnnnnnnnnnnnnnnnnnnnnnnnnnnnnnnnnnnnnnnnnnnnnnnnnnnnnnnnnnnnnnnnnnnnnnnnnnnnnnnnnnnnnnnnnnnnnnnnnnnnnnnnnnnnnnnnnnnnnnnnnnnnnnnnnnnnnnnnnnnnnnnnnnnnnnnnnnnnnnnnnnnnnnnnnnnnnnnnnnnnnnnnnnnnnnnnnnnnnnnnnnnnnnnnnnnnnnnnnnnnnnnnnnnnnnnnnnnnnnnannnnnnnnnnnnnnnnnnnnnnnnnnnnnnnnnnnnnnnnnnnnnnnnnnnnnnnnnnnnnnnnnnnnnnnnnnnnnnnnnannnnnnnnnnnnnnnannnnnnnnnnnnnnnnnnnnnnnnnnnnnnnnnnannnnnnnnnnnnnnnnnnnnnnnnnnnnnnnnnnnnnnnnnnnnnnnnnnnnanannnnaaannnnnnnnnaaannnnnnnnnnnnnaaannnnnnnnnnnnnnaannannnannnnnnnnnnnnnnnnnnnnnnngnnnnnnnnnnnntnnanantnnanaannnnnnanaanntnnnannngannnnnnntnnnnnnnnnnaaannnnnnnnnnnaanncnaannaannnnnnnnnnnnnnnnnnnnnannnnnnnnnnnnnnnnnnaaanannnttnannnnttttaagtgataaatatcatttataaagagtttgatcctggctcaggacgaacgctggcggcgcgcctaacacatgcaagtcgaacgagngagagagagcttgctttntnnancgagtggcgaacgggtgagtaacgcgtgaggaacctgcctcaaagagggggacaacagttggaaacgactgctaataccgcataagcccacggntcggcatcgagcagagggaaaaggagnnatccgctttgagatggcctcgcgtccgattagctagttggtgaggtaacggcccaccaaggcgacgatcggtagccggactgagaggttgaacggccacattgggactgagacacggcccagactcctacgggaggcagcagtggggaatattgcacaatgggggaaaccctgatgcagcgacgccgcgtggaggaagaaggtcttcggattgtaaactcctgttgttgaggaagataatgacggtactcaacaaggaagtgacggctaactacgtgccagcagccgcggtaaaacgtaggtcacaagcgttgtccggaattactgggtgtaaagggagcgcaggcgggaagacaagttggaagtgaaatctatgggctcaacccataaactgctttcaaaactgtttttcttgagtagtgcagaggtaggcggaattcccggtgtagcggtggaatgcgtagatatcgggaggaacaccagtggcgaaggcggcctactgggcaccaactgacgctgaggctcgaaagtgtgggtagcaaacaggattagataccctggtagtccacaccgtaaacgatgattactaggtgttggaggattgaccccttcagtgccgcagttaacacaataagtaatccacctggggagtacgaccgcaaggttgaaactcaaaggaattgacgggggcccgcacaagcagtggagtatgtggtttaattcgacgcaacgcgaagaaccttaccaagtcttgacatccnnngacgnnnntngaaanannntttnncttcggnncnnngagacaggtggtgcatggttgtcgtcagctcgtgtcgtgagatgttgggttaagtcccgcaacgagcgcaacccttatggtcagttactacgcaagaggactctggccagactgccgttgacaaaacggaggaaggtggggatgacgtcaaatcatcatgccctttatgacttgggctacacacgtactacaatggcgttaaacaaagagaagcaagaccgcgaggtggagcaaaactcagaaacaacgtcccagttcggactgcaggctgcaactcgcctgcacgaagtcggaattgctagtaatcgtggatcagcatgccacggtgaatacgttcccgggccttgtacacaccgcccgtcacaccatgagagccggggggacccgaagtcggtagtctaaccgcaaggaggacgccgccgaaggtaaaactggtgattggggtgaagtcgtaacaaggtagccgtaggagaacctgcggctggatcacctcctttctaaggagtcaggcaannnnannncatcnaannnngnnngtcnttngnacaggtnanaannnanannttaantanatattgttcnattttgagggcccngaaaaggnnnnncnaanannnnnntnnnaanntnaannanaactgngaaannannntnntnnnaagttnnttntnaananntnnnnnnnntnnannnnnnnnnnnaannnnnnnnnnnnnnnnnnnnnnnnnannannnnnnnannnnnnnnnnnnnaannnnnnntnnnnnnnnnnnnnnnnnnngnnnnnnnnnnnnnnnnnnngnnnnngggnnnnnnnnnannnnnnnnnnnnnnnnnnnnnnnnnnggnnnnnnnnannnannnnnnnnnnnnnnnnnntnnnnnnnnnnnaannnnnnnnnntnnnnnnnnnnnnnnnnnnnnnnnnnnnnnaaaannnnnnnnnnnngnnnnnnnnnnnnannnnnnnnnnnnnnnnnnnnnnnnnnnnnnnannaannnnnnnnnnnnnnnnnnnngnnnnnnnnnnnnnnnnnnnnnnnannnnnnnnnnnnnnnnnnnnngngnnnngnnnnnntnnnnnnnnnnnnnnnnnnnnnnnnnnnnnnngnnnnnnnnnnnnnnnnnnnnnnnnnnnnnnnnnnnnnaannnnnnnnnnnnnnnnnnnnnnnnnnnnnnnnnnnnnnnnnnnnannnnngnnnnnnnnnnggnnnnnnnnnnnnnnnnnnnanannnnnnnnnnnnnnnnnnnnnnnnnnnnnnnnnnannnannnnnnnaannnnnnnnnggnnggnnnnnnaaannnnnnnnnannncnnnnnnnnnnnnnnnnnnnnnnnnnnnnnnnnnnnnnnnnnnnnnntnnnnnnnnnngnnnnnngnnnnnnnnnnnnnnnnnnnnnnnnngnnnnanngnnnnnnnnnnnnnnnanannnnnnnnnnnnnngnnnnnnnnnnnnnnnnnnnngnncnnnaannggnnnncnnnnnnnnnnnnnnnnnnnnnnggaannnaannnnnnnnnnnnnncnnncnnncnncnnnnnnaaannnnnngnnnnnnnnnnngnnnnnnnnnnnnnnnnnannnnnnnnnnnnnnnnnnnnnnnnnnnnnnannnnnnnnnnnnnnnnnnnnnannnnnnnnnnnnnnnnnnannnnnnnnnnnnnnnnnngnnnnnnnngnnnnnnnnnnnnnnnnannnnnnnnnnnnnnnnnntnnnnnnnnnnnnnnnnnnnnnngnnnnnnaannnnnnnnnnnnaaanngnnannnnnnnnnnnnnnnnnnnnnnnnnnnaannnnnnnnnnnngnnaannnnnnnnnnnnnnnnnannnnnnnnnnnnnnnnnnnnnnnnnnnnnnnnnnnnnnnnannnnnnnnnnnnnnnnnnngnnnnnnnnnnnnnnnnnnnnnaantnnnnnggnnnnancnnnnnnnnnnnnnnnnnnnnnnnnnnnnnnnnnntg

SEQ ID NO: 257 - DNA, 4000 bp, Escherichia coli
gccggcatccagatcaatctcaaacgcacctgatactttgccagtattttcgaggcgcaaggcggccaattcatcaaaccgctcccgcgtaatgggctgtgtcttataaaagtggtgggagaaaccgcccttcaccgcctcggcgtctccttgcagataacggcgcagccgtatggccacatccagaaattcctcgccattacccgttgagaagatactgtcatggccattctcccgaatatgaaaagccgcatagactttctggtcttccgctgcctgtgctgactccagttcttcctttgtgatagctgtttcaatctgtacccaccgttctaatggaacagtttcgttgtacagcgttatcaaataatcctgcagatgccgtttaacattactgccttgcgccttcagcgcctcctccagcgccgcccagcgccgctgatccagccacgcctcggtagatacagaatcggccattattcaacccccttcttctcgtcaaaagtatccggcgcggcgcttcgaggggaccgggcaggccgcgggcggggctgttcctccggctccgccatgctttcaatatactccctggtctgagaaggcacatattttttgtagagcttctccatgaacatatccagttccaactctaaagaggtaccgttctttcccgcatagaactggacggctttgagtttttcctgctcaaatgaaaccgtgactgtggcttttttcatcgtgatccctccattacagaaacagttccatggcatgttctgccctggaactgttggcaagtgtttcatcgtattgtgccagaagctgtgaattgacgccgtccagaaccagttccactccataggggccggggcggatggcggcaatcttggcatccagaagagccgagaattcttctttgccctgggcggtcagacggggaaggtccgctgcgggcacccagccaacatcttcggcggcatgaactaaatagacatcatgatccggcagtccaagtgtcaacagatcccgcagatggacggccggggcttccgccagcgcatggagctgctgctcctgcacaggctctggtggaaaatacactctggtttcactgccatccctgcagaaataatcgacctttctccactcgccgccatgggcaacctgcaactccccaagatggctgtatctccagttccgattattttccttgcaccactggactacatggtcgctgacgctgccggacttccagtcgaaggtgaagagagtttcacccttctgccggagcagttccgtccactgtacccggtctgtgaagcccatacttcgggcaacaaacgcctcacacatccggatcgcccagtcggacggctctgcctgatgttcatgtttctttctgaactcctccaactgccaaagcagatccaactgatcctgtttaatattgatgtttctttcctcctctttcgtgtcatccttggactgtttatccagcgatagattgtttccaaaggcttccgtcaagctctcgtagatgctctccgtatcccattcgccagcggcagtcagccggccagcgatctcccgcagggtcgtttcctgggcaagcatctcatcgccggagataagccagggccacatcttcgaggtttcctgctcaaagcgaatgtagtccacgatgtcctggtatgcgtcatcgcagtcaggctcatagcggtgggcgagatcgaagcccatggcctcaatctcctgattagtcagtcccaactcattgtgaagcgtcttgtagagttcctcacttccgtcatgctccgcaaggaaagctatgagcctgttctggattctgttggcgcctgccgttggaaaatggtttgccagggcatccaagctctcccgcaggctgccggcccggtggtcatattccaaccgtattcgcccattgtccagatcaatgaccgcccgctgttccgcagccccgccatgaccaaggtcatggctcagggcctccgcttcatctgcaaatacccgcctgagtggagtgccgcgttcagcggcagcgagagaaagagcctccgcgaagctgctgttctcattttccgcgatggcagcggcccgcgctaacagtggatacagccccacaagcccagctccatcctcgcctacaaaagcggtttgccgtccccgttgctctacttgatacagcactgccgtagtatccctcccatcgttttattaccgtgttctgtctgttttacatagagagatcctgttcctcacccatctccacatcccacatggtccggacctcattcaggtaatacccagccagttctttgtcctcgcaaaagaaggggacgatgccgcggaccccatagtgctcctcaccaaccgctgggttgtaccgcccaagcacatagtgaagggggactttttccattgtgaaaaaagttccccgcacagagcaagtcttgtccttttcatccacgctctctattactccaccgcgtagatcgaaatcgccggggcctccatatggctcggtagcgacaaacagcaccttgtctccagccgtcagctccttagctaacaggcagtcccgcatacgggaaatgatttcatcacgggaggtgaagctctcggcctcctggatttcatcgctctccagttcgagagcggacagagcctgctggtacgcggtatgaagccgttcatccggcacatttgggtcaaggcagtaaccgaaagcccctggagccaggcgggtgattcgttcctcatctgggatctgttgtaattcttcataggcggaaagcagattcaccagcttccctgattttgggagaaggtcagactgcacctcagatgcttcgatctgctcgtccacatattcatcatacagagcgaagccgaggcatccaatttcatcgttgcagatttccaatgtgttatgaaggatatcgtagaggctgctgtcatcgaaatactctgccatatagttcagaatgcctgatatgatctcctccttccgctctgcggaaagagagggggcgggctgctccggcgccaggtttttgcagtagtccagataatagcagacatcaaagcactcgtccgtcagggtgacatccgccgcctccggccgctgctccagcttctcaaggagcatggtatcgaagccgttcccgtcctctatcaccaatcccatttgctcataaagctcactgaaataatagcaccagctaccctcgttggtgttttccgctccctccctgatgatcttttccactgcctgctccagaatggaatcaaccaccgctcttgctccgggcaagtaggcaaagtgtttccccccatcataggcaaaaactccgtctttatgcccctctcccaaaacgaggacgccctggtagatccgtctaccgtgttcatcagcatagaacggctctgcagcccagcggccatcctggtgagggccattcaaaaagtcttggaattcctcgtccggcagcgtaaccagccgaactgcctcacactcaaagatgtggaagcgtccggccttggccggcaattgaagtttcagccgcaaaatatcatcctccagtcttcggtaaataatagcggggattggtacgctccccattgacccgcacttcaaaatgcagatgcggacctgtagacctcccagtggaaccggagagggaaatgatatccccagcctccactgtctggccaacctgggccagtagacgggaattgtggccatacaaggtggatagtccattgccgtggtcgattatcacatagtaaccatagctgctgttatattgggaaactgtgaccgtcccaggcagtgcggcccggataggggtgcctgtgggtactgccagatctatcccggtgtgtccccgtgtctcgccagtgaaggggtcgctgcgatacccgaactccgaggtgaccacggactcccagcctgctccgatgggagagcagaagccat

SEQ ID NO: 258 - DNA, 4000 bp, Escherichia coli
  misc_feature (1)..(13): n is a, c, g, or t
  misc_feature (15)..(20): n is a, c, g, or t
  misc_feature (22)..(29): n is a, c, g, or t
  misc_feature (31)..(32): n is a, c, g, or t
  misc_feature (34)..(35): n is a, c, g, or t
  misc_feature (37)..(38): n is a, c, g, or t
  misc_feature (42)..(43): n is a, c, g, or t
  misc_feature (45)..(45): n is a, c, g, or t
  misc_feature (47)..(47): n is a, c, g, or t
  misc_feature (49)..(53): n is a, c, g, or t
  misc_feature (55)..(56): n is a, c, g, or t
  misc_feature (58)..(58): n is a, c, g, or t
  misc_feature (62)..(64): n is a, c, g, or t
  misc_feature (66)..(67): n is a, c, g, or t
  misc_feature (69)..(73): n is a, c, g, or t
  misc_feature (76)..(76): n is a, c, g, or t
  misc_feature (79)..(84): n is a, c, g, or t
  misc_feature (86)..(89): n is a, c, g, or t
  misc_feature (91)..(91): n is a, c, g, or t
  misc_feature (93)..(93): n is a, c, g, or t
  misc_feature (95)..(96): n is a, c, g, or t
  misc_feature (98)..(98): n is a, c, g, or t
  misc_feature (101)..(103): n is a, c, g, or t
  misc_feature (107)..(108): n is a, c, g, or t
  misc_feature (111)..(115): n is a, c, g, or t
  misc_feature (117)..(119): n is a, c, g, or t
  misc_feature (121)..(121): n is a, c, g, or t
  misc_feature (123)..(127): n is a, c, g, or t
  misc_feature (129)..(130): n is a, c, g, or t
  misc_feature (132)..(132): n is a, c, g, or t
  misc_feature (136)..(136): n is a, c, g, or t
  misc_feature (139)..(139): n is a, c, g, or t
  misc_feature (145)..(146): n is a, c, g, or t
  misc_feature (148)..(150): n is a, c, g, or t
  misc_feature (153)..(153): n is a, c, g, or t
  misc_feature (155)..(155): n is a, c, g, or t
  misc_feature (158)..(159): n is a, c, g, or t
  misc_feature (161)..(162): n is a, c, g, or t
  misc_feature (167)..(167): n is a, c, g, or t
  misc_feature (170)..(172): n is a, c, g, or t
  misc_feature (176)..(176): n is a, c, g, or t
  misc_feature (179)..(182): n is a, c, g, or t
  misc_feature (184)..(184): n is a, c, g, or t
  misc_feature (186)..(186): n is a, c, g, or t
  misc_feature (189)..(189): n is a, c, g, or t
  misc_feature (191)..(191): n is a, c, g, or t
  misc_feature (194)..(194): n is a, c, g, or t
  misc_feature (196)..(196): n is a, c, g, or t
  misc_feature (199)..(199): n is a, c, g, or t
  misc_feature (202)..(205): n is a, c, g, or t
  misc_feature (211)..(211): n is a, c, g, or t
  misc_feature (213)..(213): n is a, c, g, or t
  misc_feature (216)..(216): n is a, c, g, or t
  misc_feature (218)..(218): n is a, c, g, or t
  misc_feature (221)..(222): n is a, c, g, or t
  misc_feature (227)..(228): n is a, c, g, or t
  misc_feature (230)..(230): n is a, c, g, or t
  misc_feature (232)..(235): n is a, c, g, or t
  misc_feature (238)..(238): n is a, c, g, or t
  misc_feature (241)..(242): n is a, c, g, or t
  misc_feature (249)..(249): n is a, c, g, or t
  misc_feature (251)..(252): n is a, c, g, or t
  misc_feature (254)..(257): n is a, c, g, or t
  misc_feature (260)..(260): n is a, c, g, or t
  misc_feature (263)..(264): n is a, c, g, or t
  misc_feature (266)..(267): n is a, c, g, or t
  misc_feature (269)..(271): n is a, c, g, or t
  misc_feature (273)..(273): n is a, c, g, or t
  misc_feature (276)..(276): n is a, c, g, or t
  misc_feature (278)..(278): n is a, c, g, or t
  misc_feature (282)..(282): n is a, c, g, or t
  misc_feature (284)..(284): n is a, c, g, or t
  misc_feature (291)..(295): n is a, c, g, or t
  misc_feature (297)..(302): n is a, c, g, or t
  misc_feature (307)..(307): n is a, c, g, or t
  misc_feature (311)..(311): n is a, c, g, or t
  misc_feature (314)..(314): n is a, c, g, or t
  misc_feature (316)..(316): n is a, c, g, or t
  misc_feature (318)..(326): n is a, c, g, or t
  misc_feature (328)..(328): n is a, c, g, or t
  misc_feature (330)..(330): n is a, c, g, or t
  misc_feature (332)..(334): n is a, c, g, or t
  misc_feature (337)..(337): n is a, c, g, or t
  misc_feature (339)..(344): n is a, c, g, or t
  misc_feature (353)..(353): n is a, c, g, or t
  misc_feature (355)..(355): n is a, c, g, or t
  misc_feature (360)..(360): n is a, c, g, or t
  misc_feature (362)..(367): n is a, c, g, or t
  misc_feature (370)..(370): n is a, c, g, or t
  misc_feature (372)..(375): n is a, c, g, or t
  misc_feature (378)..(379): n is a, c, g, or t
  misc_feature (381)..(381): n is a, c, g, or t
  misc_feature (386)..(386): n is a, c, g, or t
  misc_feature (389)..(390): n is a, c, g, or t
  misc_feature (392)..(396): n is a, c, g, or t
  misc_feature (398)..(398): n is a, c, g, or t
  misc_feature (401)..(401): n is a, c, g, or t
  misc_feature (403)..(403): n is a, c, g, or t
  misc_feature (405)..(406): n is a, c, g, or t
  misc_feature (408)..(409): n is a, c, g, or t
  misc_feature (411)..(413): n is a, c, g, or t
  misc_feature (415)..(416): n is a, c, g, or t
  misc_feature (418)..(418): n is a, c, g, or t
  misc_feature (420)..(421): n is a, c, g, or t
  misc_feature (423)..(424): n is a, c, g, or t
  misc_feature (426)..(430): n is a, c, g, or t
  misc_feature (432)..(434): n is a, c, g, or t
  misc_feature (436)..(439): n is a, c, g, or t
  misc_feature (442)..(444): n is a, c, g, or t
  misc_feature (446)..(447): n is a, c, g, or t
  misc_feature (449)..(452): n is a, c, g, or t
  misc_feature (454)..(455): n is a, c, g, or t
  misc_feature (457)..(459): n is a, c, g, or t
  misc_feature (461)..(461): n is a, c, g, or t
  misc_feature (463)..(465): n is a, c, g, or t
  misc_feature (467)..(467): n is a, c, g, or t
  misc_feature (469)..(472): n is a, c, g, or t
  misc_feature (474)..(474): n is a, c, g, or t
  misc_feature (476)..(481): n is a, c, g, or t
  misc_feature (483)..(484): n is a, c, g, or t
  misc_feature (486)..(487): n is a, c, g, or t
  misc_feature (490)..(490): n is a, c, g, or t
  misc_feature (492)..(498): n is a, c, g, or t
  misc_feature (501)..(502): n is a, c, g, or t
  misc_feature (504)..(506): n is a, c, g, or t
  misc_feature (508)..(512): n is a, c, g, or t
  misc_feature (514)..(520): n is a, c, g, or t
  misc_feature (522)..(531): n is a, c, g, or t
  misc_feature (533)..(543): n is a, c, g, or t
  misc_feature (546)..(554): n is a, c, g, or t
  misc_feature (556)..(557): n is a, c, g, or t
  misc_feature (559)..(559): n is a, c, g, or t
  misc_feature (561)..(562): n is a, c, g, or t
  misc_feature (564)..(565): n is a, c, g, or t
  misc_feature (567)..(570): n is a, c, g, or t
  misc_feature (572)..(576): n is a, c, g, or t
  misc_feature (578)..(579): n is a, c, g, or t
  misc_feature (581)..(584): n is a, c, g, or t
  misc_feature (586)..(587): n is a, c, g, or t
  misc_feature (589)..(592): n is a, c, g, or t
  misc_feature (595)..(596): n is a, c, g, or t
  misc_feature (598)..(598): n is a, c, g, or t
  misc_feature (600)..(605): n is a, c, g, or t
  misc_feature (608)..(609): n is a, c, g, or t
  misc_feature (611)..(613): n is a, c, g, or t
  misc_feature (615)..(619): n is a, c, g, or t
  misc_feature (623)..(625): n is a, c, g, or t
  misc_feature (627)..(627): n is a, c, g, or t
  misc_feature (629)..(629): n is a, c, g, or t
  misc_feature (632)..(636): n is a, c, g, or t
  misc_feature (638)..(638): n is a, c, g, or t
  misc_feature (641)..(645): n is a, c, g, or t
  misc_feature (648)..(648): n is a, c, g, or t
  misc_feature (650)..(655): n is a, c, g, or t
  misc_feature (657)..(658): n is a, c, g, or t
  misc_feature (660)..(661): n is a, c, g, or t
  misc_feature (663)..(666): n is a, c, g, or t
  misc_feature (668)..(673): n is a, c, g, or t
  misc_feature (675)..(677): n is a, c, g, or t
  misc_feature (679)..(690): n is a, c, g, or t
  misc_feature (692)..(700): n is a, c, g, or t
  misc_feature (702)..(703): n is a, c, g, or t
  misc_feature (705)..(706): n is a, c, g, or t
  misc_feature (709)..(712): n is a, c, g, or t
  misc_feature (714)..(721): n is a, c, g, or t
  misc_feature (723)..(723): n is a, c, g, or t
  misc_feature (725)..(726): n is a, c, g, or t
  misc_feature (728)..(728): n is a, c, g, or t
  misc_feature (730)..(733): n is a, c, g, or t
  misc_feature (735)..(745): n is a, c, g, or t
  misc_feature (747)..(747): n is a, c, g, or t
  misc_feature (749)..(749): n is a, c, g, or t
  misc_feature (751)..(755): n is a, c, g, or t
  misc_feature (757)..(767): n is a, c, g, or t
  misc_feature (769)..(778): n is a, c, g, or t
  misc_feature (783)..(787): n is a, c, g, or t
  misc_feature (789)..(791): n is a, c, g, or t
  misc_feature (794)..(795): n is a, c, g, or t
  misc_feature (797)..(799): n is a, c, g, or t
  misc_feature (801)..(810): n is a, c, g, or t
  misc_feature (812)..(813): n is a, c, g, or t
  misc_feature (815)..(824): n is a, c, g, or t
  misc_feature (826)..(846): n is a, c, g, or t
  misc_feature (849)..(853): n is a, c, g, or t
  misc_feature (855)..(856): n is a, c, g, or t
  misc_feature (858)..(859): n is a, c, g, or t
  misc_feature (861)..(862): n is a, c, g, or t
  misc_feature (864)..(868): n is a, c, g, or t
  misc_feature (870)..(870): n is a, c, g, or t
  misc_feature (873)..(877): n is a, c, g, or t
  misc_feature (879)..(883): n is a, c, g, or t
  misc_feature (885)..(888): n is a, c, g, or t
  misc_feature (890)..(892): n is a, c, g, or t
  misc_feature (894)..(897): n is a, c, g, or t
  misc_feature (900)..(902): n is a, c, g, or t
  misc_feature (904)..(910): n is a, c, g, or t
  misc_feature (912)..(915): n is a, c, g, or t
  misc_feature (917)..(919): n is a, c, g, or t
  misc_feature (921)..(926): n is a, c, g, or t
  misc_feature (928)..(930): n is a, c, g, or t
  misc_feature (932)..(933): n is a, c, g, or t
  misc_feature (935)..(935): n is a, c, g, or t
  misc_feature (938)..(939): n is a, c, g, or t
  misc_feature (941)..(947): n is a, c, g, or t
  misc_feature (949)..(953): n is a, c, g, or t
  misc_feature (957)..(958): n is a, c, g, or t
  misc_feature (960)..(964): n is a, c, g, or t
  misc_feature (966)..(973): n is a, c, g, or t
  misc_feature (977)..(980): n is a, c, g, or t
  misc_feature (983)..(985): n is a, c, g, or t
  misc_feature (988)..(989): n is a, c, g, or t
  misc_feature (991)..(994): n is a, c, g, or t
  misc_feature (996)..(998): n is a, c, g, or t
  misc_feature (1002)..(1007): n is a, c, g, or t
  misc_feature (1009)..(1018): n is a, c, g, or t
  misc_feature (1021)..(1025): n is a, c, g, or t
  misc_feature (1029)..(1033): n is a, c, g, or t
  misc_feature (1035)..(1039): n is a, c, g, or t
  misc_feature (1041)..(1043): n is a, c, g, or t
  misc_feature (1046)..(1046): n is a, c, g, or t
  misc_feature (1048)..(1049): n is a, c, g, or t
  misc_feature (1051)..(1051): n is a, c, g, or t
  misc_feature (1053)..(1053): n is a, c, g, or t
  misc_feature (1055)..(1067): n is a, c, g, or t
  misc_feature (1069)..(1071): n is a, c, g, or t
  misc_feature (1073)..(1073): n is a, c, g, or t
  misc_feature (1075)..(1076): n is a, c, g, or t
  misc_feature (1078)..(1084): n is a, c, g, or t
  misc_feature (1086)..(1087): n is a, c, g, or t
  misc_feature (1089)..(1092): n is a, c, g, or t
  misc_feature (1095)..(1101): n is a, c, g, or t
  misc_feature (1103)..(1103): n is a, c, g, or t
  misc_feature (1106)..(1114): n is a, c, g, or t
  misc_feature (1116)..(1133): n is a, c, g, or t
  misc_feature (1135)..(1136): n is a, c, g, or t
  misc_feature (1138)..(1142): n is a, c, g, or t
  misc_feature (1144)..(1147): n is a, c, g, or t
  misc_feature (1150)..(1155): n is a, c, g, or t
  misc_feature (1157)..(1157): n is a, c, g, or t
  misc_feature (1159)..(1159): n is a, c, g, or t
  misc_feature (1161)..(1183): n is a, c, g, or t
  misc_feature (1185)..(1187): n is a, c, g, or t
  misc_feature (1189)..(1191): n is a, c, g, or t
  misc_feature (1194)..(1202): n is a, c, g, or t
  misc_feature (1204)..(1217): n is a, c, g, or t
  misc_feature (1219)..(1231): n is a, c, g, or t
  misc_feature (1233)..(1237): n is a, c, g, or t
  misc_feature (1239)..(1240): n is a, c, g, or t
  misc_feature (1242)..(1245): n is a, c, g, or t
  misc_feature (1247)..(1248): n is a, c, g, or t
  misc_feature (1250)..(1250): n is a, c, g, or t
  misc_feature (1252)..(1253): n is a, c, g, or t
  misc_feature (1256)..(1256): n is a, c, g, or t
  misc_feature (1259)..(1263): n is a, c, g, or t
  misc_feature (1265)..(1266): n is a, c, g, or t
  misc_feature (1268)..(1269): n is a, c, g, or t
  misc_feature (1271)..(1276): n is a, c, g, or t
  misc_feature (1278)..(1280): n is a, c, g, or t
  misc_feature (1283)..(1285): n is a, c, g, or t
  misc_feature (1289)..(1296): n is a, c, g, or t
  misc_feature (1298)..(1311): n is a, c, g, or t
  misc_feature (1314)..(1317): n is a, c, g, or t
  misc_feature (1319)..(1329): n is a, c, g, or t
  misc_feature (1331)..(1331): n is a, c, g, or t
  misc_feature (1333)..(1334): n is a, c, g, or t
  misc_feature (1337)..(1337): n is a, c, g, or t
  misc_feature (1339)..(1347): n is a, c, g, or t
  misc_feature (1349)..(1364): n is a, c, g, or t
  misc_feature (1366)..(1378): n is a, c, g, or t
  misc_feature (1382)..(1390): n is a, c, g, or t
  misc_feature (1392)..(1401): n is a, c, g, or t
  misc_feature (1403)..(1405): n is a, c, g, or t
  misc_feature (1407)..(1407): n is a, c, g, or t
  misc_feature (1409)..(1410): n is a, c, g, or t
  misc_feature (1413)..(1413): n is a, c, g, or t
  misc_feature (1415)..(1416): n is a, c, g, or t
  misc_feature (1418)..(1420): n is a, c, g, or t
  misc_feature (1422)..(1424): n is a, c, g, or t
  misc_feature (1426)..(1429): n is a, c, g, or t
  misc_feature (1431)..(1431): n is a, c, g, or t
  misc_feature (1433)..(1433): n is a, c, g, or t
  misc_feature (1435)..(1443): n is a, c, g, or t
  misc_feature (1446)..(1446): n is a, c, g, or t
  misc_feature (1449)..(1449): n is a, c, g, or t
  misc_feature (1451)..(1454): n is a, c, g, or t
  misc_feature (1457)..(1465): n is a, c, g, or t
  misc_feature (1467)..(1469): n is a, c, g, or t
  misc_feature (1471)..(1471): n is a, c, g, or t
  misc_feature (1473)..(1474): n is a, c, g, or t
  misc_feature (1476)..(1477): n is a, c, g, or t
  misc_feature (1479)..(1486): n is a, c, g, or t
  misc_feature (1488)..(1488): n is a, c, g, or t
  misc_feature (1490)..(1497): n is a, c, g, or t
  misc_feature (1499)..(1509): n is a, c, g, or t
  misc_feature (1511)..(1513): n is a, c, g, or t
  misc_feature (1516)..(1519): n is a, c, g, or t
  misc_feature (1521)..(1522): n is a, c, g, or t
  misc_feature (1524)..(1524): n is a, c, g, or t
  misc_feature (1526)..(1531): n is a, c, g, or t
  misc_feature (1534)..(1536): n is a, c, g, or t
  misc_feature (1538)..(1541): n is a, c, g, or t
  misc_feature (1543)..(1554): n is a, c, g, or t
  misc_feature (1556)..(1557): n is a, c, g, or t
  misc_feature (1559)..(1567): n is a, c, g, or t
  misc_feature (1569)..(1571): n is a, c, g, or t
  misc_feature (3496)..(3496): n is a, c, g, or t
  misc_feature (3578)..(3578): n is a, c, g, or t
  misc_feature (3611)..(3611): n is a, c, g, or t
  misc_feature (3816)..(3816): n is a, c, g, or t
  misc_feature (3902)..(3902): n is a, c, g, or t
nnnnnnnnnnnnntnnnnnngnnnnnnnncnncnncnntccnncnancnnnnncnncntttnnnanntnnnnnaangannnnnngnnnnancngnngnagnnncccnnggnnnnnannngntnnnnngnngntttnttnaaaaanntnnnttnanttnntnnttttnctnnntttnttnnnnancnttntncgnanggntgnnnncaaacnanctncntcnnccggnngntnnnnccnccnncccttcntnntnnnnccngcnncnncnnnanccntncccncnttctttnnnnncnnnnnnaacantccnaananannnnnnnnntncnannnagncnnnnnnttccctttngntttcngnnnnnnttncnnnnganngnttttnttnntnnnnngnttntncnncnncnnntnntncnncnncnnnnncnnntnnnnaannntnngnnnnannannncnannngnannnngncnnnnnncnncnnttncnnnnnnnccnncnnntnnnnntnnnnnnncnnnnnnnnnntnnnnnnnnnnnccnnnnnnnnntnntncnncnncnnnngnnnnntnntnnnntnntnnnnccnntncnnnnnnggnntnnngnnnnncccnnngncnggnnnnncnaannnnnggntnnnnnncnncnncnnnncnnnnnngnnncnnnnnnnnnnnntnnnnnnnnncnncnnccnnnncnnnnnnnncntnntnannnncnnnnnnnnnnncntngnnnnncnnnnnnnnnnncnnnnnnnnnnggggnnnnncnnnggnntnnncnnnnnnnnnncnncnnnnnnnnnngnnnnnnnnnnnnnnnnnnnnnttnnnnncnncnncnngnnnnntnccnnnnncnnnnncnnnntnnncnnnnggnnngnnnnnnncnnnncnnncnnnnnngnnnannanccnnannnnnnngnnnnngggnngnnnnngnnnnnnnngggnnnnggnnnccnnannnncnnngggnnnnnngnnnnnnnnnnggnnnnngggnnnnncnnnnncnnnggncnncngnannnnnnnnnnnnngnnntngnngnnnnnnnanncnnnnccnnnnnnntnccnnnnnnnnncnnnnnnnnnnnnnnnnnncnnannnnncnnnnccnnnnnncngncnnnnnnnnnnnnnnnnnnnnnnncnnngnnnccnnnnnnnnnannnnnnnnnnnnnnannnnnnnnnnnnncnnnnncnncnnnncnngncnnccnggnnnnnanntnngnnnnnncnnnggnnnaaannnnnnnntnnnnnnnnnnnnnnccnnnntnnnnnnnnnnncngnnggntnnnnnnnnntnnnnnnnnnnnnnnnnannnnnnnnnnnnncccnnnnnnnnncnnnnnnnnnncnnncntnnggncnnannngnnngnnnncngncnnnnnnnnnaanggncnnnnccnnnnnnnnngnnntncnncnncnnnnnnnncntnnnnnnnnannnnnnnnnnntnnnggnnnntnngnannnnnnccnnngnnnngnnnnnnnnnnnncnncnnnnnnnnnannngagtgaggctgtaacctagtcaggaacaacttttttgagccgccaaactttttgaggagatcgacgttgttaacacttacagccgcgtcgcacgcataacatgccaatcccgggtctcagcggtatcacagacgacgacatctttgtgacactgaatctctgcctctgcggctgggctatacttgcgttgccccccagttggcgtccagctcactgggaggcctccgttgtcgccttgagtgcgacttttgcgtttgtctacacattaaccttggggcacgccatcttcatagaacgagaggccttaccggaaaacggcggattcagcagcctcgacggcgttgtgaatctcttcaagtccagagcagtcgtgttcagcggctgggtccattacgtttcgttcgaccttctggcgggactgtttatctgcaaagacgcagagaaggcacgacttcctcacctcgttgtcttggcgtgcctccctctggttctcttcgcgggaccgtcggggttgctgctctatctgttgatcaaaaccgtgcttctgtggcctacccaacagaagaccaaaaagggttgagcgggacctgaacatggaatcctcgaaggctcgactcctcgcgctttatctcgccgcgaccaccctctgcgcgatgatgatatcttgggtgatatttgcaccgggttcgtgcacctcctctttcatcgcggcgaatggacccgcgaagggcttgggcggcggatatgaaacacaattggaatcatggactcgatttgtaccacggacgctggtgaccaaatatcgtgacaatacactggtttgcttgctgcacgttctcccctccgtgctttggagtgggctcgtgccgtttcagttgaatccgtggttccgaaaccgtcgaccgagattgcacaggcttttcggtcgggtgctaatggcggtgacggcctcgatgaccgcggggtacgtgatgattcatgtgcgaggtcttcactttcatcaaaatgacttccctacattgaaacagggggaggggctctcagtgttagccccctggttttggccttggctgggtaggtgtattcatgcctgcacttttgggatggcgggatcgaatgatcaagcggcctttgctttcgtcacgttcgagacgtgtgcggctgtgtactgggggatcacactggttttggccggctgctacgcttggaggtacgcgacgggtgcgcagaagctgcacataattcgtcaccgctcctgggcaattagacatgtcgccgcaggattatccgtcgcaacgcagagggttttcataggcgcttctcatgggtggtgtcggctgaactcgttaaggtgtgaggacccaattccgcaaaagggtattttctcggactctctggccttgggagttctcacgtgcgtggtcgcgggcgaagtggcaatccgagacctgcgcgtgttagacacgcgagcgaaggtagattgagatgaactggacgtccgtcgtgtccaaatagtcccacaagttctaaatgtcgacaatctaaacctcctttgcagcggcaagcttgcagcggcctcaggcacctccaactgtaagagtcttacacaaacaccaaaaaatatctaaatatcggctatcccgcgatgagcaacacacggactgggcgcacggcacagcctcggctgtgcgcccaaccaaagagagacgacgcggcgtcgacctcacctctaattgtgtcgacgttaacgactgagaacgactttccccggtaaatatgccgtggtatcgttccatgacccggtcgctgctcggtcttctgcgcatctccccaaccaacgagcagctcatgagtgcactcctccgacttccaccttcggctgcaaaagaagagctgagaagaagggcaactgctgcacttatgtnagaagtggcgcgatccaaggtgcaaaacgaccctcgaacggctgctatgtcagaagtggcgcgatccaaggtgcaaaacgancctcgaacggctgctcacgttcgacccccggtngaggtccgcagatcggaagtatccgccgcgggcgccggactcttccttcgctgcgacgctcctgctgctagaccaggggacttgcttgctctttacgccggtgtttacacccctccggttcccagtgtcactcatgccgcagacggtacctcgattttgattccacagcccgcgctacgagaggacggcgcgtacgtggtgaatntggaaggcggcgggtacctctgcggtgcagaacacgctcttcgagttaaggaaaacgcaacccagggtctttgcgctggctgggcngtcgcagctctggccaatcaccctccccgtggtaccattccgaatgtagaggcgatcgtagttgactggggtgacacgatgagcgacgcagctcggaa

SEQ ID NO: 259 - DNA, 4000 bp, Escherichia coli
  misc_feature (1991)..(1992): n is a, c, g, or t
  misc_feature (3067)..(3067): n is a, c, g, or t
  misc_feature (3693)..(3693): n is a, c, g, or t
  misc_feature (3748)..(3748): n is a, c, g, or t
  misc_feature (3852)..(3852): n is a, c, g, or t
  misc_feature (3950)..(3950): n is a, c, g, or t
tgatacgaatttcattaaactatatagccgagaagccacaagcaacggagaaaaagatccacaaataaaattattttttcatcaagaaataataattgatgctgactctacttatagggatacattgcatgcatctctttatgcatatggtgacgtgtcaattattaatcctggcgatattgcaaataatcctaatcgattaggtattagtaatggattgggtcttcgttctctttttacaatctcttttgattctctaacattaccggaaggctcacttattcgaaaagcaaatttagttttaccctttgatacaactacaagtcctgagagttttgcaattatatttgaaccgatagaagaaataattgattctttgattacggattcaactaatgctatttttgatgccgatccatattctggagttggatatccttatcgtattgctaggacaatggacgaagcatcctatacaatttcaatcaaatcgtttttacaaaatattaccttggggaatgtttcaaatattggatttaaaatttcatcctacgagaagaatgacccatttgaatttttagaattttatttagatgatgaaacgctatctccaaaattggaaattatttatgttaaaaattaagaaaatattatttttaatttttatcgtttctgttgtgtttacccaagggacaatgaactcatttggactagggcatttttatgataatcagggaatcgcttcagccggaaatgggcttagtgtattgtcaccttctttccaaatggatgtttctctaacgaatccatcaacttgggaaaatttagactatacttttttatctttatcttatggtggtaatgagaatagttattccggcaattcattaaaaaatggatattctggactatcaaatgcaagttggattgttccagtaaaatctaagggagcttttggattaacgttggcgccttatttagatcagcgcgtttctatggtcagtaaggatacatcaaatttttatgcattcgatgatacgcttaatttggttaaatcgatagatcgttctggtggcgtcatggtttttaaaatgggctcatcttacttattgaatgaaatgttttcgcttggaatttcgattgatttattgttcgggtcatctcggcaaaacgaatccatcttttttgatggaagctcaatcatccgatcgtctagagcccgctattctggcattttaggaaatttatatttagcaacatcatttaagaataatattaaactatttacgcgacttcagcactctttgaagccaatgagtggaatttatctaaaaaaacatttatttgatgacgcaaatgggaacgggtatcacgaccaaggatctccagatgattttccagtacccgatagtatttctaccttaaatgaatttcaaattaatgaaattcataatccatatagatttggagttggactacaaaaagggttcaataaattgaatacaatttcgattgaatattcatcttttgaagaaaaagctaatctgaataataaacttataattccagctaatgattggattaaaaagtctcaggatttcactttttcagtcgctcggaatccgaataatttatcttcagactggaaggataaattttcggtaaaaacaggtttagtttataaatcccacaaactttcacattccaatattaagataactgaaataggtggggcattaggattaggttttaaatttaaagctgtcggaaatcagtttgacgttaattattaccttggaaaaagagattattctgaaaaatattctaccgaatatgtacaacaattacaatttggagttagtttagcagatcaatggtttgtaaagaggagacaaaagtaaccatgaataaaatgaagattattacccttttatttggggcattatttttaacaatgtgtgtaccccctgaaggtggaaatcagaatcttnnaaaagataaagcaaaattagattcattaagaaaagttcgttgcccaagattgatgagtagtgccgcagaatattatagaaacagagattggaaacaaactgttaggatttatgaagaaattacaacattagattgtgatgagtggaaccccgtttttgcaccgccacaggaaatctaccaatattacgccattgcgtatgagcaaatggggaaatttgatagttccgaattcgtattattagatggtcttcaaaaattaccagaaagtgttgaattaagaaaaaggcttgcatattcttataaacgccaaggtaaaaaagaaaaagagattatcgaatttgaacgaattatagatatggctccattagatatttccattatgaatgatttatcgaaattgtataaagatgaatctcgttttgatgatcaaatatatattcttgaaaaaattcttaaggtagatggaagtaacgaaattgcccaaagtgaattggcaatggctttcgaaagtagtggtaaggatcccttagatgtttatcgtaaacgatacgaagataatccagaaaatttgagttatggtttggattatgcagatcgattgactcaagtggatcggagtgcggatgctactctagttttagatggcgtaattcgtcaagatcctactagcaaattagcctatcgaaaactagcggaagctcataaagaaacaaataatttgaaaaaagccgcaaatgcttatgaagagttattccaaattgatcctagggatggacgaattgcagttgatatttcagatatctatattgacgttggcaattatagtaaggctttacggtgggcagaaaaagcaatgagtttaagtaatggcaacggcagtggattaggacaaaaagctaaagtttatttttatggttgggatactttcagacaaaatccattttcaattaatgatagaatagttgcaaaacttgcttatgattattttgtgaaggcggaagataaagggtttcttgggtttaccaaaagaggatggctagaagaaaattcaaaagacattctctatgggaaggcncaatggttcatggctgatgatagggtaaaaagaacccgcagtatttctccaacttcatcgaattatgattgggtaacagaacatttaaaagccgaacctaactggaaataaatatgtcacatctagctcaacacgattctgagttattccatatccttggaaaagaaatccaccgagaagaatcgactcttgagctaatcgcttcggaaaactttacgagccaatccgttatggaaatggctggcggcgtcatgacgaataaatatgctgaaggatatccaggaaagcgatattatggtggctgtgactttgtagatgaggcggaaaatttagcacgggatcgattgagcgaattgttcggagctgaatataccaatgttcaacctcactccggttctcaagcaaatatggctgctttaatgacctttattaaacccggcgatactgttttaggtttagacctggcccatggtggtcatttaacacatggaagcccggttaacttttctgggcaactttacaattttatttcatatcatgtgtccagagaaacaggtcgtgttgattttaatgaagttgatcgattggcaaaagagcatcaacctaaattaataatttgtggtggnagtgcttatccaagattcatagaatttgaaatgtttaaagaaattgccgataaangcaatgcttttcttatggctgatattgctcatcctagtggactagtggcagctggattgcatccatctccaatgccttattgtgatgtagttaccagtacaacncataaaacgcttcggggacctcggggtggcatcatcatgatggggaaagattttgaaaatccatggggaaaaattgcagcaaaatcgggtcgagttanaatggtctcagaattaattgattccacagtaatgccgggcatccaaggtg

SEQ ID NO: 260 - DNA, 4000 bp, Escherichia coli
  misc_feature (266)..(266): n is a, c, g, or t
  misc_feature (439)..(439): n is a, c, g, or t
  misc_feature (460)..(460): n is a, c, g, or t
  misc_feature (514)..(514): n is a, c, g, or t
  misc_feature (829)..(829): n is a, c, g, or t
  misc_feature (844)..(844): n is a, c, g, or t
  misc_feature (1111)..(1111): n is a, c, g, or t
  misc_feature (1987)..(1987): n is a, c, g, or t
  misc_feature (2000)..(2000): n is a, c, g, or t
  misc_feature (3422)..(3422): n is a, c, g, or t
  misc_feature (3902)..(3902): n is a, c, g, or t
agtgatagcacacaacaaaacttaaataactcaataatatgggaataaaagcgccaataagtatttgtacaggtaaaaggttaaaactaacctgcccaaatgaaaacaacaaggcacttgccagtaggctactcaaaatggctagccgccagcccaatattaaggtggctgcagtaataccaagtatgtgcaggtcaaggccagttaaaataccggctttaatacgccacagtagtgcaaatacaagcgcacaggctaatacaccngtttgcctagcagacgttttataaagcgatttataggtgtttttgtcgaaactaaaaatcgcaatagcaagtacaaggacccacatcagcccttgtatttcagtgtttaacattatagctacttgaacgttgaccaaattggcgcatgatctgatggtttatcaattgcacgnagctcatagtcaattcctgantcaatacaacgctcagcaagtgattgagttgcaagcacaacatcaattcgcagnccgcgattatctaaaaagcctttagagcggtaatcaaaccatgagtattgatcgttaacatcaggatagagttctctgaaggtatctttaaatccccaatctaaaagtgttgatagccattgacgttcctctggttggaaagagcacttacctgtttttagccagcgtttagcgttgacctcaccaatacctatgtctaaatctgtaggtgatatatttatgtcgcccataacaactacatcctgatcgggagtgaggtttgtatctagatgtgtcatcaaatctttataaaattgacgtttataggggaatttngtttcgtgattgatnttatcgccttgcgggaaataaccattcataacggtaatgtcgcgaccgttatcttgttcaatagtgacactgatcatgcgcttttgcgactcttctgtgtcggtagcaaacccttttaagaccgattttggctcttttttgcataacatagctacgccgtaatgtgctttttgaccgtgaaagtagacgtggtaccccattttttgaacatcgtctaatggaaacgcttcatcatgaactttaatctcttgcaagccaattacgtcnggttgatgtttatcaataacagcttgtaattggtgaagacgagcacgcagaccattgatattgaaagaaatcactttcattcgatttacctttaaatttgttctcattttgatagcaaattgtatcagtaatttagcttacataacatgtctgaaatgacaaaatagctgcgcaaatgttgatcaaatggtggtgaaagtttaaacattgttaatgttgtattaatttataaaataaataaaaaattcaattgatctgcaaaaaattggctatataatgcgcgcaaattcattggcaaactcgttcacataggatctctcatgaaagcacaattatttttagcggcaacattattagcatcttcttctgtttcagctcaaagtaacacttacttcagccaagacagctctattgagtctaagctgtgtgtattaagcgcaaacgaaggtttttctgcagcacgtaaattagcagctaagcacaatgtatacttatcacgcttctcacaaagcatcatgtgtaacggccaagatattcgtgatattgcaaagaaagattcaacaaacaacataactgaaaacaaagtagaagtgtttgctaaagatgctcaacaagaaactcaattatgtatgactgcattaaagcaaggtttagcgccagtacgccaaaaaataggtaacttaaactcgcttaaatgtaacggtcagaaagttactgactttgttaagcgttatcaaaacgctgcaatttaattagcacgacaaaattaatgagagcccagcttttacagctgggcttttttttgcaaaatttacaaggttggttgaaaaggtttcaaggctaacgtattgaaaatagaataaataataaacaggntttctgtaaggtnctgaaatttatatttattttattttggcaccagacttgtattagttgttgtgacatttattaacaacgaaggacacgtcttatgaaaaagttaacattagcaacaactattctagcaacattaagtttagcagcctgcgcatctaatcaaggtcttgataaaatagacagcgactttgcaagcctagacaacgacagtgatggttttatttcaaaagttgaagctgacgacgataatatttggggtcacttttcaaatatcgacaccaatatggatgaagaaattagtcgtaaagaatttaatgcttacatgcagttaaacactggcaaggttgcaaccgatagtgatgtaagtgaatcagcctttaaagctgaaattgcaaaatttgacaaaattgaaagtagttttgccagtttagataacgatagtaatggttacatatcagttgttgaaggcaatgacgacgatatttcaaatcactttggttatatggacaaaaacgaagacaagcgaattagtaaaaatgagtttatgggctacataaataaatatggtaaatctgtagctgaagacgaagcgttagagtcaattaaacacagctaattaaaattcagaacataaaaatcaaagccagttattttaactggctttttttatggctaattttagataattgccagatatattttcctagttagtggttgttctgtcataatagatggctgtgtatttttatttattaagagtgtatatggctgggcggcgaattagtgatgagcagttggttgaaatcattgaggctgcgatttttgttgcagacaaacccataagtaaacgccatattaaagacactgttttagtggatattgcaatttctatgtcacgtataaacgaggctatagaaacaatacaaacacactttcaaacccgtggtattcgccttgttgaagttggtagtggttatcgatttcaggcgtgtagtagtttgagcccttggttgagtaacctatggcaagaacgagctcctaaatactcacgtgctttattggaaacattatcacttattgcttatcgtcaacccattacgcgtggtgaaatagagcaagtaagaggtgtaacaacgggttcgaatataattaaaaccttactcgaaagagagtgggtgaaagtggtagggcacaaagaagtaccgggtaagcccgctttatacgccactactaaacaatttttagattatttttcattaacgggtttagaaaacttacctgcgttacctgcgcaacaagaaagtaaaataaaccagttattaagtgatccttctgtgagagaaccatccgaatgaatatacaaggtgaaaagttacaaaaagtcctagccagagctggtgtaggctcgcgtcgtgaaatggaaaaatacattgangctaaccgtgttagtgttaatggcaaagtagctaaactcggtgaccgcgttgaagaaaccgatttaattcgtgttgacggtcataccgtaaaaattgaagaaaaagctgacagaatttgccgtgtaattatgtacaacaaacccgagggagagttgagtacacgtaaagaccctgaaggtcgtcgtactgtatttgacagacttcctcgtattgatggcgatcgttggatagctgtaggccgactggatgtgaatacgtcaggcttaatgttgtttaccaacgatggtgaattagccaatcgtttaatgcacccaagttatgaagtagagcgtgaatattcttcgcgtgtgtttggtgaagtaacaaacgagacacttaaaaacctgatgcgtggtgttgagcttgaagatggtccagcaaaattcacaaatataaaaccgctaggtggtgaagggattaaccgctggtttaatgtgacnttaaacgaagggcgcaaccgcgaagttcgtcgtttatggcaatctcaagacgttgaagtgtcgcgtcttatccgtattcgttacggtaagctagagct

SEQ ID NO: 261 - DNA, 4000 bp, Escherichia coli
  misc_feature (1986)..(1986): n is a, c, g, or t
  misc_feature (2297)..(2297): n is a, c, g, or t
  misc_feature (2371)..(2371): n is a, c, g, or t
  misc_feature (2618)..(2618): n is a, c, g, or t
tccaacagagggagtatcattattttttttcatctcttctattttatttttaatttctgtagaagattttgtgcttttaattatgtctgtaaatcgggaaaaatatgattcaattatatcaagatcaatctctttattcataagcattctctgaaggataagagatgataaataagaatcattattttctacaataaaactttcctcatattttcttaacttatctttcaatgactcaaattgactgttcagatcactcataagaagagtatctctcgcaaaattagcatttctcatttcagattgaaccttgtttaattcaatataaaaatctttagtttttagtttgtatgtactaaagtcatcatttgatttagttcccaacactctggaagttcttaaactgtctttatacactttaacatttatagttccaggttcaataactacaggaaggttttctctttgcttgtcaaaaaccacgtagtgcatttctgggacagatattgaatctgtgaatgaaaacttaccttcaaaaactttagttgaatctacaacaaccggcaaattactttcaccaagttttaccaaaaaaacatttaaatcttcatcatgatttgtttcagcatttatagtaaaggtattatttgaacaaccgtatgagataaatagaattaataataaataaatatattttttcattggagtttgaataaaatttaactttgacaaatataatatttaaatattgatagctatcaatgaaagttataagtgaaattgttaatgaaattaagttaattacgggtgataaacatgtaataactagcaaatggggaaaagaaccgtttagcaagggttggagatatggagagggtgaaacattagctgttgttaaaccaggtacactattagatatttggaaaattttacagaaatgtattgaatatgacgttattgtaataatgcaagctgctaatactggtttaactggaggttcaactccttttggaaagggttacgatagatcaattataattataaatacattaagaataaaatctattcatgttattgaaaatggcaaacaaattattgctcttcctggaagtagtttatatgatttagaaaataaacttaaaccatttaaaaaagaaccacattctgttattggttcaacttcaattggagcttctattgtaggaggggtttgcaataattcaggtggatctttagttcacagaggaccagcctatactgaattagcattatatgcaaaagttaataaggatggtaagctagaattaattaacgagttagatataaatctaggttctagtcctgaggagattttatttaatttagaaaacaaaaattacagtgattcagatattttaaaatctaaaaagttaggttcagatgataaatactctgaaatagttagaggagttgaccaaagcactccagctcgttttaatgcagataaaagattattacattctgcttctggaagtgctggtaaaattgctgtatttgcgttacgtttagatacatatgaagctccgaaaaaaagtaaagtattttatgtcggttctaacaatcaagatgatttttggaaaataagaaaagatattcttgccaattttaatgaacttcccagacttggagattacatgcacagggattgttacgatgctgcaaaaaaatacagtaaggacacatttgtagtaattgaaagacttggaacaaactttttaccatcactttttgaatttaaaagaattgtggacatcatagcagagaaagttaaatttctccctgaaaaattttctgataaactaatgcagtttttaagtaatttttggcctaatcatctgcctaaaaaaatggaactttttagaaatcaatttgaacatcattggataattgaaatgaccgacaaaggtattgatgaagctgaggcttattttaaagattttttcaagnacaaagaaggtgatttttttatatgtaattctaatgaaggaaaaaaagcaatgcttcacagatatgtttcagctagtgcaattggtagatatcaagcattaaataaaaaaaatattggagaaatgatgtctttagatatagcatttccaagaaatgaaaaaaactggttagaaactctaccaaaaaaaattaatgataaacttgaattaaaattttattacggtcatttgttttgtcatgtatttcatcataattatattctaaaaaaaggggtcgatgctaataaattaaaagaagaattgttaaaaatntatgacagaagaggagcacaatatcctgccgaacataatgtaggtcacgaatacaaagcaatgcctgttcttantgagttttataaaaatttagatccaactaattttttcaaccctggaattgggcaaactagtaaacttaaaaattggaaataaccttttattagctagtcttttttatgaaatattttaaacctatttttgtttaaaatttaataatggctggaaattcatttggtaacatattcaaactaacaacatttggagaatctcatgggccagcacttggtggtgttattgatggatgcccacctggaatanaacttgatttagattttattgaaagtgaaatgcaaagaagaaagccagggcaatcttcaattgttactcaaagaaaagaagaagattctgttcaattttacagtggaatatttgaaggaaaaacaaccggaacgccaattggttttttaattcataataaagatcagaaatctaaagattattctcatataaaagacacgtatagaccatcacatgcagattttgtatatgataaaaaatatggtcacagagactacagaggaggaggaagaagttcggcaagagaaacagccagtagagtagtagctggagcaattgctaaacaaatacttgaaggaatcaaaataactgctcacgtatcctctgttggagaaattaaggttgatactcactattcaaaattagatttttctaccattgaaaataatcctgttagatgtgcagatccaaaaactgctgttgaaatggaaagtttcataaaacaaattagaaaggaaggtgatacagttggaggagaggttagttgtgtcattgaaaactgtccaattggtttgggtgaacctgtatttgataaacttcacgctgaacttggtaaagccatgttatcaataaatgcagttaaaggttttgaatacggaagtggttttgatggctcaaaattaaaaggaagtcaacataatgattcatttaattctgacggtaaaacagaaactaataattctggcggaattcaaggcggaattagtaatggaatggatatctacttcaatgtagcatttaagcctgttgcaactattatgaaatctcaaaaaacaatagattccaataataatgaagtagaaatgaaaggtaaaggaaggcacgacccttgtgttgttcctagagctgtgcctattgtggaagctatggcagctttagtattagttgattatttacttattaacaaattgtataaatagttcaaaacgaactattaattaatttatatttatacatatctcattatatattttaggttttataaaattaaaaaaaacctaactaaaatatttgtaccaactaaatataaaaacattcttcttttaaaacacccagaacctaattattatacaccattattcagacccataaagaaaaaaagggtcaaacactatatttaaattgttaatatacagttgtttaagagtgttaaaatatataactactattaagtattttgattgctttaataattgatttagatttaacaaaaacttttataattcatgttaaataaaaaaaaaataatcatttctataataatcgttttattgtttggagtttttttaaattataattctgaacaaaatatagattataattcagttagagaattacataaa

SEQ ID NO: 262 - DNA, 4000 bp, Escherichia coli
  misc_feature (1587)..(1587): n is a, c, g, or t
  misc_feature (1987)..(1988): n is a, c, g, or t
  misc_feature (2509)..(2509): n is a, c, g, or t
tgataatgaaggtaattcactaatttttctttgtgccatttatttctccaatatttgttttaacattcccttgatttgggaaatatcatgttccaatctatttatacgcttttgatttgtttcttgctcaatagctcgatttcttgcgtttaaatattcattataacccttaccatctttattaatgatagcgccggatctattatctttcttatattttaaatccattatgcagtagcaatggctctaaagtctctaatataaggtgttttagtctcatcagtagatgacaatacaattctaatagtaaatgaggtaaactcagacataattttataagtcggctcatattcccattccatccaaccgacattctctacacgttttctagtaaacttagtactcgtcttacgttgcataggaatccaagcaaattctgtggtggttaaacccgaagaagtaatcttaatgaaaggaatctttaaccataagtctaaatgttgtgtaggatcgttggtagaaccacctgatacagcggcaagggcaatatagaattcaccatcgacggaatatttaacaatatcacctgcaatataatccaatgcagtgtcccacaccgtagaatcatctagatcatattcacaaatccaagaacctgtaccatacacggtagtatcatcgacattaccaagatacatacgatcgcgggcaggtcctggaatgatcttgccttgacaatatgctcttgccgcggatgggctaccttgaggtgtattacccgccggtatagcacttacagtagtgtatgtagaatcatatgtgtaaacatacttacctttccagtaaccaataatatcggttaggttataagcattggtagtaatatccactctacaatgacggaaaacattattacctaaagagaaatatacatcaatgtctcttccggttgtatttaactcagacatgaatacactcaattcagaggctggatcatccagttcaatagtcttggtgaggtaattaccatagtaagcacctgtaccttcctctacccattctgtactattatcaacatctgcaagtaatgtacaatccgattctgttgtgataccatcatagatctcaccagtaccaatctgtttacatacatattgtgttaggccagagttaacgatgttttggaaaccaagacggtctttattaacaatagcggaagtattttcagaagaagtcttcatgattgctttccactccaccggttgtcctgcgccaaagttataagcagagtccaattctttattggtcctgttagtaaccgctacataatcggattgactaggaaacttagcgtaccaatcaatttcagtaccttccaataacatctcttcagccgataacataagaatatgtgccgcttcctgtgatgcaggatctgcagagaacgccaccgaagcatcgcctgtattgaatgatgcgcgcattaatctaaatgctacatcccttgtttggtccggcgtccatgttctattattctgtgacatgaacatactacccagagtaggttgttgtgaaatacgagcaccntcaccagaagaagtcttttcaaacccacccaatttagcgacccatacttcatattctgtagtgtcggtcttaataatgaaacaatactctgtattattcataagatatacaggagaatcgaaagtaaatttagtcgcaatgttattataatcatcgtttgatgcaaggaatgcatcattatccgcccacccaccttgagtcaatatctcagccggagtcatattcttttgagagaatggtataattgcaggcccaggaaaaccattaatgacttccctaatttcaaccgctacaggtagatcaacggctaatctgtggaaccataactccaatgcagttacataaacaccaccttccataccttgaataaggaatgtttgtgccagtgggtcatcgccanncggattccacctccgtgttacaatttcagatgatgcagatgatgataaatgtctttcttcattaatctcttgtctactaccagtgatagtagttattgaagcaaccgtctcttcgtgagtggttgctataccgttggctgtatatttagatattgccgctgttgttggttgttcgtctctatcttttaattcaaattctttaacaccaacactataagtaccggccgggatattgaatgtaccagaaatagaacctgatgaatcggtaacattattaccagaccagacaacatttgatgatatatcaacaccatcaaaataaggaatcataagagtgttaggtcttaactgtgtggcttcaaatatgatagccctagccctcatccaaggtactaatgatacatcaataactctatcacctagactttccgtgcgagtattctctgcaaaacttcgttgaataccaacccttgattggtccattgtagtggtggtggatgttctgatccccgcttcgccantattgccattcactcttgaaaattgtgacatagaagttgaaacaccaatattatttgtctgccatgagttccattctgtattccaaccattgaagcttccaggaaatgccgcttcccaagcccctctattacttcccatatcaacgactaaattagcgttgcggctagtatccacccattgatctgtttcaggacttagtgtgatagaaccattccaaaggaatgttaagaatcttacaacattctctgtttcagatgctttactttgatctagtagaattacatcatcatctaaaatttcgtttgtgataccgacacctgttatactattaccagtagaagatgcattatccaatgaatgttcgtgtgtaccaatagtaaatggtaatcttaaagcagatgaagcagggtcaaccgctactagataatctggatgatttacatcacccacaccatgacctctaaagttatctacaacaataccatttttgaatcggtcaagaccatactcatctttaatatccatattaatagcgctttgctctaatatgcttaatgctgtatagtattccacattttcaattcttccttcaagatcttggatgtcattcattgtgtatcgtttgttatccacaaactgagtaccaatatcggaaagattaaatgtatatgccggtattaggaagttatataatggcattgcagtctcaggtacagaaggcacttgaggattaatatctggaatacccttaccaataacgaagttgccggtactttccaaatataatatatcaatacgcggaaggtaatggaagaagtcgaaagtaatatcatcttgaacatgaggaatctcaatgaatgaagtattaacttggttatagtctggacggaagtctaaagaatctcttagattaaatatagaaccgccggtttcagatgtgtaagaaccaatagcttcatattcagtattatccgaaggtgtttcttcgaataacataccggatggaactgtatgatctgtaatatatgagttaaccgcaaatacatcgccactaccatgagcataatatttatatgcaacatcgatagtagaaggtggtgtaccacccgcggtgtgtgttaatataccctgttcgtatgtataatccctttgaccattatcaaatgtataatcagtaacagaagcccatgcaacaccgtcaattgaagtgatctcaatgatatctgtatgagccatagtaaacttagtactcgcgccagtgattgtctctgaagcgattgtagtattagtcttagatcttacatccattgtaatctgtggacgtgcaataacttcaaccgtaacaccgcttaagtcaccagtgattgtaaatacaatcgccgtagaaccagcgcctgaagtatatgtagtgtttacaaccactgatgtatccatgcgcgccgcttgaataatgctttgacttgagaatgtacccgcaagatcagttaatg

SEQ ID NO: 263 - DNA, 4000 bp, Escherichia coli
  misc_feature (1)..(2): n is a, c, g, or t
  misc_feature (8)..(10): n is a, c, g, or t
  misc_feature (12)..(20): n is a, c, g, or t
  misc_feature (26)..(31): n is a, c, g, or t
  misc_feature (35)..(43): n is a, c, g, or t
  misc_feature (46)..(53): n is a, c, g, or t
  misc_feature (56)..(63): n is a, c, g, or t
  misc_feature (68)..(68): n is a, c, g, or t
  misc_feature (72)..(74): n is a, c, g, or t
  misc_feature (78)..(82): n is a, c, g, or t
  misc_feature (85)..(85): n is a, c, g, or t
  misc_feature (88)..(88): n is a, c, g, or t
  misc_feature (95)..(96): n is a, c, g, or t
  misc_feature (99)..(102): n is a, c, g, or t
  misc_feature (105)..(105): n is a, c, g, or t
  misc_feature (108)..(109): n is a, c, g, or t
  misc_feature (112)..(116): n is a, c, g, or t
  misc_feature (121)..(127): n is a, c, g, or t
  misc_feature (139)..(139): n is a, c, g, or t
  misc_feature (143)..(145): n is a, c, g, or t
  misc_feature (148)..(157): n is a, c, g, or t
  misc_feature (164)..(170): n is a, c, g, or t
  misc_feature (173)..(179): n is a, c, g, or t
  misc_feature (182)..(183): n is a, c, g, or t
  misc_feature (186)..(186): n is a, c, g, or t
  misc_feature (189)..(194): n is a, c, g, or t
  misc_feature (197)..(200): n is a, c, g, or t
  misc_feature (203)..(204): n is a, c, g, or t
  misc_feature (207)..(208): n is a, c, g, or t
  misc_feature (211)..(216): n is a, c, g, or t
  misc_feature (221)..(226): n is a, c, g, or t
  misc_feature (229)..(236): n is a, c, g, or t
  misc_feature (240)..(243): n is a, c, g, or t
  misc_feature (246)..(248): n is a, c, g, or t
  misc_feature (251)..(251): n is a, c, g, or t
  misc_feature (254)..(256): n is a, c, g, or t
  misc_feature (259)..(261): n is a, c, g, or t
  misc_feature (264)..(266): n is a, c, g, or t
  misc_feature (269)..(273): n is a, c, g, or t
  misc_feature (276)..(278): n is a, c, g, or t
  misc_feature (281)..(282): n is a, c, g, or t
  misc_feature (288)..(290): n is a, c, g, or t
  misc_feature (293)..(298): n is a, c, g, or t
  misc_feature (301)..(305): n is a, c, g, or t
  misc_feature (308)..(315): n is a, c, g, or t
  misc_feature (323)..(323): n is a, c, g, or t
  misc_feature (330)..(331): n is a, c, g, or t
  misc_feature (335)..(336): n is a, c, g, or t
  misc_feature (341)..(351): n is a, c, g, or t
  misc_feature (359)..(360): n is a, c, g, or t
  misc_feature (363)..(375): n is a, c, g, or t
  misc_feature (378)..(380): n is a, c, g, or t
  misc_feature (383)..(386): n is a, c, g, or t
  misc_feature (394)..(394): n is a, c, g, or t
  misc_feature (399)..(399): n is a, c, g, or t
  misc_feature (403)..(411): n is a, c, g, or t
  misc_feature (424)..(424): n is a, c, g, or t
  misc_feature (427)..(434): n is a, c, g, or t
  misc_feature (437)..(437): n is a, c, g, or t
  misc_feature (442)..(445): n is a, c, g, or t
  misc_feature (451)..(453): n is a, c, g, or t
  misc_feature (456)..(460): n is a, c, g, or t
  misc_feature (463)..(463): n is a, c, g, or t
  misc_feature (467)..(469): n is a, c, g, or t
  misc_feature (472)..(472): n is a, c, g, or t
  misc_feature (475)..(475): n is a, c, g, or t
  misc_feature (478)..(479): n is a, c, g, or t
  misc_feature (482)..(491): n is a, c, g, or t
  misc_feature (494)..(496): n is a, c, g, or t
  misc_feature (499)..(503): n is a, c, g, or t
  misc_feature (508)..(508): n is a, c, g, or t
  misc_feature (510)..(510): n is a, c, g, or t
  misc_feature (512)..(512): n is a, c, g, or t
  misc_feature (519)..(520): n is a, c, g, or t
  misc_feature (525)..(527): n is a, c, g, or t
  misc_feature (530)..(535): n is a, c, g, or t
  misc_feature (538)..(538): n is a, c, g, or t
  misc_feature (545)..(545): n is a, c, g, or t
  misc_feature (553)..(555): n is a, c, g, or t
  misc_feature (558)..(558): n is a, c, g, or t
  misc_feature (561)..(567): n is a, c, g, or t
  misc_feature (572)..(572): n is a, c, g, or t
  misc_feature (575)..(579): n is a, c, g, or t
  misc_feature (582)..(585): n is a, c, g, or t
  misc_feature (589)..(590): n is a, c, g, or t
  misc_feature (595)..(599): n is a, c, g, or t
  misc_feature (605)..(606): n is a, c, g, or t
  misc_feature (612)..(612): n is a, c, g, or t
  misc_feature (615)..(616): n is a, c, g, or t
  misc_feature (623)..(623): n is a, c, g, or t
  misc_feature (626)..(626): n is a, c, g, or t
  misc_feature (631)..(631): n is a, c, g, or t
  misc_feature (635)..(639): n is a, c, g, or t
  misc_feature (644)..(645): n is a, c, g, or t
  misc_feature (647)..(647): n is a, c, g, or t
  misc_feature (649)..(656): n is a, c, g, or t
  misc_feature (660)..(661): n is a, c, g, or t
  misc_feature (666)..(672): n is a, c, g, or t
  misc_feature (679)..(679): n is a, c, g, or t
  misc_feature (686)..(690): n is a, c, g, or t
  misc_feature (694)..(695): n is a, c, g, or t
  misc_feature (699)..(700): n is a, c, g, or t
  misc_feature (711)..(711): n is a, c, g, or t
  misc_feature (714)..(717): n is a, c, g, or t
  misc_feature (722)..(724): n is a, c, g, or t
  misc_feature (732)..(732): n is a, c, g, or t
  misc_feature (749)..(749): n is a, c, g, or t
  misc_feature (881)..(881): n is a, c, g, or t
  misc_feature (1316)..(1316): n is a, c, g, or t
  misc_feature (1418)..(1418): n is a, c, g, or t
  misc_feature (1616)..(1616): n is a, c, g, or t
  misc_feature (1845)..(1845): n is a, c, g, or t
  misc_feature (1979)..(1979): n is a, c, g, or t
  misc_feature (2048)..(2048): n is a, c, g, or t
  misc_feature (2478)..(2478): n is a, c, g, or t
  misc_feature (2547)..(2547): n is a, c, g, or t
  misc_feature (3146)..(3146): n is a, c, g, or t
  misc_feature (3228)..(3228): n is a, c, g, or t
  misc_feature (3232)..(3233): n is a, c, g, or t
  misc_feature (3238)..(3241): n is a, c, g, or t
  misc_feature (3245)..(3250): n is a, c, g, or t
  misc_feature (3252)..(3254): n is a, c, g, or t
  misc_feature (3256)..(3266): n is a, c, g, or t
  misc_feature (3269)..(3269): n is a, c, g, or t
  misc_feature (3273)..(3274): n is a, c, g, or t
  misc_feature (3276)..(3287): n is a, c, g, or t
  misc_feature (3289)..(3293): n is a, c, g, or t
  misc_feature (3296)..(3296): n is a, c, g, or t
  misc_feature (3298)..(3298): n is a, c, g, or t
  misc_feature (3302)..(3302): n is a, c, g, or t
  misc_feature (3306)..(3306): n is a, c, g, or t
  misc_feature (3308)..(3308): n is a, c, g, or t
  misc_feature (3311)..(3311): n is a, c, g, or t
  misc_feature (3313)..(3314): n is a, c, g, or t
  misc_feature (3320)..(3323): n is a, c, g, or t
  misc_feature (3325)..(3326): n is a, c, g, or t
  misc_feature (3328)..(3335): n is a, c, g, or t
  misc_feature (3337)..(3337): n is a, c, g, or t
  misc_feature (3339)..(3339): n is a, c, g, or t
  misc_feature (3343)..(3346): n is a, c, g, or t
  misc_feature (3348)..(3348): n is a, c, g, or t
  misc_feature (3352)..(3354): n is a, c, g, or t
  misc_feature (3356)..(3357): n is a, c, g, or t
  misc_feature (3359)..(3359): n is a, c, g, or t
  misc_feature (3361)..(3366): n is a, c, g, or t
  misc_feature (3368)..(3371): n is a, c, g, or t
  misc_feature (3373)..(3373): n is a, c, g, or t
  misc_feature (3375)..(3376): n is a, c, g, or t
  misc_feature (3380)..(3380): n is a, c, g, or t
  misc_feature (3382)..(3385): n is a, c, g, or t
  misc_feature (3392)..(3395): n is a, c, g, or t
  misc_feature (3397)..(3404): n is a, c, g, or t
  misc_feature (3408)..(3408): n is a, c, g, or t
  misc_feature (3410)..(3411): n is a, c, g, or t
  misc_feature (3413)..(3413): n is a, c, g, or t
  misc_feature (3415)..(3421): n is a, c, g, or t
  misc_feature (3423)..(3427): n is a, c, g, or t
  misc_feature (3430)..(3431): n is a, c, g, or t
  misc_feature (3433)..(3433): n is a, c, g, or t
  misc_feature (3436)..(3436): n is a, c, g, or t
  misc_feature (3438)..(3441): n is a, c, g, or t
  misc_feature (3443)..(3443): n is a, c, g, or t
  misc_feature (3445)..(3446): n is a, c, g, or t
  misc_feature (3448)..(3490): n is a, c, g, or t
  misc_feature (3492)..(3509): n is a, c, g, or t
  misc_feature (3511)..(3532): n is a, c, g, or t
  misc_feature (3534)..(3540): n is a, c, g, or t
  misc_feature (3542)..(3542): n is a, c, g, or t
  misc_feature (3544)..(3548): n is a, c, g, or t
  misc_feature (3550)..(3552): n is a, c, g, or t
  misc_feature (3554)..(3577): n is a, c, g, or t
  misc_feature (3580)..(3583): n is a, c, g, or t
  misc_feature (3585)..(3591): n is a, c, g, or t
  misc_feature (3593)..(3593): n is a, c, g, or t
  misc_feature (3595)..(3597): n is a, c, g, or t
  misc_feature (3599)..(3634): n is a, c, g, or t
  misc_feature (3636)..(3651): n is a, c, g, or t
  misc_feature (3653)..(3656): n is a, c, g, or t
  misc_feature (3658)..(3658): n is a, c, g, or t
  misc_feature (3660)..(3673): n is a, c, g, or t
  misc_feature (3675)..(3682): n is a, c, g, or t
  misc_feature (3684)..(3694): n is a, c, g, or t
  misc_feature (3696)..(3708): n is a, c, g, or t
  misc_feature (3710)..(3710): n is a, c, g, or t
  misc_feature (3712)..(3715): n is a, c, g, or t
  misc_feature (3717)..(3717): n is a, c, g, or t
  misc_feature (3720)..(3722): n is a, c, g, or t
  misc_feature (3724)..(3730): n is a, c, g, or t
  misc_feature (3732)..(3745): n is a, c, g, or t
  misc_feature (3747)..(3773): n is a, c, g, or t
  misc_feature (3775)..(3784): n is a, c, g, or t
  misc_feature (3786)..(3802): n is a, c, g, or t
  misc_feature (3804)..(3820): n is a, c, g, or t
  misc_feature (3822)..(3825): n is a, c, g, or t
  misc_feature (3828)..(3828): n is a, c, g, or t
  misc_feature (3830)..(3836): n is a, c, g, or t
  misc_feature (3839)..(3857): n is a, c, g, or t
  misc_feature (3861)..(3879): n is a, c, g, or t
  misc_feature (3881)..(3888): n is a, c, g, or t
  misc_feature (3891)..(3892): n is a, c, g, or t
  misc_feature (3895)..(3898): n is a, c, g, or t
  misc_feature (3901)..(3902): n is a, c, g, or t
  misc_feature (3904)..(3912): n is a, c, g, or t
  misc_feature (3914)..(3918): n is a, c, g, or t
  misc_feature (3920)..(3928): n is a, c, g, or t
  misc_feature (3930)..(3933): n is a, c, g, or t
  misc_feature (3935)..(3954): n is a, c, g, or t
  misc_feature (3957)..(3958): n is a, c, g, or t
  misc_feature (3963)..(3969): n is a, c, g, or t
  misc_feature (3972)..(3975): n is a, c, g, or t
  misc_feature (3977)..(3990): n is a, c, g, or t
  misc_feature (3992)..(3994): n is a, c, g, or t
  misc_feature (3997)..(4000): n is a, c, g, or t
nngggccnnntnnnnnnnnncccaannnnnngggnnnnnnnnnccnnnnnnnnggnnnnnnnnggccnaaannntttnnnnnttnaanggggaannggnnnnttnggnnggnnnnnttccnnnnnnnaattccaatttnaaannnccnnnnnnnnnnttttccnnnnnnnaannnnnnnccnnccnttnnnnnnggnnnnggnnggnnttnnnnnnaaaannnnnnccnnnnnnnncttnnnnttnnnaanaannnttnnnggnnnaannnnnccnnnccnnaaattnnnaannnnnnccnnnnnaannnnnnnnttccaaanaaggttnnaaannttggnnnnnnnnnnntttttttnnttnnnnnnnnnnnnnaannnaannnntttccttnggttngggnnnnnnnnnttggaaaggaaanaannnnnnnnggnaattnnnncctttnnnttnnnnnttnaaannnttnttnccnnaannnnnnnnnnttnnnggnnnnnggaangntnttttttnnggggnnnccnnnnnnaanaaaaaanaaaagggnnnaanaannnnnnnaaccnccnnnnnccnnnngggnnccggnnnnntttttnnaatttnttnncccaaanttnccaanaaannnnnttccnncncnnnnnnnngggnnttttnnnnnnnggttaanttttttnnnnncctnngggnngaaaaggaaanggnnnnggggnnngggaaacnaaaaaacacggagaacngtcggcgagaccgttctccgtgtcgaatgaagtcagaagcgtgccgagaattgcacgtcgaaagtgttgtagtcgcgatcggctccggctcgatcgtgcgtgtgggtgtagttgagctggaacagatagttnttgcccagacggtagttggaggagaatccccaattggttttcagtccttgccaggtgctggcgtcgtcgcggtagcagtcccagcgaccatagagtttcatgcgttcgcaaccggggacgggcacaccggccagcacgtaccaaccatcgctctcgttggcgccgcccttggtggtgctgccgtggctgtgcacatattcgccgcgggcatcccaacgaccttcatacttgaaaccgagggcgtagcgcttgcgctccaaacggtgggtgggattggcggggtcggtgaaacggccgttccaaccaaagccgccgacggaaaggccatcgatcggacaaacccacaaaccgccgatgagatccttgaaatgatcgatgtcggcgtggttgatgccttggccgttgaagagaccgacctgatagtgcaggaatttncgaccgctcgaaaggggaaggaggtcgcccatgatttgcacacccgcgtcgcgaccgttggaggtgtgttcgccgatgcggtcgttgaggctctgcaatttngaggcgacctgcgagaagctgccgagaccgacggcaagaggcgagaggggtttgtcgaagccgaaggggcggtggaattgaccgatgcgcacttggaattcggggtatttgcgcgattcgacataggcatcgagcagacgaggacctcggtcgacgccgggagcgccactcatctcgagttgaaaccggtagaagacntcgcgccacacatagccgctgccgtagaggcggaggtagcgcatggagaaattgctggcggtggaggcaccctgacgatcggtgacctcaaacttggaagtgaggtagcctccgaaggtgatcgagggtttgaaagcgggaagactttcgggcgtttttgcctgcgctgcgctgacgtgtgcgaggctgtcggccggtgtgagacgggcattcggcgtttcggccggtntggccgcggctgaaccggcacacaacgtgcctaagaaacaaagaaacagagttttcatttggagctaaacggtttgtcatgcaaaattatgaaattctcgagagatatgcagcggaagaaaagagaaaagcgtntgcagacccacctctcagcgctcgagaaactgcataattggcatctcatatacaattgagagaaagaangacgtggactttcaacctgtttttgcaatctatactatcaaaaaagagggaaaaggcttggtgtctcggcgttttctgactacatttgcaagtagaacaataaaataagaataaaacaagcatcctcatggaagaaatactcgaaaagccttatgtgatcgggctcgacatgggcggtacgaactcggtgttcggcatcgtggaccaacgcggcacgattattgcgcaaacggccatcaaaacgaaggcctatcctgatgtcaaagactatgtgaaagcggctgtggaagcgctgcaacctgcactcgacgtggtgggcggcatcgacaacatccgcggtatgggtatcggcgcgccgagcggcaatttctataatggtacgatcgaacgcgcggcgaacctgatttggcagggcattgtcccgatctgngacctcttcgaagaggcgctcggggtaccttgtcgggtgacaaacgatgccaacgcggcggccttgggngaaatgacctacggcattgcacgcggcatgaagaactttatcatgatcaccctcggcacgggtgtgggttcgggcatcgtggtggatggtcgcgtggtgtacggttcggatggtttcgccggagaactgggtcacgtggtgatcgaccacacggaagccggacgcgaatgtggatgcggacgcaaaggctgtctcgaaacgtactgctcggcgacgggtgtggcgcgcacggcacgcgaatttctcgcgaaaagcgatgcgccctctccgctccgcgacttggatcccgaatcgatcacctcgttcgacgtgttccaagctgctgaaaagggcgacaaaatcgctttggacgtcttcgaatacaccggtacgctgctcggacgcacttgcgctgactttgcgaccttcaatacgcccgaggcgtttgtcttcttcggcggattggccaaggcgggcgaatatctcatggaaccgctacgcaaagcgtacgacgaaaacgtgctgaagatcttcaaagtgaaggctatgctcctcatttcgaccctcaagggttcggaagctgccgtactgggcgcctcggcgctgggatgggaataaanctcccctcctcttccccttcttcttcataacggattttacgctcccccgttgaagcttgcgcttcggcgggggatttttgtntttnnccgcnnnngggnnnnnnannncnnnnnnnnnnnacnggtnngnnnnnnnnnnnngnnnnncangnaaangggnangtncnnaaaaannnntnngnnnnnnnntntnctcnnnngngggnnncnnangnnnnnncnnnncncnncaangnnnnaaaaaannnntnnnnnnnncggngnncncnnnnnnntnnnnntanngnggngnnnnananngnnnnnnnnnnnnnnnnnnnnnnnnnnnnnnnnnnnnnnnnnnngnnnnnnnnnnnnnnnnnngnnnnnnnnnnnnnnnnnnnnnngnnnnnnngngnnnnnannntnnnnnnnnnnnnnnnnnnnnnnnnttnnnncnnnnnnncncnnntnnnnnnnnnnnnnnnnnnnnnnnnnnnnnnnnnnnncnnnnnnnnnnnnnnnncnnnncncnnnnnnnnnnnnnncnnnnnnnngnnnnnnnnnnngnnnnnnnnnnnnnanannnngnggnnnannnnnnngnnnnnnnnnnnnnnannnnnnnnnnnnnnnnnnnnnnnnnnntnnnnnnnnnnannnnnnnnnnnnnnnnngnnnnnnnnnnnnnnnnncnnnnggngnnnnnnnggnnnnnnnnnnnnnnnnnnncccnnnnnnnnnnnnnnnnnnncnnnnnnnnggnnaannnntgnngnnnnnnnnngnnnnncnnnnnnnnngnnnntnnnnnnnnnnnnnnnnnnnnggnnggggnnnnnnnttnnnngnnnnnnnnnnnnnncnnnctnnnn

SEQ ID NO: 264 - DNA, 4000 bp, Escherichia coli
  misc_feature (379)..(379): n is a, c, g, or t
  misc_feature (494)..(494): n is a, c, g, or t
  misc_feature (521)..(521): n is a, c, g, or t
  misc_feature (540)..(540): n is a, c, g, or t
  misc_feature (544)..(544): n is a, c, g, or t
  misc_feature (773)..(773): n is a, c, g, or t
  misc_feature (801)..(809): n is a, c, g, or t
  misc_feature (811)..(813): n is a, c, g, or t
  misc_feature (815)..(829): n is a, c, g, or t
  misc_feature (831)..(832): n is a, c, g, or t
  misc_feature (834)..(835): n is a, c, g, or t
  misc_feature (837)..(838): n is a, c, g, or t
  misc_feature (840)..(842): n is a, c, g, or t
  misc_feature (845)..(850): n is a, c, g, or t
  misc_feature (856)..(857): n is a, c, g, or t
  misc_feature (859)..(865): n is a, c, g, or t
  misc_feature (867)..(867): n is a, c, g, or t
  misc_feature (870)..(871): n is a, c, g, or t
  misc_feature (873)..(874): n is a, c, g, or t
  misc_feature (876)..(878): n is a, c, g, or t
  misc_feature (991)..(991): n is a, c, g, or t
  misc_feature (1008)..(1008): n is a, c, g, or t
  misc_feature (1177)..(1177): n is a, c, g, or t
  misc_feature (1269)..(1269): n is a, c, g, or t
  misc_feature (1928)..(1928): n is a, c, g, or t
  misc_feature (1982)..(1982): n is a, c, g, or t
  misc_feature (1985)..(1985): n is a, c, g, or t
  misc_feature (1995)..(1995): n is a, c, g, or t
  misc_feature (2199)..(2199): n is a, c, g, or t
  misc_feature (2496)..(2496): n is a, c, g, or t
  misc_feature (2583)..(2583): n is a, c, g, or t
  misc_feature (2589)..(2589): n is a, c, g, or t
  misc_feature (2625)..(2625): n is a, c, g, or t
  misc_feature (3674)..(3674): n is a, c, g, or t
ggataacgaggctacccagcgcgcatcggattctttcaaattcagggaatccatcaacacatagaggtcgccttccacttcgtcgacgggcagcagatgtcgaaccgccctcgcaagcaactcgcgaaccaggaaggcttcgtcgggtagtccggcttccgaaatgacccgaacgtaagaatgatgcgaccaaaagtcgcgaagggtcgaacgaattgaatcgtggcatggatggcgctcgatggccagtgtcatctgcgaaaggttttcggttcgcgattccgcgggcacattcaggatggtgcggagcaggccatacacacgggtggcccgctctcgtgtagagagagactcaagattggaaagactatctattgcngaggtaatactggctccatctcgcccgaaaaaagaatatgcctacgtataggaacagcaggataattgaaatcgagaagtcggggtcaatttcgataataagtgccgcggtgtancaaggtctctacgccttcgaccacgcngccaatgttacctttatcncaanccccgcgtattcctgctcttctggcctggtcggcaagttgaggggacatatgcaatgtcaccataagaatcggaacttccggagagcgtcgcgtgatttccttggcagcgtccagaccattcatctcgggcatttgaaaatcgaggatgactaagtctggcgatgtttgctgcactttgtcgattgcttctcgaccgtttgacgcctcacaacagacctgccatgaacnttgttgttccaacatttttcgcaggcannnnnnnnnannngnnnnnnnnnnnnnnncnngnntnngnnnggnnnnnntttttnncnnnnnnncnaannanncnnnacctcaacctacgagccaggcttaagcctgtctataccccgcatcgcgtaggttgataagggacttatcaactttcctcgattctcctaacggtttatgggtagtgattaggngatatccgccagaacgncaaaaaggacttcggcaaatgcaggctagtggcccgtgaagaactcggtcatatcaggcgcgactcctgctaaaccgggaaagctgttcactccagaagcggcgaggacgaggcgcagcacgctttgatgctggtaaaccgccttggattgaaagccccgcttggctgnggaactgatgatgagggtagcgacttgcccgccaccatggctaatatcagaccgatcgccttcatcgaatgtgatgatgagcaggccgctgntctgaaactcagaattggagattagagggccgatgttagcttgcagccaagagtccgcctgggcgagtgtgccgtcatgagcgtcgtccatggtgttgggtgtgatgaaggaatattgaggaagagtattattcgccagatcggttgcgaactgcgtaaagggaacaaccttggcggcctgggaggcgctgtcctgcacgtccgataggtaagtgaccgggttgtggcgacgcaagtagacgccagaatcagcacccacataaccgggggaagggagcgattcagcgtaagccttccaggtcttgccggctttcaccaactcgcgaacaacgttgtcatcgttgatggtgccggagaagttgtcgtcgagagtttccatgaggcccgtagtgagcatcaggtaatttggaatcgagggatgcgcgtcggcaaaatattgagtggcgagtccatatttcgaagccagactgttgaaataaggcatggaggaatttccgattacgtcggagtagctgtgattttcctccaccaccagaatgacgtggctgaaagcgggttggttggccgaaacgggggtttgaaccggaagggggccaactcccttaccacctccgccacaaccgaacagaattgaagcgaaaccacaaacagacaaaaangcgataacagtcttgagcctggacaagggtttaggctttcagtaacacggattnctntaaccgcttngatgtggcaaggcggcgaaatgtttacaagaaacgcagctacttgccctggtgtgccggatctgattgcgggctgaggtcgaggccaaattgaggatgcccataggttccggtgatatggatcggtaccacctcgccttttttctttttcttgaagatcgggtcgatagctttcagaaataacgatttcacaccggttgttgtntttgagatcttggtgtccacccgcattcggccgtgcagatcgattttttcgtttatgagattgtaggttccatacatgcgcgctttcgcgccaggaatgccgaatgaaagatcggagaattgggcgattccgccatccagcgagactcgtcctttcagatcagtcagaacagtctcggcatcgtccattttttcgcctctcgcgccagcgctcaattcgttcacgttcttttgggtctccggttttgagaagctaccgtcgtcaataccaaaagtgccttgcaacttgaccttttgnaggaaagattcctctccagggggaatctggaccttggcccggagtgcgatcgctccggacatgggcgacggacggctgttgacaaanaagccnaggatgtcctcgatttgtccctgccgagcatttagntcgaggagcgcagactttcccttgctgcccttggtgcctgcaacactgccttccacgatcagtttagttctaccgaaacggccttcgattcgtttcaagaacgtatcgccatggatggcgtctacaaatgcgttgtaccgggtctcgagtttgaccttgtggccgcccatcttcacctcgaaatcgggaacatcggtaacgcctgcaatgtcgatgtgcttaagtgctccgctgtattctcccttggaggacagtattcccgcgatgcctccgtaaacgccaaggtcggcgtgttcaaaggtatattcgccagaaatcggagtttcacccggcttgcctcttgtccagactccaaatttgccgcgggtagaaatttccccaggaggctcggggttatgaaacttcagttgataatccataggtcgatcccaccttacatcgcgcacgtccgcatcatggacatcgaagcgcagtggttgtttccgcggatcgtcttggaagaactctacggtcgttccgttggccacaatttcgtcgacgacaatgctggagtgctgcgtctgaaaggtcacgttgctgccaaagggcggaatgaatacatgaccgccttcggctctgatgcgcggaacttgtttcgtcagaatgccagaatagctgccctcaatcgtcagcttgtcgatggtaatcagagtccacttatcggggccatggtgaaactcaacgtcttcgagaatgcatcccggagaaggaaaataagtaagatgagaacctcggatcgtcaccgtgctgtcgctggcttccgccagatcttccacgaccgccttctcggtaaagggccaaacgcggctccataagatggcgagacccgtcgcgacacagatcgccacggctgcaatgatgatgatgactcgcttcccgcgggagaattttggcgatgattgatgcaccgccgggtttcgaagttccgggggcgaagcggcattcgttaggacaggtgacgacatcaatcttggactccgaaatacccgtgaaatgttggtaaattagtngatgatttcttaagcaggcccgctacgtttcttgcgggcagcgcttttcgcagttgaccttttgctaggagaagcggccgtcgaactggctactcgtctttcactagccggtttggcaatgcgctgctttgtcgcccgactttggcgagcgatgattgtcgctttcttgactgaccggggccttctggagccaggcttcggcggaggttgggactcttttggtctcaagtcgtttgtgagaatgtgagccatgttcgccagggtgccggcggcttggcccaacttgcgcgccaccgagtttagtagaggttcctgctgcgtcgatt

SEQ ID NO: 265 - DNA, 4000 bp, Escherichia coli
  misc_feature (1)..(6): n is a, c, g, or t
  misc_feature (11)..(11): n is a, c, g, or t
  misc_feature (16)..(18): n is a, c, g, or t
  misc_feature (23)..(23): n is a, c, g, or t
  misc_feature (25)..(27): n is a, c, g, or t
  misc_feature (31)..(31): n is a, c, g, or t
  misc_feature (37)..(37): n is a, c, g, or t
  misc_feature (51)..(51): n is a, c, g, or t
  misc_feature (148)..(149): n is a, c, g, or t
  misc_feature (151)..(151): n is a, c, g, or t
  misc_feature (171)..(172): n is a, c, g, or t
  misc_feature (178)..(178): n is a, c, g, or t
  misc_feature (199)..(199): n is a, c, g, or t
  misc_feature (515)..(515): n is a, c, g, or t
  misc_feature (833)..(840): n is a, c, g, or t
  misc_feature (843)..(844): n is a, c, g, or t
  misc_feature (852)..(856): n is a, c, g, or t
  misc_feature (860)..(860): n is a, c, g, or t
  misc_feature (864)..(864): n is a, c, g, or t
  misc_feature (868)..(868): n is a, c, g, or t
  misc_feature (873)..(875): n is a, c, g, or t
  misc_feature (878)..(878): n is a, c, g, or t
  misc_feature (880)..(881): n is a, c, g, or t
  misc_feature (885)..(887): n is a, c, g, or t
  misc_feature (892)..(892): n is a, c, g, or t
  misc_feature (895)..(897): n is a, c, g, or t
  misc_feature (900)..(900): n is a, c, g, or t
  misc_feature (1989)..(1989): n is a, c, g, or t
nnnnnnaaacnccccnnnaaccnannncccnggaagnagcaccttgacttntacatccgccaatccaccaattcaccaaccgggaattaacccgctggcgcagcttctacggggtttcgccatagattttttaaccgcgcataataanncngttgtagagcgcatcatggnnccaagntaccgcctaaatattggcggngtagtgtttgatgggcgcgacgatgaatatttacccgcaacagctgcccagcttgagcagtttccggggctcaacgtcactgtgcacgacgttgtcattggagagaacgcaatagcaatgtgctttaccgagcacggctcgtcaattcaggatgaagggcacagggcagcctggagcggcatcaccttctttttcacagacggcgagcgctttgttaccggttgggctgaagaagaatatatcgcgagaaaacggcaactaaccttgggccaatgcgaagggattgagccaccccatatcgcgccatgggatacanaggcgcaagccagtaaccccgaaaacgaagcaattgttcgtcaatggatagcccatagccacccgttaaaggacatcccgaacaatcatcgcctatcaccactggaccccgacccagacggtcttgtcgatatccgaggctctagggtaaatgcgctcttttcagcgggggatagggtagtggttcacgccgagtatcacggtatttatgctggcggatttggggacctatctccgctattaattggctgtcaagctgtactccgctttgccgccatagtcactattaggagtggcgagattatagcggctcgaattnnnnnnnnccnnttggggcnnnnncgcncccngagnggaannnccngnnttcnnnttttnttnnnaangggggctttgcgcttgctggccgccaccttctttttctgcacacccgctttaggcggtgcatttttagcagttacagattttttcttagcaaccgccctcttactcttagcgggattcttgtttgatccacgcttggccgcatcggttgccgcaaaagcaccgtcggcaggtgccgaatcaatcatcccagccaaagctccggactgcagacctgccgttacgagatcggcaaacatggcgcctatttgttcggagggcacttttgtctttccgggaacaaaccagcgattagtccagttgagcataccgataatgccaaagcccactatcctcgctgggccaatattgcgaaaacttccatcacgatagccctcttcgatgatcgcagttaccgcctcatcgtagtcgtggttgattttcttcatttgtttagcccaggcggaacgcttgtctgagacgtggttcaagtcctcacgaatgtagatataaagcaatggataggtcgccgtataagacgccattaactccagaatcagggttctcagcttctcgcttggcgatacatcgctttgctgtaccgctttcgccttttcgacgttatcaaccgatgcctctctgataacctcatcgaataattcgtcttttgacgaaatgtagtaatagatggaagcgcgatcaatctggagctcctcagccactgcgctaatcgttgtgccctgaaaccccttctcattaaatacccgcgccgcagcaatcgctatttcttctctgcgtcgctgataggtatccgatgactcgggcttagctttggctgctgcacgccttttaccgatattacttgaattctttgtcactctaccgccttagaagtctgttaacgcactgttgaccataactctagcaggccggactctttatttcgctcttagtttgtactgagacaagtagcagccgtaagagtcagacgcgccgtcatttaagcgactataaatcacgcactggccaaaaaatacgactataagacagccatgtatttttgtcatcagcactgttgacatcttgttctaccgccattattgtcaacggcnatgttgatattattcagatgtgcggtccagtaagtacccatacataatgcgagagtaaataataatgaagaattctatggttagagtgttacatagcgcagtgatctgcgcgtcgggcctagcagccagcagcacctgttatgcccaagaaagcgagacagttctggcgcttgaagaagtcgtcgttgttgcacgaaaacgagcggagaacctacaagaagttccggtatcaatcacggccctcaccggcgagcagctcaaaaatcaaggtgtcttcaatacctctgatcttaacaactccatgcccaacttaaacgtaagctcatcctatggagaaacacaaccgaacttcaccattcgcggcattggtgtgggtactgaatataattccaacgcagcgtcacccaatggcatctatgtcgatgacgtttatcaggcgtttcgcgccagccacggccagcagctttatgatctggctcaaattgaagtcctacgtggcccgcagggaacactttatggccgaaacacaactggcggtgcgattaatttcaccacgatgcaaccacagtttggtgaaacacaaggctacatcacagctggatacggcaactacaaccgcttcgaaactacgggcgccatcgatttcactccctcagagaatctggggattcgaattgccggcacctacaccgagcgtgatgcttacatcgagaatcggctgccagcgggcccagttcaggtcaacccaaacttaccaggcccgtcttatgggtatacaactgagggacgagattctggaggtggcgacactttcgcgttgcgatttaatgcacatttagatttggacagcctcaatgtgcgattcaaagcctatatgagcgaagcgagtggcgaccaagacagcccccagaaccaaggcgaaggtggctttatcgcggtgtcgcgtggtgcgtttggcgggctatacggcatagggttagacgactttttaccgcccgcatatcctggtgatcgcgtgaatgatctagagatcgaggccgatactatcggtggcgctaaggttgagtccgacggtgtcgtgttaaacgtttcttacgatatttcagacacgatcacactgacatcgataactggatttgataacagctactacggacttctgcccaacatcgattgcgatggcaccccctactacgtttgcgcaatcggttatgagtctgatatggaatcctttaaccaagatctccgcgtgaattttacgagcgaccgcctaagtctgatcgtaggcttgtattacggggacgatgagattgttactaacaaccgacccaatttcttcggttttttgagtgacaccaatgccgcattgggtgcaccgacgacatactttaatccgggcggtgcccttggtttgggattaccgacaccgtttcgcgcaacacaagattacactcaaaagcgtgagtctttagcgatctacggggaagcgacctacgatgttaccgacaagctgtcagtgactgtgggcttgcgcagtacgcaggatgattttgcctacgtcgatgcactaaccaccttctttgatgatgccggcgacgcgcgcgcctactttgtttctgattatctgcctggtgtggcgaatgggttctatttattagacgaagcttgttcagctgacggtgcaacttgtgtcccagctagcaccggtacagcaggaccactcaaccagtcagatgactctaagcaaacaactggccgagtgatcgtagactacaagcttatggatgacgttatgttgttcgcgagttatagcaagggatatcggggcggtacgtataacggtttagctttccaaagtgcggcgcaggtttacttcgtggaaccagaagtcgtggatgtgtttgaagcgggctttaagggtcgcttcatgaatgatcgcattcaattaaacgctacagctttctactacgactacgaaggccagcagcaacaggtgatcgaccccagctcc

SEQ ID NO: 266 - DNA, 4000 bp, Escherichia coli
  misc_feature (1586)..(1586): n is a, c, g, or t
  misc_feature (1990)..(1990): n is a, c, g, or t
cgccgccgatgtcgacgggatcgagcaacgccacgggcgtcagcgcgcccgtgcgcccgacctgaatttcgatggcgcgaagcgtcgtcacggcgctcatcgctgtgaatttatgcgctatcgcccatcgaggttgcctcgcatccgcgccgagcgcggtttgaagttcgaccgagttgaccttgtacacgacgccgtctatctcgtacggcatcgtcgggcgagctatttctaaagcatcgtacgcctcgatgagctcgccgatggttttcgccacgcctaaaaatggtacggcgtcaaagccttgcgctggcaagaacgcactcaagaactcgctctgcgtccgccacggagcgtttgtctcctcgtttgacgcgccgacggcgccccaaccgtacgccaaaaaacgcaacggcatttgattatcgtcgacgacgagcgttcgcatcgctcccgccgcggcgttccgagcgtttttgaagacgcgcaaaccagtcgccgcgcgctcggcgttcactcgttgaaaatcttcatcggccacgtgcacttcgccgcgaatctccaacaccgccgggtacggctccgccaacttcatcggcacgccccgagcgccgatgaggtgtcgcgtgacgtcttctcccatctcaccgtcccctctcgacaccgcgtacaccaactcaccgttctcgtatcgcaagctcgcggaggcgccgtcgactttcggctcggcgcaatattcaatcgccgtcgtcgtcgcggcctcgccctccgtctcccctctcaacttctcaacgcgcttcatgaacgcctccacctgccccacgtcgaacgcattccccaacgaccgcatcggaaccgcgtgcgcgatcttttccagcccactcgctccgtccggcgtcgcccccacgcgcgcgcgagcgccgcccgccttcgccgccgtcggatgcgccgccgcgatcgcatcgtacctcgcccgcatcccatcgtactccgaatcgcttatcaccggttccgcgtcgttgtaatactttccatcgtgcatcgcgagctcggcgtccaatcgagccaactcgcgcgccgcctcgctcgcgctcaaccgctcgacgccgttcgccgcgaacccgcgcgtcgtccctcgtccgctcgcgctcgcgcctccgtcccctccccgcgcgcgccgcgcctctccatcgtccacgtcatcgcttcgcgcgtcaccgatcgcgcgcgcgcgcgcgccggcgcggtaacgcgcgcgtctcgttcgaatcgaatcggcgcgcggcgtcccgagttcgcgtcgctcgcaccgcgcgcgcgccgccgggaccgcgctcgccgcgcgcgcgcccgccggcatcgcgcgccacgcctcgatcgcgcgcgcgacgctcgcgccgagcgcgcgtcgtcgcatgcacgacgcgaagtgcgcgcgatgccgcactcgatgccgcgcgacgtcgcgtcgtcggcgtcgtcgcgcgccgcggcgaagaaccgcgccaagcgcaagcgcgcgaggctgccgccgccgcccgccgcgcgcgcggacgcccgggatgacgacgcgcgcgcggacgagngcggcgaggatgacgacgcggtcgtcgcgcgcgcgggcgcgttcggacgatacggcgccgccgacggcgcgatgtcgcgcgcggacgacgagtgggcgacgagcgagcgcacgtgggcgtcgctgttcggcgtgctcgagcggaacgggtacgcgaagaagaaattgtgggcgccgttcgtgtacgacggcgacgcgggacggcggatgcgaagcgcgggattcgaacgcgtggtgcacagacgggcggatttctttgaacgcgtgcgagacggcgtgttcgtgcggtcgctggatgcggtggtggataatccgccgtacacggggaaagggatgaaggaacggatattgaaggcgctgcgagacgcggaggtgccgttttgtttgttgctgccgctgggagtnttgcacgcggcgttcgtgagggacattctggaggagacgcacgtgcaggtgatcgtgccgaggaagtgttacgtgttcaagaagggagggacggaggtgccgtttaagtttttgtgctggttgtgctataagatggagctgaagcgcgacttgtacttcatagactgacgacgtaggggtacagtagggattttgtattttacacacgttgttgtaccgactaactcggagggtgcccggcgcaaagcgaacgatactcgcgacggatcagtccgtgtccgatttcgaggagtaaatcgttaaagcgatagagcacgccgcacgacgtcgaatcactcggcggtaagactgaaatgcgtctgagcgtttcgttcggggcgaacatcgcggtgagggtgaggaacagcaagacgaccgaaacgatgatgaagaacgtgacgagcatttgtacggcttcgttgagtgtctctggacgcgaaggcacgcgccacgaaccacctggcgttcgcgtcggtgccgtcggcgtcgccaaggtgaacttattgaacaagttgtttggcggcgtgcgcgccaccgttctgttcgtttgtcgagagaaccattttaacggagacgccaactgcgtttgcatgagtggcgacccaaacgatctgctcttcttcggtgaaatcaatgaagggctgttattttgatagcgagcgagctgcgtccgagcgtgttcgctcatcttattcgccgccgccagggcttccttggacgctttcaattcagcttccgtcgcggcggagtgtttttccagccaaactttcgccgcgacggcatcggagagttgcgactctaagtcgcgcgtcatgctcttcgcttcgtctcgctcagcgcgtactttgcgtaattcgtcgtagtcgccctcctgcgtcatcgacgcgtcacgtctagcggtggcgagcaactcgttcgcgtgctctaattgatgctgcaagctcgtatagttggctcgaagctcggaaattgattctcgagcttgtgataactcgtgttgtttatcgtccagcgctttgctcaacgcctcgctggcgtgatcgccgctcgcagacatttgtcgaatagtatcaagctctttacgaatcaccaacatctctttatccttcgactgcaccgcatttttcacagcattcttcacttgcgcggcaaacgccaagcgttcaagttctaaacgtttctccatgctcgtgattgactgctggagcaaatctcgctcggcggtgactttcgtcaagtctatggtcaagtctttcactttcgccaacgccgcatcgcacgaagccttggcttccctcaactcgcctgcatccgtctttgaatgctttttcgaagcgactttttccttttccaactctttgttcagcaaaagcagttcggtattcacttcgtacactcgagattccgccgcggcaaattgacgtcgcacttcttcgagttcagtctccaccgtgactcgcacttcgcattcagccttcaaacgccgctcgctttcgtccagtgacttcttactctcctctgcgctcgccttccactctcccagttccttggcgagttcgactattcgactttcagccgcctctaactttctatgcaattcagcgacgacggcggacgacgagtcgcggtcgcgctcaaccttcgcagaggacgcatttttctctcgcaaaatttcaatctccttgttcaaaaagccaacttgcttttccaactttgtgacttgcgaattggcgatcatgttagcctttgccgccatggaagattcaagttcgtgctcatccgccatcgatgaaatttcttgctcagcgacgtgcagcttttttctcagctcttctgtctccgatccggccaaatctgcggcggtttccaagcccgctactttcccttctaacgacaaaacctcttttctcgcactcttaagttctaaaacgtgctctgaacgttcgacctccatgagttttagtttagcgt

SEQ ID NO: 267 - DNA, 4000 bp, Escherichia coli
  misc_feature (211)..(211): n is a, c, g, or t
  misc_feature (262)..(262): n is a, c, g, or t
  misc_feature (974)..(974): n is a, c, g, or t
  misc_feature (1986)..(1986): n is a, c, g, or t
  misc_feature (1989)..(1989): n is a, c, g, or t
  misc_feature (2456)..(2456): n is a, c, g, or t
  misc_feature (3137)..(3137): n is a, c, g, or t
  misc_feature (3175)..(3175): n is a, c, g, or t
  misc_feature (3227)..(3227): n is a, c, g, or t
  misc_feature (3849)..(3849): n is a, c, g, or t
attgccttcccaacaggatgtagctaatatggctgggacgactcgagaaactgtgtcacgtacctatagattaatggaagaggatggctatgtcaagcgggagggtcggaagcttgttatcttgtattttaaacggttcttgagtgatttttcctgaatcaggattcgtaacatccccgacatcatatccctaggttttgatcatattggnattttcaggacaacttctctggtggaataaagtgataccctaacttatatnaaaacctcgtcaaccagcgttttgtttatagacatttaagatagttggagcgtaatattgcgctgcttgaataataactgtcctgggtaagagctatgaaacacgttctaatcagtttggtactttttacaactgttatttttccctctcgaattatttctgggcagaattcaattactgcccataccatctcagacagtgctcatgaggctcgttctatctttgcagccgatgtagatggtgatggggacatggatgtgctctctggtcattataacattgcctggtatgaaaatgatggttctgagagtttcaccccccataccatatcaacatcggcggcttcatctgtttatgcgattgatttggatgatgatggggatatggatgtggtggggtcatccgccggtagtgttgggtggtatgagaatgatggttctgggagtttcgccacccataaaatctgcaatcattattatcatcgcgagttcagatctgtctatgcattggatgtggatggtgacggggatatggatgtggtgacggcttcatattcgcccaatgacaagatcatgtggtatgagaatgacggttcacaatatttcaaccaccatatcatcgcagacagtgtaattggggctcgttctgtctctgcagccgatatagacggtgatggagacatggatgtactctctgggcataataacattgnctggtatgagtatgacggtttagagagtttcaacactcataccgtcgcaacctcaggtgtttcatctgtctatgcggtagatgtggatggtgatggggatatagatgtggtaggatcatctgctggtagtgttggttggtatgagaatgatggttttgagagtttcaccacccgtaccgtctcaacctcaggagcttcatctgtctatgcggttgatttggacggtgatggggatatggatgtggtgggatcatccgctggtagtgttagttggtatgagaatggtggttcagagaatttcacaactcatatcatcacaaccgctgcagatgatgcacaatctgtttatacagcggatgtcgatggtgacggggatttggatgtgctatctgcagcactcggcgacagcaaaatttcctggtatgagattaattattcccctgttgctaatgatacagctataacctcgagcgaggatagagattacactggaatgttatcagcatctgactctgatggcgatgcattaacatatagtatcataattggtccagccaatggaagggcgacagtatctgataatgccacaggtacattctcgtaccgcccggtggaagactatacagggctggacagccttatatttagcgttaccgatagtgtgctttcggatatagcaacggtttcaattacggttactgcagtaaatgatgcgccagtagcggttactgcagcagtgacaaccgaggaagatatggattatggtgggttagtatctgcttttgatattgataatgatccattgacttacagtctactaactgagccatcgcatggtacggtagctattactgatagctcagctggtacatatacctacagtcctaaagtaaattataatggcagtgattcatttacctttactagcagtgatggtacgctttcggatacatctaaagtttctattacagtaactgctgtaaatgattctccagtagcgtttgcggaaagngtnacgaccagtgaagatacaaaatacagcggatcagtatctgcttctgatgtagaaaacgatatattgacatataatattctcaccaatccatcaaatggtactgtatcgattaccaacagttcattggggacatttacctacagccctacgataaattataacggagatgattcgttcacattcactgccaatgattataattattcagatacagcgacggtttcaattacgatcactgcgtggaataattatgcgccagatcaattaccagcagttcatttgggtaatttacctgcagtcctacggcaaattataacggtagtgtgtccaggtatttacctatataagatacaaactggtgaatacatgcggaccaggaaaatggtgctgttgaaatagtttcattaaataggtaaacaacatcaagccccgcccacttgtccagcgtaacgcagtgcagatggagnggggttttttgtttatggacatttagtactggcgggttgtaatattgctcttcaaggagggtgaaatgaacgaaaattatgatttcgtaatcattggtgccggttctgccggttgtgtgctggctaaccgactgagtgccgatggtcaaaatagcgtattgatcctagaagccggccggaacgataaaaaacaggatatacatattcctgctggtttcccaaaacttttcaagactgaatttgactatgattacttgacgacaccacaggcaaccatgaaggaccgggaattgtatctgccccggggaaaaaccctggggggatccagtagcatcaatgccatggtctatatccgtggcaatcgacaggattatgatgaatggagtgccctgggcaatgagggatggtcgtacgatgaggttcttccatacttcaagaaggcagaaaaccaggaagtgatcaaggatgagtaccatggtcagggtggaccactgaatgtaaccaaccgcaattacaccaacccgttgtcagatgtattcgttaaagcagcgcaggaattggattatgatttcaatcctgattttaatggagcgcagcaagagggattcggatattaccaggtaacccaaaaaaacggtgcccgctgtagtacggctgtggcctacctgcaccccgccgctncccgcaaaaacttaactattgaagtcaatgcgcaggtngagcgcatcctgatcgaaaacgaacgggtaactggtttgatctaccaccggnatggagaagcacacgaagtacaggccaataaggaagtgctcctgagcgcaggagcctacaacagcccccagatcctgatgttatctggcattggtgatggagaagaattaaaaaagcatggaatatcggtagcaaagcatctacccggagtgggaaagaacctccaggaccatatggtttatttcactattttcaattcgagctacaaggattctctggattcagcagaaaacttccctgtggtggtgaaaaacttgctcaactaccttcttttcaaaaaaggaccatttaccagtaatattgccgaagcgggtgggttcgtccagtcttctccggatcaacctgctgtggacacacagttccactttggacccaattactacgtagaacatggttttagcaaccctgaaacaggcaacgggtattctattggaggtgaattactgaatcccaccagtaagggaacagttacattgtcatcctcagattttaaggccaaccctgtcattgaccataattacctcagtactgacgatgatgtacaacgatctatctggggatacaaggttacagagaaaatcggtttagccgaggccttcaaaccttatcgttctggttactntatgccggaagagccgctaaccgatgataacgctattgaggatctgattcgggaaaccggagaaactctgtaccatcctacaagtacctgtaaaatgggtacagatgatatggcggtggttgatccagagttacgggtgcatggccttacg

SEQ ID NO: 268 - DNA, 4000 bp, Escherichia coli
  misc_feature (282)..(282): n is a, c, g, or t
  misc_feature (1127)..(1127): n is a, c, g, or t
  misc_feature (1354)..(1354): n is a, c, g, or t
  misc_feature (1385)..(1385): n is a, c, g, or t
  misc_feature (1944)..(1944): n is a, c, g, or t
  misc_feature (1988)..(1988): n is a, c, g, or t
ttagcttgctgtaaagcaggtcatccctcgtaacttttatgtggcatttccctcgattcaagctgcggcaaaacgatgagcgtaaatgcggttgaaggacgttcaagcctgcgctgagacatataaaagcccctaaataagtatctgcataagatcacaatagtgatcgatacctgtcgcgatagagcctcccagcaagcagaatttcataaagtacagtgcctcaaagcaccgttgaggcggcgtgatattcgccggaaggatcaagacttgggtggggtncaaacccagatagtatcttttgggcgtcaaatgacaaaactgccgctgttttgataacgcgcattcaaatggacgtcacaaggatcagacaatgcttatactcgagctgtaaaatgggctcgcagcgtcaattgagtttgacatagcaatcccaaaatgtagggttttgaggggaagaaaaagcttattggtttttgtgatggcacgcccgtttgatttattattgtccgagcttcggactgtttatgaaaaccatcaagagctgacggcttttgcgccgttctgccaagatgtcacgactcagaagatcgaaccaaaaccattgctatgtggacagggattggcacgtgaaaaaaatgaattttttgacacgcaatatcagccactttgcgaggctgtggtggcagcaggagcccaagcgcgttggcgcgaaacctataaacataccaaggtcgggcaagattttttagatcgatttgggtgctttacaatcattggtcccgaaggaggctttcaaagcggccaactttgggcgtgggccgtatatatgccaccccatctatattacccctggcacgagcacccagccgaagaaagctatttggtgattgctggtgaggccgagtttatgcgggctgggcaggcgccgcgttttttaaatcccggagatgttatttttcacgccgcgcagcaaccgcatgctttgcaaacgcatgaagctggggtgttggcgctggtgttttggcgcaacggctttgggatcttgcccgtgctaagcgaagacccgtcataaagcgcatcagaagctgtaaggcctttcttatatcagaagatgaattggattnttaagggtcacgatcctcaagatggtgcatgggataaagccgatgcatcagcctgataacccagatgcaagcctttcaggttggcattgattgtgctacctcctgtcacaaataggctgaatggccccgtggctcaactggatagagcagccccctcctaaggggcaggttgcaggttcgaatcctgccggggtcaccattttttataagataaacgttttatgctnttttaacgtcataggttaaatatgaagaggnttcttagagttatttctttgactctggcgcacttttgttacgcgccgcatattgtttgatgaacgggtttagaagtatcgccaaagtcacacctattagaacacccacaaaatccgcccaaaaatcagagaaatcgccaaaccggtttacatagggttggatgagttcgatagcgccgccaaaaagcagcgcgaggggtgcgatcacgaggccggttttcagccgcaccatcagcataggcattaccagcaaggcaaagcctgcggtgtgaagtagcttatcggcaccctgaggggcaagtttgcccgctccgggtgttagggtcgtggccgcgatcacaacagcgatgcacagcgtagtaaaaagggcaagattttgaagattaccgatgcgttttataaatgatatcatagcgtgacccgacttgagtagatgctttatcggatcctaagctgactgtaaaatgccctatatttatcttttggcgtttaaggccttgatagcagcacaagcggtttaagcctgcaggctcgcggatgcgctgttacaacggtttganatctttaggggttgccaccgtgttgtgaaaactttattcacganttcacctcggggcgcctttttggctgagacgcattttgcgaacccgtcgaacctgaaccggttaagaccggcggaggaaaggtcagcttcatgctacacgctctccgcccgtcgcaaatatggagagaacatgaaatacttcacattcgcagcgggtctgttcactgccagcatgacgttggcacagactccgatacttacaatttatgcaccagattattttgcgtcagaatgggggccagggcccgcgattgaggccgcttttgaggaaagctgcagctgtgacttgcagtttaaaacgggtgatgtcatgtcgcggatcattctggagggtgagcgcaccgaggcagatgccgtgatcggtctgaacacagatattacaaaaaaagcgcgcgaaacgggtttgttcgcggcccatggccaagacaatgcgcagcttacattgccgatagagtggagcgatgaaatattcctgccgttcaactatggccatactgcgtttatctacaatactgaaaaagtggccaacccgcccgcgtcttttgatgcgttggtgaattccggcgcagacttgagcttggtgatccaagatccgcgcagctcaatctcgggcttggccttggtgctctgggtgaaggcggtctatggtgagcaagcagaagcagtttggcaaaagcttgcgccgaaaattctaaccgtcaccaaaggctggtcagaatcatatgggctgttttcagatggcgaagccgatatggtgctctcttacacgacctcaccggcctatcatattgtggcggaaaacgatcttaccaaaaaggcagcgatttttcccgaagggcattatttcatggtcgagttggcggcgaaaatagcatcgacagatgtgcccgatttggcggatgcgtttttggctttcatcatgacagatcaattccaaaacataattccagagggtaattggtctttgcctgcagccctgccaaaatcgcaatggccgcaagcgttccaagacttgcctttgcctgaaaaagtgttgttctattctgaagaagaagccgcaaacctgcgcaaagagacgattgaggaatggcgccgcgcattgtccaaataagcacctcagcgctgatttgtagctttgtacttctaccgcttttggcggtttggggtcaggcggatgggcctaccggcttggggcctgcagattggtcagctttgcgctttaccattttacaggctgcgctttcggcgctcttgtccactttatcagcggtcccgctggcgcgcgcgcttgcgcgcgcgcagttttggggccgcgctgcggtgattaggctgatgggcgcgccttttattttgcccgttattgtcgccattcttggtttgattgcggttttcggtcaaaatggttggctcaatacggggttgcgcagcttgggctttggcagcttttcgatctatgggctgcagggcgtgctgttggcgcatgtgttttttaatttgccccttgccacacggatgattttattgggctgggcaacaatcccacaagagcggttgcggctggggcagagcttggatcttcgcggttttgcgcggtttcgtttgattgagtttccgatgctgatgacggttttgccctcggctgtggtggtcatctttgtgatttgtttatcaagttttactgtggcgctggctttaggaggggggcccaaatcaacgacgctggaattggcgatttatcaagcttttcgatttgactttgatttcgcaaaagccgctctgttggggctggtgcaattgggggtgtctgcattggctgccgttttcgcgctgggctttgcctgggggcatcagctgggcattgggcttgatcgtccaattgcgctgggccgccactctaccttgcaaaaatatctagatggggtggtgattggcgcggccctgctatttttaggcctgcctttgctattggtcttgggcaatgggcttggcagtgtaaccagcttgccggctgc

SEQ ID NO: 269 - DNA, 4000 bp, Escherichia coli
  misc_feature (1981)..(1982): n is a, c, g, or t
  misc_feature (1984)..(1985): n is a, c, g, or t
  misc_feature (1987)..(1988): n is a, c, g, or t
  misc_feature (1991)..(1991): n is a, c, g, or t
  misc_feature (1996)..(1996): n is a, c, g, or t
  misc_feature (2002)..(2003): n is a, c, g, or t
  misc_feature (2006)..(2006): n is a, c, g, or t
  misc_feature (2011)..(2011): n is a, c, g, or t
  misc_feature (2017)..(2018): n is a, c, g, or t
  misc_feature (2026)..(2027): n is a, c, g, or t
  misc_feature (2045)..(2045): n is a, c, g, or t
  misc_feature (2065)..(2065): n is a, c, g, or t
  misc_feature (2388)..(2388): n is a, c, g, or t
  misc_feature (2467)..(2467): n is a, c, g, or t
  misc_feature (2469)..(2469): n is a, c, g, or t
  misc_feature (2478)..(2478): n is a, c, g, or t
  misc_feature (2547)..(2547): n is a, c, g, or t
  misc_feature (2555)..(2555): n is a, c, g, or t
  misc_feature (2559)..(2559): n is a, c, g, or t
  misc_feature (2565)..(2565): n is a, c, g, or t
  misc_feature (2571)..(2571): n is a, c, g, or t
  misc_feature (2573)..(2573): n is a, c, g, or t
  misc_feature (2578)..(2578): n is a, c, g, or t
  misc_feature (2580)..(2580): n is a, c, g, or t
  misc_feature (2582)..(2583): n is a, c, g, or t
  misc_feature (2586)..(2586): n is a, c, g, or t
  misc_feature (2589)..(2589): n is a, c, g, or t
  misc_feature (2595)..(2595): n is a, c, g, or t
  misc_feature (2598)..(2598): n is a, c, g, or t
  misc_feature (2613)..(2614): n is a, c, g, or t
  misc_feature (2617)..(2617): n is a, c, g, or t
  misc_feature (2620)..(2620): n is a, c, g, or t
  misc_feature (2622)..(2627): n is a, c, g, or t
  misc_feature (2629)..(2630): n is a, c, g, or t
  misc_feature (2632)..(2634): n is a, c, g, or t
  misc_feature (2639)..(2641): n is a, c, g, or t
  misc_feature (2643)..(2643): n is a, c, g, or t
  misc_feature (2645)..(2647): n is a, c, g, or t
  misc_feature (2649)..(2650): n is a, c, g, or t
  misc_feature (2652)..(2654): n is a, c, g, or t
  misc_feature (2657)..(2657): n is a, c, g, or t
  misc_feature (2659)..(2659): n is a, c, g, or t
  misc_feature (2662)..(2663): n is a, c, g, or t
  misc_feature (2665)..(2665): n is a, c, g, or t
  misc_feature (2668)..(2668): n is a, c, g, or t
  misc_feature (2670)..(2670): n is a, c, g, or t
  misc_feature (2672)..(2673): n is a, c, g, or t
  misc_feature (2676)..(2676): n is a, c, g, or t
  misc_feature (2679)..(2679): n is a, c, g, or t
  misc_feature (2681)..(2682): n is a, c, g, or t
  misc_feature (2684)..(2684): n is a, c, g, or t
  misc_feature (2686)..(2690): n is a, c, g, or t
  misc_feature (2694)..(2694): n is a, c, g, or t
  misc_feature (2696)..(2696): n is a, c, g, or t
  misc_feature (2698)..(2703): n is a, c, g, or t
  misc_feature (2705)..(2706): n is a, c, g, or t
  misc_feature (2714)..(2715): n is a, c, g, or t
  misc_feature (2718)..(2718): n is a, c, g, or t
  misc_feature (2727)..(2727): n is a, c, g, or t
  misc_feature (2730)..(2730): n is a, c, g, or t
  misc_feature (2732)..(2732): n is a, c, g, or t
  misc_feature (2739)..(2739): n is a, c, g, or t
  misc_feature (2742)..(2743): n is a, c, g, or t
  misc_feature (2748)..(2748): n is a, c, g, or t
  misc_feature (2751)..(2754): n is a, c, g, or t
  misc_feature (2756)..(2756): n is a, c, g, or t
  misc_feature (2758)..(2763): n is a, c, g, or t
  misc_feature (2766)..(2769): n is a, c, g, or t
  misc_feature (2772)..(2777): n is a, c, g, or t
  misc_feature (2779)..(2779): n is a, c, g, or t
  misc_feature (2781)..(2784): n is a, c, g, or t
  misc_feature (2786)..(2786): n is a, c, g, or t
  misc_feature (2789)..(2790): n is a, c, g, or t
  misc_feature (2792)..(2793): n is a, c, g, or t
  misc_feature (2795)..(2795): n is a, c, g, or t
  misc_feature (2797)..(2797): n is a, c, g, or t
  misc_feature (2799)..(2800): n is a, c, g, or t
  misc_feature (2802)..(2802): n is a, c, g, or t
  misc_feature (2808)..(2808): n is a, c, g, or t
  misc_feature (2810)..(2811): n is a, c, g, or t
  misc_feature (2813)..(2817): n is a, c, g, or t
  misc_feature (2819)..(2819): n is a, c, g, or t
  misc_feature (2825)..(2826): n is a, c, g, or t
  misc_feature (2828)..(2829): n is a, c, g, or t
  misc_feature (2831)..(2831): n is a, c, g, or t
  misc_feature (2833)..(2833): n is a, c, g, or t
  misc_feature (2835)..(2835): n is a, c, g, or t
  misc_feature (2842)..(2845): n is a, c, g, or t
  misc_feature (2851)..(2852): n is a, c, g, or t
  misc_feature (2855)..(2855): n is a, c, g, or t
  misc_feature (2857)..(2857): n is a, c, g, or t
  misc_feature (2860)..(2860): n is a, c, g, or t
  misc_feature (2863)..(2863): n is a, c, g, or t
  misc_feature (2865)..(2866): n is a, c, g, or t
  misc_feature (2868)..(2868): n is a, c, g, or t
  misc_feature (2872)..(2875): n is a, c, g, or t
  misc_feature (2877)..(2878): n is a, c, g, or t
  misc_feature (2880)..(2880): n is a, c, g, or t
  misc_feature (2884)..(2890): n is a, c, g, or t
  misc_feature (2894)..(2894): n is a, c, g, or t
  misc_feature (2896)..(2899): n is a, c, g, or t
  misc_feature (2901)..(2902): n is a, c, g, or t
  misc_feature (2905)..(2909): n is a, c, g, or t
  misc_feature (2911)..(2914): n is a, c, g, or t
  misc_feature (2916)..(2921): n is a, c, g, or t
  misc_feature (2923)..(2930): n is a, c, g, or t
  misc_feature (2932)..(2938): n is a, c, g, or t
  misc_feature (2940)..(2946): n is a, c, g, or t
  misc_feature (2948)..(2969): n is a, c, g, or t
  misc_feature (2971)..(2979): n is a, c, g, or t
  misc_feature (2982)..(2984): n is a, c, g, or t
  misc_feature (2986)..(2987): n is a, c, g, or t
  misc_feature (2989)..(2990): n is a, c, g, or t
  misc_feature (2992)..(2992): n is a, c, g, or t
  misc_feature (2998)..(2998): n is a, c, g, or t
  misc_feature (3003)..(3006): n is a, c, g, or t
  misc_feature (3008)..(3008): n is a, c, g, or t
  misc_feature (3011)..(3011): n is a, c, g, or t
  misc_feature (3013)..(3015): n is a, c, g, or t
  misc_feature (3017)..(3017): n is a, c, g, or t
  misc_feature (3019)..(3021): n is a, c, g, or t
  misc_feature (3024)..(3025): n is a, c, g, or t
  misc_feature (3028)..(3030): n is a, c, g, or t
  misc_feature (3032)..(3032): n is a, c, g, or t
  misc_feature (3034)..(3035): n is a, c, g, or t
  misc_feature (3038)..(3038): n is a, c, g, or t
  misc_feature (3042)..(3042): n is a, c, g, or t
  misc_feature (3044)..(3046): n is a, c, g, or t
  misc_feature (3049)..(3051): n is a, c, g, or t
  misc_feature (3054)..(3057): n is a, c, g, or t
  misc_feature (3061)..(3062): n is a, c, g, or t
  misc_feature (3064)..(3064): n is a, c, g, or t
  misc_feature (3068)..(3069): n is a, c, g, or t
  misc_feature (3071)..(3071): n is a, c, g, or t
  misc_feature (3073)..(3073): n is a, c, g, or t
  misc_feature (3075)..(3075): n is a, c, g, or t
  misc_feature (3077)..(3077): n is a, c, g, or t
  misc_feature (3079)..(3079): n is a, c, g, or t
  misc_feature (3083)..(3083): n is a, c, g, or t
  misc_feature (3088)..(3089): n is a, c, g, or t
  misc_feature (3091)..(3095): n is a, c, g, or t
  misc_feature (3097)..(3102): n is a, c, g, or t
  misc_feature (3104)..(3104): n is a, c, g, or t
  misc_feature (3107)..(3107): n is a, c, g, or t
  misc_feature (3111)..(3121): n is a, c, g, or t
  misc_feature (3123)..(3125): n is a, c, g, or t
  misc_feature (3127)..(3129): n is a, c, g, or t
  misc_feature (3132)..(3136): n is a, c, g, or t
  misc_feature (3138)..(3139): n is a, c, g, or t
gatcctgcctgttcggcatttacgggagcaattaacactcccaacaaaaaagatatgcaaataaaaaacaccttcctcatttgtatttaatatactatactttttacgcacatgtccaatcttaatctaaacgaggttcttcgggcttatatctcatgcaggaagaataagagaaacaccgtaaatcaaataaaatttgaactcaatgtggagaataatctttacaacctttatactgagctcaaaaacgaaacataccgtccgggaaggtcaatatgttttgtcgtcacgtatccaaaattgagagagatattcgccgcggatttcaaagacagaattgttcatcatcttctggttgcgcggctggaaccatattacgaaaaaagatttatttacgattcctatgcgtgtagaaaagataaaggagcgcacaaagcggtactaagactccgaaaattttcccgacaaaataaatattatctccagatagacgttaagaactttttcacgagtattgataaaaacactctctattctatttttttaaaaggaaaatttaataaagaaacaagatctcttctgaaaaaaatgatatttcacgaccctacttcaaactactacctaaagggagatggaaatctgtttagcaaaatacccccatgcaaatctcttttttatacgccaaagaacagaggtcttccgataggaaacttaacttctcaattttttgccaatgtgtacctaaacgaagttgaccaatacattaaaagaacattaaaagtaaaacattacatcagatatgttgatgatatgatcttattgtcagacgataaaaaccagcttttaaaatggagggatgaaatcaatggttttttatccgaaaagttaaaactttcgcttcatcccggcaaagatagaataggagcagttgaaaatgggattgattttcttggatatattgtgagaccaaattatatcctttccagacgacgggtcgccggaaatttaaaaaagaaacttaatcttttcaataaaggatattatctgctttcaaacaaccaaaaacagatatcgctacccctatcttcaaacccaacagatgaagaaatagcaagaatgctcactactgttaactcatattacggacattttaaacatgccgatacatataatttaagaaaaaacctatatgaaaatcgcatgggaaaattaaaaaattatcttgaaccggtagataattatgcacacttcagaatcgcaaagtaaatttactttatacataaaacttttccaatttcaaaaatatatttatcttatggtgcacaattttccaaaagaatataaatatggttttggtcagagcataattgacatggcgtgggaaactttggataacacaataaaagcaaatatcacggaaaataactttaaagcggacgcgattgcggagatttctaaatcttttgacaagttaaaaacaaggttaagaatggcttatgaactgcggctcatctcaaacaagagttatacctacatactaaaagaaacaacaggtatgggaagggaaatatcaaggtggatgaattgggctaagagcataaagcccaaacaaagttccgcctgacgcaacgcacagcgttgctattggtcttattgttgttgttggcgttgccattgttgaggttctcgttccaagcgttcgtgctattgcctgagttctcagtagaagaccaaaagttgctcgtttttcccccaactttaaaagataggactaataagaattaagagtcttttccttatcttaataccttacaaggtgtgagggaacggattttatttgggcttttctttactgtcctaagctttgctttccaaacaaagtcgtaacaataaaatctagctcggagataatactaatacaaatttataaattactcaatattccgcctgacgcaacgcacagcgtagctattggtcttanngnngnngtnggcgnagccanngtngaggnactcgnnccaagcgnncgtgctattgcctgagtnctcagtagaagaccaaaagntgctcgtagtggtaaatgaagagctagtctggttatatatgccgtctaagtaagcgccgtctaactccttttgagaagggagataccaatctgtatctgctgactgaccatcctttgaagaaagacttaaaactgcgcatgcatttatggcatttccgcaatcaggatccgttcccgatgtaccataacttgatcttggagtggcactaaagaaatcacactttcctgtagatggggatgaaaatgaatttgtatatgaacctatacttgaactccaataaagaccggttcttgtatcctgatacacatttgctcctgaagcngagcttgttttaatccatgttgattcttctcccgtataatctgatgcgtgggcatcatcatattgaacatattgttcangngagaaatcnatgggttccattgttcctgtttttttagttctgctgtttgaataaaatgtctttcctgatacaacatcngactccgntgcngttccntccggngnccacnangnngantanaaaatnctnttccaatatgtactnnttntgntnnnnnncnnannngacgnnngngnnncnncnnngtntnttnntnttnanannaanaantnntnannnnntttnantnnnnnngnngctccggnntcnggagaaganccngncttctcngcnnctacnggnnnnancnnnnnncgnnnngannnnnntntnnnnanaannannanancnntnattatnannannnnnantattannannanananttttttnnnntcattnnttntnagnatntnngntctnnnntnntntggnnnnnnntccngnnnnannccnnnnngnnnngnnnnnncnnnnnnnngnnnnnnntnnnnnnngnnnnnnnnnnnnnnnnnnnnnnannnnnnnnntannnanncnngntaaaantactnnnntnttntnnngntnnntgnngtnnntncnnaanaatnannnccnnnttnnnngaannanaagnngntnanancngaanaatannannnnnannnnnngntgntgannnnnnnnnnnannntnnntcnnnnntnngaatcatgagcatcccgacatttgttctcttaaaggacgaaaaagaaattgatagaaaagtcggagcaatgccaaaagaaatggtaaaaacctggcttgattcgcatctttaaaaatatggaaaataaaactgcccgaatagctataaatggatttggaagaatcggaaggtcttccttcaggattgcttttgaaaaaaatattgatataacagctataaatgaccttacaaacccccgtgttttggcgcatctcctaaaatacgatactgtttatggaacttatgacaaggaaatttggctggaagaagatgggaaaagaataaatcttgaagacaataaaggtgaaaaagatttttttgataaaaaaggaacagaaaattatctggttgttgaaggcaaaaaaactcttgtcttatccgaaaaagatcccgaaaaacctccgtggaaaaaattaggcatagatgttgttcttgaatgtaccggaaaatttgtaaaagacgatacctcacttgcacatataagagcgggagcaaaaaaagtaattgtctccgctccggtcaaaggcggaacaattcaaacctttatgaagggggttaacgaatctcaatacttaggacaaaacgcaatatcaaacgcctcttgcacaacaaactgcatctcccccgtcctagacgttttggactccaattttaaaataataaaagcaggaatgagcaccatccacgcaattacaaacaatcaaaatgtcgttgacagccccccggctggagaaaaagtagatttaagaagagcccgttcttccggatataacataatcccaacaacaacgggggccgcagatgcaactacggaagttctt

SEQ ID NO: 270 - DNA, 4000 bp, Escherichia coli
  misc_feature (291)..(291): n is a, c, g, or t
  misc_feature (762)..(762): n is a, c, g, or t
  misc_feature (1766)..(1766): n is a, c, g, or t
  misc_feature (1829)..(1829): n is a, c, g, or t
  misc_feature (1988)..(1988): n is a, c, g, or t
  misc_feature (2420)..(2420): n is a, c, g, or t
  misc_feature (2447)..(2447): n is a, c, g, or t
  misc_feature (2453)..(2453): n is a, c, g, or t
  misc_feature (3287)..(3287): n is a, c, g, or t
  misc_feature (3314)..(3314): n is a, c, g, or t
  misc_feature (3365)..(3365): n is a, c, g, or t
  misc_feature (3386)..(3386): n is a, c, g, or t
  misc_feature (3488)..(3488): n is a, c, g, or t
  misc_feature (3681)..(3681): n is a, c, g, or t
  misc_feature (3840)..(3840): n is a, c, g, or t
  misc_feature (3930)..(3930): n is a, c, g, or t
  misc_feature (3933)..(3933): n is a, c, g, or t
agcttggtgagaaagcagttccagcatggatggaggttgtgggatcaaagatgcgtattttggttcacgcaattccaacccgcccaattattgatactcaagtacaagagcaactaatcgttgagctttactccaagtaatcaagtaattaaagcagtaaagatttacagcagtaaaaactaaatatcgtaagccaaccggaagatcaaatagagggtcttccagaacatacggaggaatacagtgctaattgcacaacgccccatcctcactgaggaagtagtaagcgantaccgttcacggttcattattgagccactagaaccaggtttcggttacacccttggtaattcgattcgtcgcaccttgttatcttcaattccaggagcagctgttactggtattcgagtaaacaatgcgttgcatgagttcactgccctagaaggtgtgaaagaagatctaactgagatcgtcttaaacatcaaaaacctagttttatcttcagataatgatgagccatcacttctttacatccgtaaaaatggtgatggaattgttactggtgcagatgttgcagctccagctggtgtgcaggtgcacaacccagagctacacattgctaccttaaactcaaaggcaaagtttgagattgaattaacagttgagcgcggtcgtggttacatcaccgctgttcaaaacaaacaagcaggaggggaaattggtcgaattccagttgactctatttactcacctgtattgcgngttacctacaaagttgaagcaactcgtgttgaacaacgcaccgacttcgatcgcttagttgtagatgttgagactaagagatcaatgaagccagctgatgccatggcatctgccggaaagacattggttgagttgtttggtctagcacgtgaattaaatgctaacgctgaaggtattgagatgggaccttccattcaagatgcagcattagctgctgatatggcacttccaatcgaagatcttgatctaactgttcgttcttataactgcttaaagcgcgaaggtattcacaccgttggtgagttactttcacgttctgaagcagatctaatggatattcgtaacttcggctccaagtcaattgatgaggttaaggcgaaattacaatccatgggaatgcaattaaaggacagcccagctggatttgatccaactaagcatgctaattatggaagcaacgttgatgatgaacttgtcgacgctgaagaggtctaggagagaatatgccaaagccaagtaaaggcccacgtttaggaagtggaccagcacatgagaaattattgctgggcacactagctgcgcaacttttcgaaaaaggaaagttgaccacaactgaagcaaaggcaaagcgtcttcgtccattagcagagcgattaatcactcatgcaaaaaaaggtgatcttgcagcacgtcgtcgcgttatggccagaatctctagcaaatctgtagtgcacacattgtttacagacattgcaaaaagatttgaagcccgtgatggtggctacacccgtataaccaaaatcggtccacgcaaaggtgacaatgcaccaatggcagtaatcgaaatggttgaagctggcgtgccagctaaaaaggttgcaaaaaaagcagcagcgaaagctgagtaataacgcagacctaaaataaagattatgactaaacccactcttgaagttaagagtgggttttctcgtttacgcgttgatttaacttatgacggcacncacttttctggttgggctaaacaacctgagcttcgaactattcaagaagagtttgaaaccgcnctttcaactattaccagaggtgaagtttcaacaatagttgccgggcgaactgatgctggcgtgcatgcaaaacatcaagttttacatgttgacctgccagaaaatactgaagtagaaaacttagcttttaggctaaatcaattgctaaaagcagatgtncgggtattggctgcagattgggcgccacttaattttcatgccagatttggtccgaattctcgcacctatcaatacaagatagttgatggcggaaaagtcaccgcgccttttgatcgccatgacagcgtttcctggtttcgcccacttgatatagatctaatgaatgaagcatcaaaaacattacttggtgagcatgattttttcaccttttgtaaacaccgtgaaggaacaagcaccataaagaaattacttgaatttaactggcaccgggatgaaaaaggtttggtggttggccagattactgctaactcctttggctataacatggttagaaatttagtaggagcagcagtttgtgttggtgaaggaaggtttgaaccagcatggatgaaaaaaacattagagggtcgagtgcgaatttcagatagttangtctttccagcaaaaggtttatctctnattaangttgatttcccgccggcggatcaatacttggctaattacaacgattatcaccatctgcagcaggggcaagagaatgagggcgatttctaagcggggccaggatgcggttttgacctagtcccacacctgaaggtaatctttggcctctggaaatgacccaatcgggacaatccttagcaataagaaaggcagatgctcgtgcgcacatttacacctaaagctggtgagatcacccgtagttggtatctcattgatgctcaagatgtggtgctcggacgtcttgctacccacgctgcaaacttattgcgcggaaaacacaaaacaacttttgctcctcacatggatatgggtgactttgtaattgttatcaatgctgacaaagttgcattgactggttcaaagagctcacaaaaatttgcacaccaacactctggttatccaggtggtatgacttcaactgtttactcagatttgtttgaaaaattcccaacccgcgcggttgaaaaagcaatcaaaggaatgttgccaaagaattctgtaggccgctctgctgcaactaagttaaaagtttatgcaggtagtgagcatccacatgcagctcaaaacccaaaggcatttgagttcaaacaagtttcccagatttcaaagaaataaaataggagaaaaatgtcagaggaaaatttagactcaagcactgaggcactaccaacctcatacagctcaagcacaccagcagctgctacaaaccgcaaagcaattactgctcccggtggtggcgttggtcgtcgtaaagaagctgttgccagagttcgcttagttccaggatctggtcgntgggtagttaatggcaagccacttgangtttatttcccaaacaaggttcaccaacaattagttgctgatccatttaanactgttggcgcagaaggaacntatgatgtttttgctcgcatcaatggcggtggaacatctggtcaagcaggagcacttcgtcttggcgttgctcgtgcgttaaatgaaattgatactgatgcnaaccgaccaaccttgaagaaggctggattcttatctcgtgatgcacgtgtaattgagcgcaagaagtacggccttaagaaggctcgtaagcgttctcaatacagcaagcgctaatttcttagtcgctaaaaaatctaatatggccctcttcggcaccgatggtgtacgaggtgttgcaaatgttgatctcacngctgaacttgctgttgatttagcaatcgctgccgcacatgttctaggtgaaattggtgcatttgctggccatcgcccaaaagcaattgttggacaagattctcgtgcctctggtgattttttagaggcagcagttgttgctggattaactagtgctggngttgatgtttaccgagttggcgtactgccaacacctgcaattgcattcttagttaaagaaagtaatgccgatctaggcgtaatgattagngcntcccataacccaatgccagataatggaattaagttctttgcaaaaggtggggataaattagctgatc

SEQ ID NO: 271 - DNA, 4000 bp, Escherichia coli
  misc_feature (1)..(4): n is a, c, g, or t
  misc_feature (6)..(11): n is a, c, g, or t
  misc_feature (14)..(20): n is a, c, g, or t
  misc_feature (22)..(22): n is a, c, g, or t
  misc_feature (24)..(25): n is a, c, g, or t
  misc_feature (27)..(27): n is a, c, g, or t
  misc_feature (29)..(31): n is a, c, g, or t
  misc_feature (33)..(36): n is a, c, g, or t
  misc_feature (38)..(40): n is a, c, g, or t
  misc_feature (42)..(42): n is a, c, g, or t
  misc_feature (48)..(49): n is a, c, g, or t
  misc_feature (51)..(65): n is a, c, g, or t
  misc_feature (70)..(71): n is a, c, g, or t
  misc_feature (73)..(81): n is a, c, g, or t
  misc_feature (84)..(84): n is a, c, g, or t
  misc_feature (86)..(86): n is a, c, g, or t
  misc_feature (88)..(88): n is a, c, g, or t
  misc_feature (93)..(93): n is a, c, g, or t
  misc_feature (95)..(96): n is a, c, g, or t
  misc_feature (98)..(98): n is a, c, g, or t
  misc_feature (100)..(101): n is a, c, g, or t
  misc_feature (103)..(103): n is a, c, g, or t
  misc_feature (105)..(105): n is a, c, g, or t
  misc_feature (113)..(115): n is a, c, g, or t
  misc_feature (117)..(117): n is a, c, g, or t
  misc_feature (120)..(124): n is a, c, g, or t
  misc_feature (127)..(128): n is a, c, g, or t
  misc_feature (130)..(133): n is a, c, g, or t
  misc_feature (136)..(144): n is a, c, g, or t
  misc_feature (146)..(147): n is a, c, g, or t
  misc_feature (153)..(156): n is a, c, g, or t
  misc_feature (158)..(160): n is a, c, g, or t
  misc_feature (162)..(164): n is a, c, g, or t
  misc_feature (166)..(167): n is a, c, g, or t
  misc_feature (169)..(171): n is a, c, g, or t
  misc_feature (174)..(174): n is a, c, g, or t
  misc_feature (177)..(191): n is a, c, g, or t
  misc_feature (196)..(197): n is a, c, g, or t
  misc_feature (199)..(200): n is a, c, g, or t
  misc_feature (202)..(202): n is a, c, g, or t
  misc_feature (204)..(207): n is a, c, g, or t
  misc_feature (210)..(210): n is a, c, g, or t
  misc_feature (212)..(221): n is a, c, g, or t
  misc_feature (224)..(226): n is a, c, g, or t
  misc_feature (228)..(230): n is a, c, g, or t
  misc_feature (232)..(234): n is a, c, g, or t
  misc_feature (236)..(237): n is a, c, g, or t
  misc_feature (240)..(242): n is a, c, g, or t
  misc_feature (245)..(249): n is a, c, g, or t
  misc_feature (251)..(252): n is a, c, g, or t
  misc_feature (254)..(265): n is a, c, g, or t
  misc_feature (267)..(267): n is a, c, g, or t
  misc_feature (270)..(270): n is a, c, g, or t
  misc_feature (272)..(273): n is a, c, g, or t
  misc_feature (275)..(277): n is a, c, g, or t
  misc_feature (279)..(285): n is a, c, g, or t
  misc_feature (289)..(292): n is a, c, g, or t
  misc_feature (295)..(296): n is a, c, g, or t
  misc_feature (298)..(303): n is a, c, g, or t
  misc_feature (306)..(315): n is a, c, g, or t
  misc_feature (317)..(324): n is a, c, g, or t
  misc_feature (326)..(327): n is a, c, g, or t
  misc_feature (330)..(330): n is a, c, g, or t
  misc_feature (333)..(344): n is a, c, g, or t
  misc_feature (346)..(347): n is a, c, g, or t
  misc_feature (349)..(356): n is a, c, g, or t
  misc_feature (358)..(365): n is a, c, g, or t
  misc_feature (367)..(368): n is a, c, g, or t
  misc_feature (370)..(374): n is a, c, g, or t
  misc_feature (376)..(376): n is a, c, g, or t
  misc_feature (378)..(383): n is a, c, g, or t
  misc_feature (385)..(385): n is a, c, g, or t
  misc_feature (387)..(390): n is a, c, g, or t
  misc_feature (392)..(400): n is a, c, g, or t
  misc_feature (402)..(407): n is a, c, g, or t
  misc_feature (410)..(412): n is a, c, g, or t
  misc_feature (414)..(415): n is a, c, g, or t
  misc_feature (418)..(426): n is a, c, g, or t
  misc_feature (428)..(432): n is a, c, g, or t
  misc_feature (435)..(436): n is a, c, g, or t
  misc_feature (438)..(440): n is a, c, g, or t
  misc_feature (442)..(442): n is a, c, g, or t
  misc_feature (446)..(448): n is a, c, g, or t
  misc_feature (451)..(451): n is a, c, g, or t
  misc_feature (453)..(459): n is a, c, g, or t
  misc_feature (461)..(463): n is a, c, g, or t
  misc_feature (465)..(472): n is a, c, g, or t
  misc_feature (474)..(474): n is a, c, g, or t
  misc_feature (476)..(478): n is a, c, g, or t
  misc_feature (480)..(480): n is a, c, g, or t
  misc_feature (483)..(483): n is a, c, g, or t
  misc_feature (485)..(489): n is a, c, g, or t
  misc_feature (492)..(494): n is a, c, g, or t
  misc_feature (496)..(496): n is a, c, g, or t
  misc_feature (498)..(499): n is a, c, g, or t
  misc_feature (502)..(507): n is a, c, g, or t
  misc_feature (509)..(509): n is a, c, g, or t
  misc_feature (513)..(513): n is a, c, g, or t
  misc_feature (518)..(518): n is a, c, g, or t
  misc_feature (524)..(526): n is a, c, g, or t
  misc_feature (528)..(530): n is a, c, g, or t
  misc_feature (532)..(532): n is a, c, g, or t
  misc_feature (534)..(535): n is a, c, g, or t
  misc_feature (537)..(537): n is a, c, g, or t
  misc_feature (539)..(539): n is a, c, g, or t
  misc_feature (541)..(544): n is a, c, g, or t
  misc_feature (547)..(547): n is a, c, g, or t
  misc_feature (549)..(552): n is a, c, g, or t
  misc_feature (554)..(555): n is a, c, g, or t
  misc_feature (557)..(559): n is a, c, g, or t
  misc_feature (562)..(563): n is a, c, g, or t
  misc_feature (565)..(566): n is a, c, g, or t
  misc_feature (570)..(580): n is a, c, g, or t
  misc_feature (583)..(584): n is a, c, g, or t
  misc_feature (587)..(588): n is a, c, g, or t
  misc_feature (592)..(593): n is a, c, g, or t
  misc_feature (595)..(598): n is a, c, g, or t
  misc_feature (600)..(606): n is a, c, g, or t
  misc_feature (609)..(622): n is a, c, g, or t
  misc_feature (624)..(628): n is a, c, g, or t
  misc_feature (630)..(630): n is a, c, g, or t
  misc_feature (633)..(649): n is a, c, g, or t
  misc_feature (651)..(651): n is a, c, g, or t
  misc_feature (655)..(662): n is a, c, g, or t
  misc_feature (664)..(665): n is a, c, g, or t
  misc_feature (667)..(667): n is a, c, g, or t
  misc_feature (669)..(671): n is a, c, g, or t
  misc_feature (673)..(673): n is a, c, g, or t
  misc_feature (677)..(678): n is a, c, g, or t
  misc_feature (680)..(691): n is a, c, g, or t
  misc_feature (694)..(698): n is a, c, g, or t
  misc_feature (702)..(703): n is a, c, g, or t
  misc_feature (705)..(706): n is a, c, g, or t
  misc_feature (708)..(711): n is a, c, g, or t
  misc_feature (713)..(713): n is a, c, g, or t
  misc_feature (715)..(716): n is a, c, g, or t
  misc_feature (719)..(719): n is a, c, g, or t
  misc_feature (722)..(723): n is a, c, g, or t
  misc_feature (726)..(729): n is a, c, g, or t
  misc_feature (731)..(733): n is a, c, g, or t
  misc_feature (735)..(735): n is a, c, g, or t
  misc_feature (737)..(743): n is a, c, g, or t
  misc_feature (746)..(749): n is a, c, g, or t
  misc_feature (752)..(754): n is a, c, g, or t
  misc_feature (758)..(758): n is a, c, g, or t
  misc_feature (760)..(762): n is a, c, g, or t
  misc_feature (764)..(774): n is a, c, g, or t
  misc_feature (777)..(783): n is a, c, g, or t
  misc_feature (785)..(789): n is a, c, g, or t
  misc_feature (791)..(794): n is a, c, g, or t
  misc_feature (796)..(797): n is a, c, g, or t
  misc_feature (800)..(807): n is a, c, g, or t
  misc_feature (809)..(812): n is a, c, g, or t
  misc_feature (815)..(816): n is a, c, g, or t
  misc_feature (820)..(820): n is a, c, g, or t
  misc_feature (822)..(825): n is a, c, g, or t
  misc_feature (827)..(838): n is a, c, g, or t
  misc_feature (840)..(840): n is a, c, g, or t
  misc_feature (844)..(847): n is a, c, g, or t
  misc_feature (849)..(850): n is a, c, g, or t
  misc_feature (853)..(857): n is a, c, g, or t
  misc_feature (859)..(861): n is a, c, g, or t
  misc_feature (864)..(864): n is a, c, g, or t
  misc_feature (886)..(886): n is a, c, g, or t
  misc_feature (1135)..(1135): n is a, c, g, or t
  misc_feature (1156)..(1156): n is a, c, g, or t
  misc_feature (1267)..(1267): n is a, c, g, or t
  misc_feature (1320)..(1320): n is a, c, g, or t
  misc_feature (1581)..(1581): n is a, c, g, or t
  misc_feature (1954)..(1955): n is a, c, g, or t
  misc_feature (1960)..(1960): n is a, c, g, or t
  misc_feature (1967)..(1967): n is a, c, g, or t
  misc_feature (1979)..(1979): n is a, c, g, or t
  misc_feature (1982)..(1982): n is a, c, g, or t
  misc_feature (1984)..(1985): n is a, c, g, or t
  misc_feature (1987)..(1987): n is a, c, g, or t
  misc_feature (2002)..(2003): n is a, c, g, or t
  misc_feature (2006)..(2006): n is a, c, g, or t
  misc_feature (2383)..(2383): n is a, c, g, or t
  misc_feature (2884)..(2884): n is a, c, g, or t
  misc_feature (2906)..(2906): n is a, c, g, or t
  misc_feature (2911)..(2911): n is a, c, g, or t
  misc_feature (2917)..(2917): n is a, c, g, or t
  misc_feature (2920)..(2920): n is a, c, g, or t
  misc_feature (2932)..(2932): n is a, c, g, or t
  misc_feature (2934)..(2934): n is a, c, g, or t
  misc_feature (2986)..(2986): n is a, c, g, or t
  misc_feature (3115)..(3115): n is a, c, g, or t
  misc_feature (3133)..(3133): n is a, c, g, or t
  misc_feature (3265)..(3265): n is a, c, g, or t
  misc_feature (3340)..(3340): n is a, c, g, or t
  misc_feature (3430)..(3430): n is a, c, g, or t
  misc_feature (3457)..(3457): n is a, c, g, or t
  misc_feature (3502)..(3502): n is a, c, g, or t
  misc_feature (3636)..(3636): n is a, c, g, or t
  misc_feature (3641)..(3641): n is a, c, g, or t
  misc_feature (3681)..(3681): n is a, c, g, or t
  misc_feature (3752)..(3752): n is a, c, g, or t
  misc_feature (3755)..(3755): n is a, c, g, or t
  misc_feature (3759)..(3759): n is a, c, g, or t
  misc_feature (3763)..(3763): n is a, c, g, or t
  misc_feature (3765)..(3766): n is a, c, g, or t
  misc_feature (3768)..(3768): n is a, c, g, or t
  misc_feature (3772)..(3772): n is a, c, g, or t
  misc_feature (3774)..(3774): n is a, c, g, or t
  misc_feature (3777)..(3777): n is a, c, g, or t
  misc_feature (3779)..(3779): n is a, c, g, or t
  misc_feature (3782)..(3782): n is a, c, g, or t
  misc_feature (3785)..(3785): n is a, c, g, or t
  misc_feature (3789)..(3789): n is a, c, g, or t
  misc_feature (3793)..(3793): n is a, c, g, or t
  misc_feature (3797)..(3799): n is a, c, g, or t
  misc_feature (3801)..(3803): n is a, c, g, or t
  misc_feature (3805)..(3806): n is a, c, g, or t
  misc_feature (3808)..(3808): n is a, c, g, or t
  misc_feature (3810)..(3813): n is a, c, g, or t
  misc_feature (3815)..(3815): n is a, c, g, or t
  misc_feature (3817)..(3818): n is a, c, g, or t
  misc_feature (3820)..(3820): n is a, c, g, or t
  misc_feature (3824)..(3825): n is a, c, g, or t
  misc_feature (3827)..(3830): n is a, c, g, or t
  misc_feature (3832)..(3832): n is a, c, g, or t
  misc_feature (3834)..(3834): n is a, c, g, or t
  misc_feature (3836)..(3837): n is a, c, g, or t
  misc_feature (3841)..(3841): n is a, c, g, or t
  misc_feature (3843)..(3843): n is a, c, g, or t
  misc_feature (3845)..(3845): n is a, c, g, or t
  misc_feature (3847)..(3847): n is a, c, g, or t
  misc_feature (3849)..(3849): n is a, c, g, or t
  misc_feature (3851)..(3852): n is a, c, g, or t
  misc_feature (3854)..(3854): n is a, c, g, or t
  misc_feature (3856)..(3857): n is a, c, g, or t
  misc_feature (3861)..(3861): n is a, c, g, or t
  misc_feature (3863)..(3863): n is a, c, g, or t
  misc_feature (3865)..(3865): n is a, c, g, or t
  misc_feature (3868)..(3868): n is a, c, g, or t
  misc_feature (3870)..(3871): n is a, c, g, or t
  misc_feature (3874)..(3875): n is a, c, g, or t
  misc_feature (3877)..(3877): n is a, c, g, or t
  misc_feature (3893)..(3893): n is a, c, g, or t
  misc_feature (3896)..(3896): n is a, c, g, or t
  misc_feature (3903)..(3904): n is a, c, g, or t
  misc_feature (3910)..(3910): n is a, c, g, or t
  misc_feature (3914)..(3914): n is a, c, g, or t
  misc_feature (3919)..(3920): n is a, c, g, or t
  misc_feature (3923)..(3923): n is a, c, g, or t
  misc_feature (3926)..(3927): n is a, c, g, or t
  misc_feature (3929)..(3932): n is a, c, g, or t
  misc_feature (3935)..(3935): n is a, c, g, or t
  misc_feature (3940)..(3940): n is a, c, g, or t
  misc_feature (3943)..(3943): n is a, c, g, or t
  misc_feature (3946)..(3947): n is a, c, g, or t
  misc_feature (3949)..(3949): n is a, c, g, or t
  misc_feature (3952)..(3952): n is a, c, g, or t
  misc_feature (3955)..(3957): n is a, c, g, or t
  misc_feature (3960)..(3961): n is a, c, g, or t
  misc_feature (3963)..(3963): n is a, c, g, or t
  misc_feature (3965)..(3969): n is a, c, g, or t
  misc_feature (3975)..(3976): n is a, c, g, or t
  misc_feature (3981)..(3982): n is a, c, g, or t
  misc_feature (3990)..(3991): n is a, c, g, or t
  misc_feature (3994)..(3994): n is a, c, g, or t
  misc_feature (3997)..(3997): n is a, c, g, or t
  misc_feature (4000)..(4000): n is a, c, g, or t
nnnnannnnnnggnnnnnnncngnntntnnnannnntnnnancgcggnngnnnnnnnnnnnnnnncacgnntnnnnnnnnnggnangnggaantnngntnngngngcgggcgnnnanggnnnnnggnngnnnncgnnnnnnnnncnnatcccnnnncnnncnnntnnannntanttnnnnnnnnnnnnnnncgggnnanngnannnncgntnnnnnnnnnngcnnntnnngnnnanngannncgnnnnnanngnnnnnnnnnnnncnccntnncnnncnnnnnnngttnnnnatnncnnnnnncgnnnnnnnnnntnnnnnnnnannagnaannnnnnnnnnnngnngnnnnnnnncnnnnnnnntnnannnnngnannnnnnancnnnncnnnnnnnnncnnnnnngcnnnanncgnnnnnnnnntnnnnnacnnannngnaaannngcncnnnnnnngnnngnnnnnnnntnannngnagnannnnnagnnntncnngcnnnnnnantgcncttcntgcggnnngnnngngnnanangnnnnacngnnnngnnannncgnnanngaannnnnnnnnnngcnntgnnccgnngnnnncnnnnnnntgnnnnnnnnnnnnnngnnnnncntgnnnnnnnnnnnnnnnnnangccnnnnnnnngnngnannncntganngnnnnnnnnnnnncgnnnnncgcnnanngnnnncngnngcngannatnnnnannnanannnnnnnggnnnnacnnnacangnnntnnnnnnnnnnnggnnnnnnncnnnnnannnncnnaannnnnnnntnnnncgnngcgnannnngnnnnnnnnnnnnanaaannnntnnaannnnngnnnaangacaatgacaattaacgagttngcggcagaggttcacaagaacgccgttgaccacggatggtgggaaggcgaaagaacgtttccggagatcgtggcgcttattcattcggaggtatccgaagcgctggaggaataccgcgacgggaaaccgcttctttatttcccctgcaacgctggcggcgtttgttgcgaagaggacggaagcgcgcattgcggaagccgcccttacgatccggaaaatccgaacgcccgttgttccgcgcagagcaanaagcccgaagggatcgcggcngagcttgccgacgtgattattcgcgttcttgattattgcgcgtatgccggaattgacattgaaaacgtgctggaggtaaagcacgaatacaacaaaagccgcccgtatcgncacggcggcaagaagtgttaatcatggcggagcgggtgaaccacccgccgcantataacgcgggcgggattgagtgtatcgacgcgctggaagccgcgacaagcgggcttcaaggtatcgaagccttttgcacagcgaacgcgatcaagtatttgtggcgctggaagctgaaaaacggtgaagaggacttgcaaaaggcggtttggtatatcaacagacttattcaacgagcgggcgcagacagcgccgcaggaaaggagctattcaatatgaaagagaacaaacacggcttcgagccgaaacaggaattcacnatgggcgggatcgcttggacggtcattcagacgggcgcggattgggtgaagtgcattgcttccgattgcgtcgaggaacgcgccttcgatgaagggaacaagaacgactttgccgcttcttcccttcgtgcctatctgaacggcgaattcttgcgccgtctgattaaggcgggcgcgccggaagaaatgttcgagtatttcaacatcgacttgaccgcagacgacggcttgaagaattacggcggcgatcgcgtccggatcgggcttatcacttgcgaggaataccgccttttgcgcggcaacattccggcacttccggatcgttggtggtggacggctacaccggacagcccgataaattctttcgtccgcnncgtcnattcggncggctctttgancancnncnacgcgtactacggcnnctntggcgttcgcccgctttgcaatctcaaatctgaaatcttggtatcgtacttaaacggcgagaacgcagaggaacagaagaagcgcgccgaagccgtcgatatgatgaagcatattgccgccgcgtgggacatcgacgcggaagaggttttcgggagggctgacgaatgacaatgtatcaattcatggtgaacgccttttatatgctttgcggcgttgcttgcgtcgccgcttccgttgtgatcgtctacatcgttttgaacgtgcttttcagagcgcttcggaggggcggcgggaacaatggcagatattaagatcgacgaagaattgcttttgcgcgcagggctggggatcggctacgcgttcgcgccattctttnggggcattttagaaggcgttgaagattacacgatcgaacaggcggcgcgggaaatgcaggaagaacacgacgcgcaggaagccgaagagggcttgaaacgtccggttgaaaaaacgctgatcggcgattgccggaagtgctggtgcgatcaatgcgcgaagctggaacaatgcgttcacttgcgcgaaggcgcgcttccggacggggtacgcccgttcccttgcgtcgggtgcgcggacggaatgcgcttcaagccttgtgaagaagaacggtgcgccgatttcgagcagggcgcaggatttaataacggctgacaaaacaaaaaaagagaacgtccggttgcgacgttccggacgttctcttttcctcttacatagctgtaaaaggagctattcaatattgaaattatagcattttacggcgcttttgtcaaggaagggcggcgggattatgcagagggttaaaagacgtattttttcgggcgttgtatgtgaacaggangtttacaccgtatccgatcgancaaanatcaanaangctgaaccgcgncngcgcttcaaggacgacgaagagcgcgcgcaacaccggatcggcatatcaaancggaaacaccagcggctggttaatgaaaacttttcgccgctttccttatatagtacgctgacgttcgacgacgacagcgaagttcatacattcagcgaagcgcgcagaatacgcgacaattacttccgncggcttcaaagggcttgncccgacgcgaagatcattatttacatggggcgcggcaagtctacgaaccgaattcattttcacatgatttcggacggcataccggaagaaacgatcagcggcaagtggaacgacggatcagtaatccatatncggcacttgcgcgaacacaattattataacggcgttgactacgggcaggattacacggggcttgcggattacctnttcaaccattggacaccggaacagggcggacaccgttggaaggcgacgcgcaatcttcgccagccggagaaggaagcgccgacgcttgcncttcggacgtatacggaaaagaaagcnccgatcgcgccgaagggttacaagctggtggaagcccgcgcgacnaagtggggctacatatattataaatatgtacgcgaaccggagaaaccgaaacgccggaagaaacgcgaatagcgggaacgcccgaaggggcgcaataaaaagccttgtaaatgtgtaaagttttacgaccagcnctttnccttccggaagattgattttatttattccccgtcgcccgnttttcagagatcacgaacgcgcgcattgtcaagggtgcgaagcacggcgaagccgcttgcccttgataatnaangcgngggngnnanaaangnggnanggnggngggnatanaaannnannngnnangnnnngntnnanaacnngnnnngngnanncccncngnancncnnananntttntncnttnannccnntnccccccagcggggggnggnggggggnnaaaaanaaanaaggnnaanaanntnnnnttnaattnaanaanntntanaannnggnntntnnnnngggaannaaagnntttccggnnggnttnttn

SEQ ID NO: 272 - DNA, 4000 bp, Escherichia coli
  misc_feature (33)..(33): n is a, c, g, or t
  misc_feature (1627)..(1627): n is a, c, g, or t
  misc_feature (1928)..(1928): n is a, c, g, or t
  misc_feature (1995)..(1996): n is a, c, g, or t
  misc_feature (2026)..(2026): n is a, c, g, or t
tcggcgcgatcacgcagttcctcgcataccgcntggggtaggccgccgacgccgatttggatacaggcccgatcgggcaccagggccgctacatgccttccgatcacccgatcgatatccgtgatgggccgctgcggcagttccggtagttcggagtcgtcttcgacaagcgcgtcgacctcggacacatgcagcgccgatgcgccatacaccctcggcatgttggggttgacctcgacgatgaggtgcttggcctggcgcgccaccgaactcgtgtagtcgttgttggtgccgaaggtgaagtatccgtgctcatccatcggtgagacggtcacgatgaaggtatcgaccggaatggattcggcgaacagccgcaccgagccgctgaacgaggtcggcacgaagaagacgaccttgcgtccgtcctgctcgccccgcttgatcagctcacgctcgggtcgttgcaaaaacattgagtacggctgcaggcgccccatcaggtcgtagcgaaggacggtgtcggccatcggggtttcggcgtggaagtagtagagcttgacgcggtcgatctcgccccggccagcccgggccgccaaggcgcccagcagcgcgcgcggttgactggcggcctggccgatcgcgaccgaggaccccgacgtcaccgcctgaatcgcggtgtcggggtcggtgagcttggcgtggtagatgctcgcagtgtcgggcgatgtggcggtgctcatcagtagttggcctcctcggcgggtgaacccgcgcgcttgtagatcagcatggtgcgttcgaacgtcatcaccacgacaccgtcctggttggtgccggtggttcgcaccgtgacgatgccttgggtaggtcggcttttcgactcccgcttggacagcacggtcgacgttgcgtaaagcgtgtcgccggcgaacaccggatgggtggcgcgcacctggtcccaacccaggttggccacaactttggcgctgatggtcttaacgctcatcccggtcagcatcgcgatggtcagggtggaatcgacgaggagacgcttccattcggtggccgcggcgtaattggcgtcgaagtgcaccggctgggtgttcatcgtgagcagcgtcatccagatgttgtcggtgtcggtgatggtgcggcccggccggtgctcgaaggtatcgccgacgacgaaatcctcgtagtacagaccggacgtctcgcggtacacctgtggtgcgacctcgttgtaggccgagaacggcgtttgcatggtttctccttacctttctttcagtggttgacgttctgcagaatgcggcgagcgtgccgggcaacggcttcgtcaaccatcacgccggcgaccgttccgacgccggcccggttcgcctcgattacttttctggcccagtcgatttcgcgctcgtcgggcgcaaatgcggcgttgatgaccggtatctgtctgggatggatggcggcctttccggcgaatccttcggcaacggcgcgtcgggtcgcgtgctcaagcccggcatcgtcgctgatatcgaagaacggggaatcgatcacggggatcgcggcggcggccgcgtgggtcaatagaacgttgcgggcatatgcggtgacctcggcntgcccgtctgcaccgaggtcggccgacaggtcatcgccgccgagcatgaccgcgtccaccacccgtggatccagcagcgcaccgatctgggtgacggcacgtgcgctttcgtagatcaccacaacacgcgctgccttgcgcgcctgcgctagcagcgatttcaccaggccggccacggcggccgactcagccttcgggatcaccacgaaatcggggtcacaggatgactgcaacagcgcggtcaggtcttgccagccggccaaggtggccggcgcgttgatccgcagcgccgtctgcaccnccgaaggccgatcggagccaaggtaattcaatgcggcgcgacgggcctggtctttcgccgccgtggnnaccgaatcctccaggtcgagaatcaccgcngccgcgcccacctctgcggccctgttgaagtgactgggcttggttgcgggcgtaaacaacatgctgcgcggtatgtgtgtcatgttcgagctcctctcattgacaagtcgatgtcgtctccgcgggccctcaagctccgggcggcgggcactgcgtggcgacggctgcaacgcgatgaagcgttaacccgcgtgccggatcttgttgactcacaacgctctcctatgtgatttggggtaacagcaagcggtgattggtatgtcgcgcgttgcctgtagccagtatttgtctgcggtttcggcgccggctgtaccagatgccgaaccgggggcaggctgagcgcaggaacaggtgctcatcgccgttgcggttgtcggtttctaggaggttgtggtcgatgtactgcgcggccagcccgatgttcacccgctcgacgcccatggcgtccagttcgagcatcaccagcgtgcttagcacatcctggagcagtgcttgatcaatgcgcagcgcgatctcattgccgggcttggggtttcccgtgaccagccgggagttgatcaacgtttgggtgaggttgaacgccatggtggtgcacccttctgggtggggcggggcagcggaccccgggtggtgccaaacagtggtctggcaccaccggtttggatgagcggttagatgttgtcttcggccagaaactcggcgtacttctgctcgaaatcccagacctgctggaaaccgatcatgtgcacgaagtctttgaacggaatgagcggatcgcgcactggcttgccttgcgcgagcgatgcgtagacgctagccagtgcgtgactggcggcgaagagcccagcggtggggtagatcgccacagcgaatcccaattcctgaagccgggtttgcggcaggatcggggtgagtccgccgtgaagctggttggacaggaccggcacatcgaacgccgccccgatctttctcatctgctcttcggactcaggggcctcgatgaacaagatgtcggcgcccgccttggcgtaggcctcgccacgccgcagcgcgtcatcgaaacccaacgatgccagcgcgtcagtgcgggccaggatcagaaagtcctctgacgagcgcgcgtcgcaggcgaccttgatcttgttgaccatctcctcagccgggaccacgggacgatggggggtatggccgcacttcttcgggaagtgctgatcttccagctggatcactgcgacgccggctttctcataacctcgcacggtgtgcgcgacgttgagcaggccaccatagccggtgtcgccgtcggcgatcagcggcttgtggatggcgtgggcgatggcctcggcgcggtcgaccatgtcggtgtaggtggccaggcccgcgtcgggctgccccagataggacgccacgaccccgtagccggtcatatagatcgcctgcgcctcggtgcgatcggccagcttagccgagaccagatcgaaaacgcccggggcagtgatgaactgcccgctcttcagcatcgcgcggatggtgttcttggtggtggtttcggtgttcattttatcttcctttttggttatgagacgaggacacactgtccgccccgacggattaggttttctcagaaccggcgtgagcttcgttgcgccgtgcgttaactgagggccgagttcaccggcgggttgagcatgcctgtcaggatcgcgatgtcgtcgatcatttcgaggccgagcacggtgcgctggatggcgtcttggcggcggcgcccgatcactctatgggtcagatggcgatacttgtcgacgatttgggcgttggtgagttggtggtccccggtgccgcgcggatgggtgactacctgctcacgtgttgtgccgtcatggagggtaatcaacacgcgcgtggtgaggcgctgacttgccggcagtgcgtcgtaggcctttacgtggtgggtgtgtgttcgggtgatgagct

SEQ ID NO: 273 - DNA, 4000 bp, Escherichia coli
  misc_feature (821)..(821): n is a, c, g, or t
  misc_feature (967)..(967): n is a, c, g, or t
  misc_feature (1252)..(1252): n is a, c, g, or t
  misc_feature (1986)..(1986): n is a, c, g, or t
  misc_feature (2963)..(2963): n is a, c, g, or t
ctcgttgagctgcctatgctgggatttccgaagcagacagaaagcatcctttacaggatacttagcaacggattcataccggttatagcgcatgtggagcgatacgccgatatccggaaggacattgaaatacttaagggatttatcgagatgggctgtatttcccaggtaaatgcaacatcgataaacggcacggcaagcaggaaaatccaggagacggcaaaaaccgtaataatcagcagcatggcccatcttgtcgcatcggactgccattcggaccgcaggaggagtcccaggctgaaagcagcatttgaaactgtaaggacctgggcaggagacgaaaaagcggagatgctgttctccaggaatccccggtccatattggaaaatgaagcagtacatgtcgacgagcccgttataatacgaaagaaaaaatttttcagtatcaaattaccgcataaactgccatgggaggtttaaaaagtgcaatatgaacagcaagagcaggagcttgatttgagagaaataatacatatattgactgtacgttggtggataattgcaatattcacggcattgtcgataataatcacagggttcgtgacatttacgatgatcgatcctgtatacaaggctgaaacatctctgtttgttggaaaagaaagtgacaagatcgcgtcactggatctcggtgagttcaacctcaataaaagccttgtatcggactaccgtcagctcatattgagccgcctggtgtcccaggaggtaatcgatgagctgggacttgacatgaccgtaagtacattccagaaaaaagttgnagttactacgatcgaagattccagactgttcaagatatcattcgaaagtacggacccgaaaatggccatggatgtggcaaacgccctggcgcaggtactggtggagaaagcgcaggatatcatacaagtaaaaaatattaaaatantcgatgaggcagaactgcctgagaacccgataaaaccgaataaaattcagaatttgctggtagctgcggtacttggtgcctttatcggcgcaggcgcagttatccttgttgaatatctcgattacacgataaaaaatgccaatgatgtggaaagacttctcaaacttaatacgatcggtgaaataccacagtttgcgggtgaaaaaagaggcaagagcaaagggcttttttcaaagagaaaacacagttccggcaaaaaacgggacaaaaatgctgtcagccatntgctgataactataacggatcccaaggctccggcttcagaagcatacaggtcactgcgtacaaatataggctattcaggcattgacaaacaggtcaggctgatagtgttaacaagttcccgcatggcagaaggaaaatcgacgacggccgcaaacatggccgtcagtatggcacaatcagggaaaaatgtgctgctgatagacgcagacctgagaaagccgagagtccacaggtatttcaacctgtcaaacgatataggcttaactgatattgttgtaaagaacgtctcaacggaggaggcaattaagaagttcagctatgttgaaaacctcagcattatatgcagcggatcggtgcctccgaatcctaccgagatacttgaatccaaaaagctcgcagaattgctgcaggagctcaaggaaaaatttgatattgtaataatagatacgcctcctgtgggtcagcttactgacggtgctatactggccagtatagcagacggcgttatactcgttgcggcatcaggtgagtcgaacatagatatggtaaggcgcgccagggcagcacttatgcaggttaacgccaacataataggcgtagtcctgacaaagataaacaaaaccaggagcggaagttactatacgtattacaattatgacaaatattatggcagcgaagattaataagtaagaaacaaatgcagataaaatgcagttgttaagtaattatgcaantaatgtaaaaataagtattgactaaaccactttattactataatatgggttttgtgaatatacggtatgtgccaacaaagcaaaaacttttatatgaatctgaaaatgaattatagtacagatcgcggcaaaatataacggcatataccggactgcacacaaaagacaggtagtgaagacacttaaagaagaaagatacgaaaaaatccgaggtccgtaaatggtgtttcggcccgtttccgggacaaggaggtcaaatgcaggtttgtgggggacgtttatggtttttgccatatgcgaatggcgaagctgcgcctttctgcgcaaattcttgcaaatgatccatatcagcagattagcaaaaattagaaataataaacagatattgtattttatctattatgtcttatacccaggaggagaagagatgcaaaaagctatcagaatagtctcacttgtaattatcgatgcaatactgctgaatctctctctctgccttgcacttctcgtcagattcgatacagatataccgcaacagtatttatcgtatatgagggacagtgcactcgcagttacagtgctgcagttagtaatattcttcgttttcggtctgtacaggagcctttgggaatacgcaagcatagaagaattggtccagatcgcaatggcaaccacagccgcgacagttctcagatatgtcgcagaactggtaacaggaaatgcctttccgatatcgatctatattgcatcatgggcattcatctgcatgctggccggcggcgtgaggatcagttaccggtgcgttcgccggctcaggacacgtattgagagaaaccggtgcaactccagcagggtcatgatcattggcgcaggaagcgcgggttcgatgcttatcaaagaattgaaaaaccatgctgacatgaatatggtaccggtagtaatggtagatgacgataaaacaaagcacggcactaccnttaacggtgtcccggtcgtagccggaagggagaaaataaaggaagtagcaaaacgatataaaatagatgagatcatagtcgcaataccatctgcatccagaagggaaatagccgaactgctacgcataagcaaggaaacgaagtgcaggctcaagacattgcccaatgtacttgaactcatggatggagaggtaaacgtaaaacagatccgcgatgtcaacattgaagacttgcttggccgcgacgaggtcagcctgaacattgatgaaatatcggggtatcttaaagatgaagtagtcatggtaaccggcggaggcggctcaataggatcggaactctgccgccagatcgccaggttcgggccaaagaaactaatcatattcgatatatatgagaataatgcatacgatctgcagaacgaactggtattcaaatacaaggataaactggatcttgaagtagtcatcggttcctgccgggacagggaaaggctgaaagacgtgtttgagcgttacaggccgggagtcgtgttccatgcggcagcccacaagcatgtaccgctgatggagagcaacccgtccgaagcggtgaagaacaatgtattcgggactctgaatacgtgcaggcgtgccattgactacggtacaaagaaatttatactgatttccactgacaaggcagtaaaccccaccaacataatgggagcgtcaaaacgtcttgccgagatcatagtccagtccatgaacaggatgggaaacacgaagttcgcagcggtacgctttggtaatgtgctgggaagtaacggcagcgttataccgctatttaagaaacagataattcgcggcggcccagttactgttactcaccctgatatcacgagatatttcatgacaattccggaagcagcacagctggttatacaggcaggggcactggcaaaaggcggagaagtattcgtgctggatatgggcgagcctgtgaagatagatgaccttgccagggatctgatacgtctttcaggccttgaaccggatgtg

SEQ ID NO: 274 - DNA, 4000 bp, Escherichia coli
  misc_feature (1200)..(1200): n is a, c, g, or t
  misc_feature (1203)..(1203): n is a, c, g, or t
  misc_feature (1652)..(1652): n is a, c, g, or t
  misc_feature (1983)..(1985): n is a, c, g, or t
  misc_feature (1989)..(1989): n is a, c, g, or t
  misc_feature (1995)..(1995): n is a, c, g, or t
  misc_feature (2009)..(2009): n is a, c, g, or t
  misc_feature (3037)..(3037): n is a, c, g, or t
  misc_feature (3797)..(3797): n is a, c, g, or t
  misc_feature (3812)..(3812): n is a, c, g, or t
  misc_feature (3878)..(3878): n is a, c, g, or t
gaaggtgctggattcgaattcgaaaacgctattgtcggtggggtagttcctcgtgaatacatccctgcagttgaagctggattgaaagacgctatggaaaacggggtattagctggttatccattagttgacatcaaagctaaactttacgatggatcataccatgatgtcgattcatctgaaacagccttcaaagttgccgcttctatggcattgaaagctgctgctaagaaagctcaacctgctatcttagaacctatgatggctgttgaaattacagttcctgaagaatacttcggagatgtaatgggacacgttaacgctcgtcgtggacgtgttgaaggttctgaagttcgtggtaacgcacaaatcgttaaaggtatgattcctttatcagaaatgttcggttacgcaactacattacgttctgcaacacaaggtcgtggtactttcagtatgacatttgaccactatgaagatgttcctaagagcattgcagaagaaatcattaagaaaaacggcggtaacggagaataatctctagcactgcatcctatcaaatgaactgaatcggctggttatgtcagtcataaccagttgatttttaagagagttctttggtataattacaatcggtagatactgttatagaatctaacaaaactcaattattaggaggaatcatttaaatggcaaaagaaaaatttgaccgttcaaaaccacacgttaacattggtacaatcggccacgttgaccacggtaaaacaacattaactgctgctattacaactgtattagctaagaaaggtttcgcgcaagctcaagattacggttcaatcgataaagctccagaagaacgcgaacgtggtatcacaatcaacacagctcacgttgagtacgaaactgacactcgtcactacgctcacgttgactgcccaggacacgcggactacgttaaaaacatgatcactggtgctgctcaaatggacggtgctatcttagtagtatctgcagctgacggcccaatgccacaaacacgtgaacacatcttattatcacgtcaagtaggtgttccttacatcgttgtattcttaaacaaagttgacatggttgacgatgaagaattattagaattagtagaaatggaagttcgtgacttattatcagaatacgatttcccaggcgatgacactccagttnttncaggttctgctttacgcgctttagaaggcgacgcttcatacgaagaaaaaatcttagaattaatggctgcagttgacgaatacatcccaactccagaacgtgacgttgacaaaccattcatgatgccagtcgaagacgtgttctcaatcacaggtcgtggtactgttgctacaggtcgtgttgaacgtggacaagttcgtgttggtgacgaagttgaaatcgttggtatttcagaagaaacttctaaaacaactgttacaggtgttgaaatgttccgtaaattgttagactatgctgaagcaggggataacattggtacattattacgtggtgttacacgtgacaacatcgaacgtggacaagttcttgctaaaccaggaacaatcactccacatactaaattcaaagctgaagtttacgtattaactaaagaagaaggtggacgtcanactccattcttcactaactaccgtcctcaattctacttccgtacaacagacatcactggtgtttgcttgttaccagaaggcgttgaaatggtaatgcctggtgacaacgtaactatggaagttgaattaattcacccagttgctatcgaaaacggtactaaattctctatccgtgaaggtggacgtacagtaggtgctggttcagtagcttctatcgaaaaataatttttcttaaaattgattttcaagactatccaattttggatagtctttttttattaaaattttttaaattaaaatgtcagacaattgaaagcgaaaaacaaaaatnnnagtnaaatgncaaaaacgttgatntaacaacgtttgtaaagggtttaaaacaaaatggaacacacgggcgcgtgtgcataaataaatgttgttaaatcaacggttttcgcttgcaatcaaaaaaagaatcttgtatactattaaaagtgccgcagaggaatgtaaattctaaagcagcataccccctcttaaaataagaaggggagctatgaaacgagaggttgcgacacgcccggacgctttgccacgaaagggtcaagtcggaaattcgcgtggagctagtcttatgacaacattagacgaaggaggaaagacaatggcaaaacaaaaaatccgtatccgtttgaaagcttacgaacaccgtgcgcttgatcaatcagcggaaaaaatcgtagaaacagcaaaaagaactggtgctagcgtagctggtccaattccattgccaacagaaagatcgctttacacagttattcgtgcgactcacaaatataaagattctcgcgaacaatttgaaatgcgtacacacaagcgtttgatcgacatcgttaatccaacgccaaaaactgttgatgccttaatgaagcttgatttaccaagcggcgttgacatcgaaatcaaattataataaatagaaaaatggaggtgtaaccatgaccaaaggaatcttaggcaaaaaagtagggatgactcaatactttacagaagcaggtgaacttattcctgtaacagtagttgaagtaactccaaacgttgttcttcaattaaaaacaatcgaaaacgacggttacgaagctgttcaattaggtttcgacgacttacgtgaagttttatcaaatcgccctgctaaaggtcatgtagcaaaagcaaatgctactcctaagcgcttcattcgtgaattcaacaatgtcgagcttagcgagtacgaagtaggacaagaaattacagttgatgtattcaaagcaggagacatcgttgacgtaacaggtacatctaaagggaaaggtttccaaggtgctatcaaacgtcatggacaatctcgcggaccaatggcncacggttctcgttaccaccgtcgtcctggttcaatgggtggagcatcattcccatcacgcgttttcaaaggtaaagcattacctggacaaatgggtggcgaccgtatcactattcaaaacttagaagtagtgaaagttgatgcagaacgcaatgtaatcttaatcaaaggtaacgtacctggatctaagaaatcattagtagaaattaaaacagcaattaaatctaaataataaatagggaaggaggaacgagagaatgacaaaagttacattatttaaacaagatggaacaacaaacggagaaatcgaattaaactcagaaatcttcggaattgaaccaaacgaaaatgtagtattcgacgcagtaatcatgcaacgcgcttcattacgtcaaggaacacacgctgttaaaaaccgtagtgcagtaagcggaggcggccgtaaaccatggcgccaaaaaggaactggtcgtgctcgtcaaggatcaatccgttcaccacaatggcgtggcggaggtattgtattcggaccaacacctcgttcatatagttacaaattacctaaaaaagtacgtcgcttagcgattaaatcagtattatcacaaaaagtattggataacaagcttgttgtagtggaagcattacaatttgacgcaccaaaaacaaaagagtttgcacaagtattgtctaacttaaacgttgatacaaaagtgttagtagttgtagaatcttcaaacgatttcgcattattagcagctcgnaacattccaaacgtnacaatcgttgacgaaacagatgttacagtattagacgttgtaaacaacgacaaattattattcacnaaagcagctctttctaaagtagaggagggacttcaataatggatgcacgtgacgtaatcaaacgccctatcattactgaagcttcaatgcttgctactgacgaaaagaaatacacttttgaa

SEQ ID NO: 275 - DNA, 4000 bp, Escherichia coli
  misc_feature (257)..(257): n is a, c, g, or t
  misc_feature (259)..(259): n is a, c, g, or t
  misc_feature (309)..(309): n is a, c, g, or t
  misc_feature (562)..(562): n is a, c, g, or t
  misc_feature (791)..(791): n is a, c, g, or t
  misc_feature (1951)..(1951): n is a, c, g, or t
  misc_feature (2141)..(2142): n is a, c, g, or t
  misc_feature (2145)..(2145): n is a, c, g, or t
  misc_feature (2147)..(2150): n is a, c, g, or t
  misc_feature (2154)..(2156): n is a, c, g, or t
  misc_feature (2158)..(2161): n is a, c, g, or t
  misc_feature (2163)..(2165): n is a, c, g, or t
  misc_feature (2171)..(2171): n is a, c, g, or t
  misc_feature (2174)..(2174): n is a, c, g, or t
  misc_feature (2176)..(2179): n is a, c, g, or t
  misc_feature (2181)..(2186): n is a, c, g, or t
  misc_feature (2188)..(2190): n is a, c, g, or t
  misc_feature (2193)..(2194): n is a, c, g, or t
  misc_feature (2196)..(2213): n is a, c, g, or t
  misc_feature (2218)..(2221): n is a, c, g, or t
  misc_feature (2223)..(2232): n is a, c, g, or t
  misc_feature (2237)..(2240): n is a, c, g, or t
  misc_feature (2242)..(2248): n is a, c, g, or t
  misc_feature (2250)..(2254): n is a, c, g, or t
  misc_feature (2256)..(2261): n is a, c, g, or t
  misc_feature (2263)..(2293): n is a, c, g, or t
  misc_feature (2295)..(2297): n is a, c, g, or t
  misc_feature (2299)..(2302): n is a, c, g, or t
  misc_feature (2305)..(2305): n is a, c, g, or t
  misc_feature (2307)..(2312): n is a, c, g, or t
  misc_feature (2314)..(2315): n is a, c, g, or t
  misc_feature (2317)..(2345): n is a, c, g, or t
  misc_feature (2347)..(2350): n is a, c, g, or t
  misc_feature (2352)..(2357): n is a, c, g, or t
  misc_feature (2359)..(2375): n is a, c, g, or t
  misc_feature (2377)..(2385): n is a, c, g, or t
  misc_feature (2387)..(2395): n is a, c, g, or t
  misc_feature (2398)..(2401): n is a, c, g, or t
  misc_feature (2403)..(2421): n is a, c, g, or t
  misc_feature (2423)..(2434): n is a, c, g, or t
  misc_feature (2436)..(2437): n is a, c, g, or t
  misc_feature (2439)..(2447): n is a, c, g, or t
  misc_feature (2449)..(2454): n is a, c, g, or t
  misc_feature (2456)..(2464): n is a, c, g, or t
  misc_feature (2466)..(2466): n is a, c, g, or t
  misc_feature (2468)..(2470): n is a, c, g, or t
  misc_feature (2472)..(2485): n is a, c, g, or t
  misc_feature (2487)..(2491): n is a, c, g, or t
  misc_feature (2493)..(2505): n is a, c, g, or t
  misc_feature (2508)..(2512): n is a, c, g, or t
  misc_feature (2514)..(2518): n is a, c, g, or t
  misc_feature (2520)..(2520): n is a, c, g, or t
  misc_feature (2522)..(2558): n is a, c, g, or t
  misc_feature (2560)..(2566): n is a, c, g, or t
  misc_feature (2568)..(2580): n is a, c, g, or t
  misc_feature (2583)..(2620): n is a, c, g, or t
  misc_feature (2622)..(2629): n is a, c, g, or t
  misc_feature (2634)..(2648): n is a, c, g, or t
  misc_feature (2650)..(2651): n is a, c, g, or t
  misc_feature (2653)..(2681): n is a, c, g, or t
  misc_feature (2683)..(2699): n is a, c, g, or t
  misc_feature (2702)..(2703): n is a, c, g, or t
  misc_feature (2706)..(2736): n is a, c, g, or t
  misc_feature (2738)..(2749): n is a, c, g, or t
  misc_feature (2751)..(2779): n is a, c, g, or t
  misc_feature (2781)..(2787): n is a, c, g, or t
  misc_feature (2789)..(2808): n is a, c, g, or t
  misc_feature (2810)..(2817): n is a, c, g, or t
  misc_feature (2820)..(2828): n is a, c, g, or t
  misc_feature (2830)..(2839): n is a, c, g, or t
  misc_feature (2841)..(2860): n is a, c, g, or t
  misc_feature (2862)..(2887): n is a, c, g, or t
  misc_feature (2889)..(2890): n is a, c, g, or t
  misc_feature (2892)..(2903): n is a, c, g, or t
  misc_feature (2905)..(2914): n is a, c, g, or t
  misc_feature (2916)..(2916): n is a, c, g, or t
  misc_feature (2918)..(2929): n is a, c, g, or t
  misc_feature (2931)..(2944): n is a, c, g, or t
  misc_feature (2946)..(3023): n is a, c, g, or t
  misc_feature (3025)..(3025): n is a, c, g, or t
  misc_feature (3027)..(3037): n is a, c, g, or t
  misc_feature (3039)..(3042): n is a, c, g, or t
  misc_feature (3044)..(3057): n is a, c, g, or t
  misc_feature (3060)..(3062): n is a, c, g, or t
  misc_feature (3064)..(3069): n is a, c, g, or t
  misc_feature (3071)..(3075): n is a, c, g, or t
  misc_feature (3077)..(3096): n is a, c, g, or t
  misc_feature (3098)..(3100): n is a, c, g, or t
  misc_feature (3102)..(3103): n is a, c, g, or t
  misc_feature (3105)..(3111): n is a, c, g, or t
  misc_feature (3113)..(3124): n is a, c, g, or t
  misc_feature (3126)..(3140): n is a, c, g, or t
  misc_feature (3142)..(3164): n is a, c, g, or t
  misc_feature (3166)..(3169): n is a, c, g, or t
  misc_feature (3171)..(3172): n is a, c, g, or t
  misc_feature (3174)..(3195): n is a, c, g, or t
  misc_feature (3197)..(3203): n is a, c, g, or t
  misc_feature (3205)..(3210): n is a, c, g, or t
  misc_feature (3212)..(3245): n is a, c, g, or t
  misc_feature (3250)..(3260): n is a, c, g, or t
  misc_feature (3262)..(3280): n is a, c, g, or t
  misc_feature (3282)..(3304): n is a, c, g, or t
  misc_feature (3306)..(3307): n is a, c, g, or t
  misc_feature (3309)..(3315): n is a, c, g, or t
  misc_feature (3317)..(3330): n is a, c, g, or t
  misc_feature (3332)..(3335): n is a, c, g, or t
  misc_feature (3338)..(3362): n is a, c, g, or t
  misc_feature (3365)..(3398): n is a, c, g, or t
  misc_feature (3400)..(3403): n is a, c, g, or t
  misc_feature (3405)..(3415): n is a, c, g, or t
  misc_feature (3417)..(3430): n is a, c, g, or t
  misc_feature (3432)..(3433): n is a, c, g, or t
  misc_feature (3435)..(3442): n is a, c, g, or t
  misc_feature (3448)..(3449): n is a, c, g, or t
  misc_feature (3452)..(3453): n is a, c, g, or t
  misc_feature (3455)..(3457): n is a, c, g, or t
  misc_feature (3459)..(3461): n is a, c, g, or t
  misc_feature (3463)..(3486): n is a, c, g, or t
  misc_feature (3489)..(3493): n is a, c, g, or t
  misc_feature (3495)..(3500): n is a, c, g, or t
  misc_feature (3502)..(3511): n is a, c, g, or t
  misc_feature (3513)..(3523): n is a, c, g, or t
  misc_feature (3525)..(3526): n is a, c, g, or t
  misc_feature (3528)..(3529): n is a, c, g, or t
  misc_feature (3531)..(3531): n is a, c, g, or t
  misc_feature (3533)..(3535): n is a, c, g, or t
  misc_feature (3537)..(3538): n is a, c, g, or t
  misc_feature (3540)..(3545): n is a, c, g, or t
  misc_feature (3547)..(3548): n is a, c, g, or t
  misc_feature (3550)..(3551): n is a, c, g, or t
  misc_feature (3553)..(3570): n is a, c, g, or t
  misc_feature (3572)..(3611): n is a, c, g, or t
  misc_feature (3613)..(3618): n is a, c, g, or t
  misc_feature (3620)..(3646): n is a, c, g, or t
  misc_feature (3648)..(3656): n is a, c, g, or t
  misc_feature (3658)..(3658): n is a, c, g, or t
  misc_feature (3660)..(3674): n is a, c, g, or t
  misc_feature (3676)..(3689): n is a, c, g, or t
  misc_feature (3691)..(3697): n is a, c, g, or t
  misc_feature (3699)..(3699): n is a, c, g, or t
  misc_feature (3702)..(3723): n is a, c, g, or t
  misc_feature (3725)..(3780): n is a, c, g, or t
  misc_feature (3782)..(3818): n is a, c, g, or t
  misc_feature (3820)..(3865): n is a, c, g, or t
  misc_feature (3867)..(3877): n is a, c, g, or t
  misc_feature (3879)..(3908): n is a, c, g, or t
  misc_feature (3910)..(3964): n is a, c, g, or t
  misc_feature (3966)..(4000): n is a, c, g, or t
ctccgaataccataatttatagctcaggagtgagactatgggagttaacttccattgtcaaaagggaaacaacccagaccaccagctaaggtccctaattataactaagtgggaaaggaggtggagattcacaaacaactaggaggttggcttagaagcagccatacctttaaagagtgcgtaatagctcactagtcgagagtctctgcgccgacaatgtaacggggctaagttataaaccgaagctgtggaatccntntggattggtaggagagcgttctgtaggccgttgaagaagaagggtaaccnactttggaggtatcagaagtgagaatgcaggaataagtagcgagaaagggggcgagaatccccctcgccggaagaccaaggttttcagggtaaagcttgtcttccctgagtaagccgggacctaagcccaggctataatgcgtaggcgaatggaaaacagattaatatttctgtgccagtcatttattgtgatggagggacgcagaagggtatgcgcgcggacgatcggttgtgtccgtagaagtatgtaggntgacttagtaggtaaatccattaagttatatctgaggtatgatatacagtcgtaagatgaatgcgcaaatcccacgctgccaagaaaagcttctaacgttaatatatgactgcccgtactgtaaaccgacacaggtggtcaggatgagaaatctaaggcggacaggctaactctcgttaaggaactctgcaaaataacctcgtaacttcgggagaagaggagcccttgngtgttagtatccatgcgatacaaagcgctcgagggtcgcagtgaagaggctcaagcaactgtttaacaaaaacacaggtctatgctaagctggaaggcgatgtatatgggctgacacctgcccagtgctggaaggttaagaggaggagtgagagctccgaattgaagccccagtgaacggcggccgtaactataacggtcctaaggtagcgaaattccttgtcgggtaagttccgacctgcacgaatggtgtaatgatttgagcgctgtcttgacgggaggcctggtgaaattgtattaccggtgaagataccggttacctacagtaggacggaaagaccccatggagctttactgtagcttggtattgggttttggcattgcatgtataggatagttgggagactatgatgatatggcgctagctgtatcggagtcatcggtggaataccaaccattcaatgctgaaattctaatctgtggtttgtagccacggagacagtgctaggtgggcagtttgactggggcggtcgcctccgaaagagtaacggaggcgttcaaaggttctctcaggttggatggaaatcaaccatagagtgcaatggcataagagagcttgactgcaagactgacgggtcgagcagatgcgaaagcaggacatagtgatccggcgattccgaatggaagggtcgtcgctcaacggataaaagctaccctggggataacaggctgatcctacccgagagtccatatcgacggtagggtttggcacctcgatgtcggctcatcgcatcctggggctggagaaggtcccaagggttgggctgttcgcccattaaagcggtacgtgagctgggttcagaacgtcgtgagacagttcggtccctatccactgtaggcgttagaatattgagaagacctgtccttagtacgagaggaccgggatggacaaacctctgatgtaccagttgtcacgccagtggcacagctgggtagtcacgtttggaatagataaccgctgaaagcatctaagcgggaaactaacttcaagataagtattctttaagataccttcgagcctaggaggttgataggttgggggtgtaagtacagcaatgtatttagctgaccaatactaattatcgaagttttaatctaaantctactatatagtttcaagtgttcagacttgcgcataataactttatgtgataaaatatatttgcttggtgagtatagctatgggggtacacctagttacattccgaacctagaagttaagcccatatacgctgatggtacttggctggaagcggcctgggagagtatggatttgccaagctattttttnnggnannnnagtnnntnnnncnnntttttnttnannnnannnnnnannnttnnannnnnnnnnnnnnnnnnnttttnnnntnnnnnnnnnnttttnnnntnnnnnnntnnnnnannnnnntnnnnnnnnnnnnnnnnnnnnnnnnnnnnnnnannnannnnaanannnnnnannannnnnnnnnnnnnnnnnnnnnnnnnnnnnannnnannnnnnannnnnnnnnnnnnnnnnannnnnnnnnannnnnnnnnaannnntnnnnnnnnnnnnnnnnnnnannnnnnnnnnnnanntnnnnnnnnnannnnnnannnnnnnnnanannnannnnnnnnnnnnnnannnnntnnnnnnnnnnnnnaannnnnannnnnanannnnnnnnnnnnnnnnnnnnnnnnnnnnnnnnnnnnntnnnnnnnannnnnnnnnnnnnaannnnnnnnnnnnnnnnnnnnnnnnnnnnnnnnnnnnnnannnnnnnnaaaannnnnnnnnnnnnnnannannnnnnnnnnnnnnnnnnnnnnnnnnnnntnnnnnnnnnnnnnnnnnaannaannnnnnnnnnnnnnnnnnnnnnnnnnnnnnnannnnnnnnnnnnannnnnnnnnnnnnnnnnnnnnnnnnnnnnannnnnnnannnnnnnnnnnnnnnnnnnnannnnnnnnttnnnnnnnnntnnnnnnnnnntnnnnnnnnnnnnnnnnnnnnannnnnnnnnnnnnnnnnnnnnnnnnnannannnnnnnnnnnnannnnnnnnnnanannnnnnnnnnnnannnnnnnnnnnnnnannnnnnnnnnnnnnnnnnnnnnnnnnnnnnnnnnnnnnnnnnnnnnnnnnnnnnnnnnnnnnnnnnnnnnnnnnnnnnanannnnnnnnnnnannnnannnnnnnnnnnnnnttnnntnnnnnntnnnnntnnnnnnnnnnnnnnnnnnnnannnannannnnnnntnnnnnnnnnnnnannnnnnnnnnnnnnntnnnnnnnnnnnnnnnnnnnnnnntnnnnannannnnnnnnnnnnnnnnnnnnnntnnnnnnnannnnnnannnnnnnnnnnnnnnnnnnnnnnnnnnnnnnnnnaaaannnnnnnnnnnannnnnnnnnnnnnnnnnnnannnnnnnnnnnnnnnnnnnnnnnannannnnnnntnnnnnnnnnnnnnntnnnnttnnnnnnnnnnnnnnnnnnnnnnnnnaannnnnnnnnnnnnnnnnnnnnnnnnnnnnnnnnnannnnannnnnnnnnnnannnnnnnnnnnnnnannannnnnnnnaaaaannaannannnannnannnnnnnnnnnnnnnnnnnnnnnnaannnnnannnnnnannnnnnnnnnannnnnnnnnnnannannanannnannannnnnnannannannnnnnnnnnnnnnnnnnannnnnnnnnnnnnnnnnnnnnnnnnnnnnnnnnnnnnnnnannnnnntnnnnnnnnnnnnnnnnnnnnnnnnnnntnnnnnnnnnanannnnnnnnnnnnnnnannnnnnnnnnnnnnannnnnnnanaannnnnnnnnnnnnnnnnnnnnntnnnnnnnnnnnnnnnnnnnnnnnnnnnnnnnnnnnnnnnnnnnnnnnnnnnnnnnnannnnnnnnnnnnnnnnnnnnnnnnnnnnnnnnnnnnntnnnnnnnnnnnnnnnnnnnnnnnnnnnnnnnnnnnnnnnnnnnnnnannnnnnnnnnnannnnnnnnnnnnnnnnnnnnnnnnnnnnnnannnnnnnnnnnnnnnnnnnnnnnnnnnnnnnnnnnnnnnnnnnnnnnnnnnnnnnannnnnnnnnnnnnnnnnnnnnnnnnnnnnnnnnnn

SEQ ID NO: 276 - DNA, 4000 bp, Escherichia coli
  misc_feature (13)..(13): n is a, c, g, or t
  misc_feature (16)..(16): n is a, c, g, or t
  misc_feature (1560)..(1560): n is a, c, g, or t
  misc_feature (1576)..(1576): n is a, c, g, or t
  misc_feature (1579)..(1579): n is a, c, g, or t
  misc_feature (1584)..(1584): n is a, c, g, or t
  misc_feature (1606)..(1606): n is a, c, g, or t
  misc_feature (1611)..(1611): n is a, c, g, or t
  misc_feature (1641)..(1641): n is a, c, g, or t
  misc_feature (1670)..(1671): n is a, c, g, or t
  misc_feature (1675)..(1675): n is a, c, g, or t
  misc_feature (1677)..(1680): n is a, c, g, or t
  misc_feature (1684)..(1686): n is a, c, g, or t
  misc_feature (1695)..(1699): n is a, c, g, or t
  misc_feature (1702)..(1703): n is a, c, g, or t
  misc_feature (1722)..(1722): n is a, c, g, or t
  misc_feature (1731)..(1731): n is a, c, g, or t
  misc_feature (1737)..(1737): n is a, c, g, or t
  misc_feature (1739)..(1740): n is a, c, g, or t
  misc_feature (1749)..(1750): n is a, c, g, or t
  misc_feature (1755)..(1755): n is a, c, g, or t
  misc_feature (1767)..(1768): n is a, c, g, or t
  misc_feature (1827)..(1829): n is a, c, g, or t
  misc_feature (1835)..(1835): n is a, c, g, or t
  misc_feature (2032)..(2032): n is a, c, g, or t
ggttgaatttcanacnagcaaaggagcgattcgctatcaattatatctaggaaatggaaaaattaaacgcattaaggaaacaaaaaattagggcagtaatcttactagaagcagtagtagctttggctgtgtttgccagcattgcgacccttcttttggggaaaattcagaaaaatagacaagaagaggcagaaatcttgcaaaaggaagaagtcttgcgtgtggcgaagatggctctgcaaacagggcaaaatcaggtaaacataaatggagtggagattcaggtatttgctagtgaaaaaggattggaggtctaccatggttcagagaaattgctcgatcttaaagagcagtaaggtaagagctttcactcttttagaatctctgattgcccttatcgtcattagcggaggtttgctactttttcaagctatgagtcagctcctcatttcagaagttcgttaccagcagcaaagcgagcaaaaagagtggctcttgtttgtggatcaactggaggcagagttagagcgttcgcagtttgaaaaggtagaaggcaatcgcctctacatgaaacaggatggtaaggatatctctatagggaaatctaaatcggatgattttcggaagaccgatgccagcggacggggctaccaacctatggtttatggacttaaatcagctcaaattacagagggaaatcaactggttcgcttccgtttccagtttcaaaaaggcttagaaagggagttcatctatcgtgtggaaaaagcaaaaagttaaggcaggcgttctcttatatgcagtcaccatggcagccatttttagccttttgttgcagttttatttgaatcggcaagtcgcccatcacaaagactttgccctaaacaaagaaaagttggcagcttttgctatggccaagcgaagtaaagataaggttgaacaagaaagtggagaacgagtctttaacttaggaaaagtcaggtatcacaatacgaaaacaggttttgcaacaagtgttcgtatgaataagggcaactatgaatttctctttcctcagatgaaaacccaagaaaagagaacagctaaaaaggaagaggtagcgactgattcaagcaatcaagcagggaagaaaaaatcagaagaaaagtctgaaaagaaagacaaatcctagtcaattcaacttctttgtgctaaactaaaagcatgaaacatgattttaatcacaaagcagaaacttttgattcgcccaaaaatatctttcttgcaaatttggtttgtcaagcagttgaaaaacagatcgctcttctatcagacaaagaaattctggatttcggtggtgggacaggtctattagctttgcccctagccaagcaggccaagtcggttacccttgtagatatctcggagaaaatgctggagcaagcccgtttgaaagcagagcaacaagacatcaagaatatccagtttttggagcaggatttactggcaaatcccttggaacagcaatttgacctgattgttgtcagtcgggttcttcatcatatgcctgatctagatgcnactcttgccatgtttnacnatcancttagggagaatggacaagttntcatngctgattttgtcaagacagataccaaccancatggttttgatttagctgaactggaaannaagntnnnncagnnnggtttttcnnnnnttnntagtcagattctctatagngctgaaggncttttncnnggaaattanncaganctctttttaacnntagcccaaaaatcactcgctgactaaagcagtgattttttctcttcagatggaaaaaannngggaantttgataagataggaatatggattttgaaaaaattgaacaagcttatacgtatttactagagaatgtccaagtcatccaaagtgatttggcgaccaacttttatgatgccttagtagagcaaaacagcatttatctagatggcgagactgagcaaaagcaggtcaaggagaacaatcaagcccttaagcgcttagcncttcgcaaggaagagtggctcaagacctaccagtttctcttgatgaaggcgggacaaacggagcctttacaggccaatcaccagtttacgccggatgccattgccctcctcttggtacttattgtggaagagttgctggatcaagaggaaattagcatcctcgaaataggttctggtatggggattttgggggctactttcttgacttctcttgctaaaaaagtagattacttgggaatcgaagtggatgacttgctgattgatttggcagccagtatggcagatgtgattggtttgcaggctggttttgtccaaggagatgccgttcgtccgcaaatgcttaaagaaagcgacgtggtcatcagcgacttgcctgtaggctattacccagacgatgccatcgcttctcgctatcaagtggcttctagtcaagagcatacctatgcccaccatttgctgatggaacaaggcttcaagtaccttaagtcaaatggctatgctatttttctagctccgagtgatttattgaccagccctcaaagtgactcattaaaagggtggctcaaagacgaagtgagtctggctgctatcatcgctctgccagaggatattttctcaactgcaagccaagctaaaagtatttttgtcttacagaagaaaagagacaaggaaatagaaccctttgtctaccctcttactagcttgcaagatccgtcagttttgttgacctttaaagaaaattttcaaaattggagcaaaggtactgaaatataaaagagattttgttataatagatgaaaacgcttaaaaagaggtatcatcttatgacaaaaacaattgcaatcaatgcaggaagctcaagcttgaaatggcaactataccaaatgccagaagaaactgtattggcgaaaggcttgattgaacgtattggcttgaaggattcgatctcaacagtaaaatttgacggtcgttcggagcaacaaattcttgatattgaagaccatacacaagccgttaaaattttattagatgacttgattcgttttgacattatcaaagggtacgacgaaattacaggtgtcggccaccgcgtcgttgcaggtggtgaatatttcaaggaatcaacagttgttgagggagatgtgttagaaaaagttgaggaattgggactgttggctcctcttcacaatccagctaacgcagctggaattcgcgcatttaaggaattgctgccagatattaccagtgttgtcgtatttgatacctcattccacacaaccatgccagagaaggcttatcgctaccctctaccaactaaatactacacagacaacaaggttcgtaaatatggtgcccacgggacaagccaccagtttgtcgcagaagaagcagcgaaacttttgggccgtcctctagaagatttgaaattgattacctgccatattggtaacggggcttctatcacagctgttaagggtgggaagtctgtggatacttctatgggattcacaccacttggaggtgtgatgatgggaactcgtacaggagatattgaccctgctatcatcccttatctcatgcaatatacagaggatttcaatacccctgaagatattagtcgcgttctcaatcgtgaatcagggctcatgggagtttctggccagtcaagcgatatgcgtgatgtgattgctgccatggaagcaggagaccatgatgcaactttggcttatgaaatgtatgttgatcgtatccaaaaacatatcggccaatatcttgcagtcctaaatggagcagatgcgattatcttcacagcaggtatcggtgaaaatgctgcaaacgtacgtgaagatgtcatctcaggtatctcttggtttggttgtgatgtggatccagaaaagaacgtctttggtgtaacgggagatatctcaactgatgcggcgaaaatccgtgtcttggttattccaacag

SEQ ID NO: 277 - DNA, 4000 bp, Escherichia coli
  misc_feature (11)..(11): n is a, c, g, or t
  misc_feature (86)..(86): n is a, c, g, or t
  misc_feature (107)..(107): n is a, c, g, or t
  misc_feature (233)..(233): n is a, c, g, or t
  misc_feature (260)..(260): n is a, c, g, or t
  misc_feature (380)..(380): n is a, c, g, or t
  misc_feature (404)..(404): n is a, c, g, or t
  misc_feature (521)..(521): n is a, c, g, or t
  misc_feature (1075)..(1075): n is a, c, g, or t
  misc_feature (1237)..(1237): n is a, c, g, or t
  misc_feature (1240)..(1240): n is a, c, g, or t
  misc_feature (1252)..(1252): n is a, c, g, or t
  misc_feature (1300)..(1300): n is a, c, g, or t
  misc_feature (1396)..(1396): n is a, c, g, or t
  misc_feature (1488)..(1488): n is a, c, g, or t
  misc_feature (1730)..(1730): n is a, c, g, or t
gtgcgtccggnggcagcctgcccggcgggctgcgcagcgccggcagcggatttacccttccgcaaaccccgccggcgggggagganttcaccatcccttcctcggcngccgacgggttcgaggatttcgtttcggggagcagtttcgaggtggagtccggcgccgggttcgggacgagtgccctggagttcatcccttccggggctacggccgggcagcagcggctggcggtngaggggcgtccggaatttaccgatccnctgccgttgggcggcgggtacctcgccgcgctgctgggcgggaggttcgtcgtggtggacgtgcggcgtgcccgcgagcgcattctttatgaggattacctgaagatgctcggaaacggntcttccgtgagccagcaactgctntttcccgagcggctggtgttgtcgggcgacgaatatgcgctgctcgaggagaacgccgtggaattcgcgtcgctgggattcgacatcgactttgcgggggaggggacgatcgaggtnaagggcactccggccgatatgccggccgatgccgtcgaccagatggtctacgacctgctgcaagccttttcgacgcccgtgtcgctcgcggatcagcgccgcgagaagatcgccgccgtcatggcgcgcggcggggcgaaaggcattccccgcaatatgtcgcgcgacgaagccgccgtactgctcgcccagctcgccgctacgggcaatttcagtttctcgccctcgggcaaagccataactgcagaaataacccccgaagatatccgtaccaaactgggataatccggtggaaaaacgtacttttgtaaaaattttacgcaatgaacagctattttcagacacccccggtggtgaaaaacctgataatcatcaatgccctggtctacatggctacggccctgatccaaccggcacataacgccatcatggagtattgcgccctgtggctgggagcgccgttgttccacacctaccagttcgtcacctatatgttcgtgcatgccaatttcgagcatatcttcttcaatatgttcgccttgtggatgttcggncgtacgttggaatacgaattggggtcgaagcgtttcctgacctattacatggtttgcggcatcggtgcggcgctgatccagtatttcacggcgctggcgttcggcgagctgcccatgtcgctggttggtgcttcgggcgcggtgatggggctgctgctcgcnttnggcgtcatgcancccaatgcggtcatcatgctgctgatcccgccgatcccgatgaaggcnaaatggttcgtcatcatctacggcgtcatcgaacttttcctcggctggcgcggcgtaggcaatgtggcgcatttcgcccacgtgggcggtatgctntggggtttcctgctgctccactggtggaagcagcgcggcataatccgcttctgagccgatgtccggcgaattctataagaacgattacggcngccggcgcggggagaaaccgcaccgcagcctgctcatgtggctgctcgacctggtgatgacgctcctgaccgtcgttgtcggggccacgatggccgtcacctatttcgtcccttatgtgaaccccgccggggtctggttctttcccctgctggggcttgccgccccggcgatctacgtcgctacggtcatcctggcgctctactgggtcatccgctggcggttgctccgcgccggaacgatnctggcgctggtcgtcatcggcctcttcaaggtttcgctcttctataagcccgaattccgccgcagctacggcgaggagagctacgaccgccgggctttcaaggtcatgacctataacgtgcgcagtttcttcggcgaaagcggagccagcaatgtcgatgacatcgtgcgcctgatcggcgaatacgatcccgatatcgtctgcatgcaggagttcaatgcccgcctggccgagaaatccgacgatttcgccctgttggacgagaaatacgaaagcgcggccttcggccgcacgcaggctcccgattcgctgtatggggcatcgcttttcatcctgagcaaataccgtatcctgcgctcgggcatcgtcctgacccccaatacgtcggtctgggccgacctgctgatcggtgacgatacggtgcgcgtgttcaacaaccacctgcgttcgacggcgatcaaggcggccgacaacgaatatatcaccaaccgcgatttcatctccgacacggcacgcgaagtcaagatccgcagcatcgtgagccgcctgcgcgagaacagcatcctgcgtgccgcacaggtcgatagcattgccgatgtcatcgccgacgcgcgtgcgcggtgcatcgtctgcggcgatttcaacgatacgccgatgtcctatgtttaccgcacgatggccggggggctgaacgacgctttcagcaagagcggttcgggctattcgcatactttccgcggcttcttcaatacgctgcgtatcgactatgtcctctgctccgacagtttcgacccggtttcctacgaggtgccgcaggtcgaatattcggatcacctgcccgtcgtggtgcgtctccaaaagaatctactgaataactaatccgataaactatgattttcgactctttgaagaacagcgcgctctattatccggtgagcccgcgtctggaaaaagccttcggcttcatcgcttcgaccgactgggaaacgatggagccggggatccatgaactcgacggcaaggacatctatgtcaacgtaatggaacctgagctgaaaaaaccggcggatgccaaactcgaaatacacgacgcctatatcgacatccaggtgctgatccgcggtgagcaggagaccttcgggtggagcgagcgtgccgacctgcgcaagccgctgggcgaattcgatgccgggaaggatatccgtttcttcgacgatgagccgcagaccttctatacgctgcgcccggggcagttcacgatcttcttccccgaggacggccatgcgccgatgatcggcgagggcaatgtacgcaagatcattgtgaaggttcgcaagtaacggcgggccggattacggatgcgcgagaggcggttccctgcggaaccgcctctcgttttgccgttatgctgcgtcgggttttcggggtgcgagccgcatcgcggggtaggtgtagcaggcggtgcaggcgacaaggacaatccccgaagcagaagctccggggattgtgtcgttatgtgccgtaagagtattattttccgatgccgtagtagcgcagcccggcgttgagcacctcttccttgtcgaagatgttgcggccgtcgaccaggatgttgtcgcgcatgagcgtgagcaattgcggccagtcgggcatccggaactgtttccactccgtgacgagtgcgatggcatcggcgccctttgcagcttcgtacatcgaacctgcgtaatgcaccccttcgtcgccgatcctgcggcgggcttcctccatcgccacggggtcgtagacccgaaccgtggcgcccgccttacgcaacaggtcgatcaccaccagtgccggcgcttcgcgcatgtcgtccgtttcgggcttgaacgcgaggccccatatcgcgatggtttttccgtgcaggtcgcccagtgcccgttgcagtttgccgaacaggatggatttctgcccttcgttgacccgttccaccgcctcgatgacctgcatcgtataaccgtgttcctgggccgtacgggccagggctttcacgtccttggggaagcacgagccgccgtagccgcagccggggtagaggaacttgctgccgatgcgggcatcggatccgatgcccttgcgcaccatttcgacgttcgcccctaccaggtcgcagagattggcgatctcgttcatgaacgaaatgcgggtcgccagcatggcgttggccgcgtatttggtcatttccgccgaggggatgtccatgaacagcacccggaaattgttgatca

SEQ ID NO: 278 - DNA, 4000 bp, Escherichia coli
  misc_feature (2)..(4): n is a, c, g, or t
  misc_feature (6)..(6): n is a, c, g, or t
  misc_feature (8)..(9): n is a, c, g, or t
  misc_feature (13)..(14): n is a, c, g, or t
  misc_feature (17)..(18): n is a, c, g, or t
  misc_feature (20)..(20): n is a, c, g, or t
  misc_feature (22)..(24): n is a, c, g, or t
  misc_feature (27)..(27): n is a, c, g, or t
  misc_feature (29)..(33): n is a, c, g, or t
  misc_feature (35)..(35): n is a, c, g, or t
  misc_feature (37)..(38): n is a, c, g, or t
  misc_feature (40)..(45): n is a, c, g, or t
  misc_feature (49)..(53): n is a, c, g, or t
  misc_feature (56)..(56): n is a, c, g, or t
  misc_feature (59)..(61): n is a, c, g, or t
  misc_feature (64)..(76): n is a, c, g, or t
  misc_feature (80)..(82): n is a, c, g, or t
  misc_feature (86)..(90): n is a, c, g, or t
  misc_feature (92)..(92): n is a, c, g, or t
  misc_feature (94)..(99): n is a, c, g, or t
  misc_feature (101)..(101): n is a, c, g, or t
  misc_feature (103)..(105): n is a, c, g, or t
  misc_feature (110)..(110): n is a, c, g, or t
  misc_feature (112)..(112): n is a, c, g, or t
  misc_feature (114)..(116): n is a, c, g, or t
  misc_feature (118)..(119): n is a, c, g, or t
  misc_feature (122)..(122): n is a, c, g, or t
  misc_feature (126)..(126): n is a, c, g, or t
  misc_feature (128)..(128): n is a, c, g, or t
  misc_feature (130)..(130): n is a, c, g, or t
  misc_feature (132)..(133): n is a, c, g, or t
  misc_feature (135)..(137): n is a, c, g, or t
  misc_feature (139)..(141): n is a, c, g, or t
  misc_feature (143)..(147): n is a, c, g, or t
  misc_feature (151)..(151): n is a, c, g, or t
  misc_feature (154)..(158): n is a, c, g, or t
  misc_feature (160)..(164): n is a, c, g, or t
  misc_feature (167)..(169): n is a, c, g, or t
  misc_feature (176)..(176): n is a, c, g, or t
  misc_feature (179)..(181): n is a, c, g, or t
  misc_feature (183)..(184): n is a, c, g, or t
  misc_feature (186)..(187): n is a, c, g, or t
  misc_feature (190)..(192): n is a, c, g, or t
  misc_feature (194)..(194): n is a, c, g, or t
  misc_feature (196)..(197): n is a, c, g, or t
  misc_feature (199)..(201): n is a, c, g, or t
  misc_feature (204)..(204): n is a, c, g, or t
  misc_feature (206)..(209): n is a, c, g, or t
  misc_feature (211)..(212): n is a, c, g, or t
  misc_feature (214)..(214): n is a, c, g, or t
  misc_feature (217)..(218): n is a, c, g, or t
  misc_feature (222)..(230): n is a, c, g, or t
  misc_feature (232)..(233): n is a, c, g, or t
  misc_feature (236)..(236): n is a, c, g, or t
  misc_feature (238)..(239): n is a, c, g, or t
  misc_feature (241)..(241): n is a, c, g, or t
  misc_feature (243)..(244): n is a, c, g, or t
  misc_feature (246)..(250): n is a, c, g, or t
  misc_feature (252)..(256): n is a, c, g, or t
  misc_feature (259)..(260): n is a, c, g, or t
  misc_feature (262)..(263): n is a, c, g, or t
  misc_feature (267)..(271): n is a, c, g, or t
  misc_feature (274)..(278): n is a, c, g, or t
  misc_feature (282)..(282): n is a, c, g, or t
  misc_feature (284)..(284): n is a, c, g, or t
  misc_feature (287)..(287): n is a, c, g, or t
  misc_feature (289)..(290): n is a, c, g, or t
  misc_feature (292)..(294): n is a, c, g, or t
  misc_feature (296)..(297): n is a, c, g, or t
  misc_feature (301)..(302): n is a, c, g, or t
  misc_feature (304)..(314): n is a, c, g, or t
  misc_feature (316)..(316): n is a, c, g, or t
  misc_feature (319)..(321): n is a, c, g, or t
  misc_feature (325)..(325): n is a, c, g, or t
  misc_feature (328)..(328): n is a, c, g, or t
  misc_feature (332)..(332): n is a, c, g, or t
  misc_feature (334)..(336): n is a, c, g, or t
  misc_feature (340)..(341): n is a, c, g, or t
  misc_feature (343)..(343): n is a, c, g, or t
  misc_feature (345)..(348): n is a, c, g, or t
  misc_feature (350)..(350): n is a, c, g, or t
  misc_feature (352)..(355): n is a, c, g, or t
  misc_feature (361)..(364): n is a, c, g, or t
  misc_feature (366)..(378): n is a, c, g, or t
  misc_feature (382)..(382): n is a, c, g, or t
  misc_feature (384)..(387): n is a, c, g, or t
  misc_feature (389)..(389): n is a, c, g, or t
  misc_feature (392)..(392): n is a, c, g, or t
  misc_feature (394)..(395): n is a, c, g, or t
  misc_feature (397)..(397): n is a, c, g, or t
  misc_feature (400)..(402): n is a, c, g, or t
  misc_feature (407)..(410): n is a, c, g, or t
  misc_feature (412)..(415): n is a, c, g, or t
  misc_feature (417)..(418): n is a, c, g, or t
  misc_feature (420)..(424): n is a, c, g, or t
  misc_feature (427)..(430): n is a, c, g, or t
  misc_feature (432)..(432): n is a, c, g, or t
  misc_feature (434)..(434): n is a, c, g, or t
  misc_feature (436)..(440): n is a, c, g, or t
  misc_feature (442)..(443): n is a, c, g, or t
  misc_feature (447)..(449): n is a, c, g, or t
  misc_feature (451)..(451): n is a, c, g, or t
  misc_feature (453)..(453): n is a, c, g, or t
  misc_feature (456)..(456): n is a, c, g, or t
  misc_feature (458)..(464): n is a, c, g, or t
  misc_feature (466)..(469): n is a, c, g, or t
  misc_feature (471)..(471): n is a, c, g, or t
  misc_feature (474)..(474): n is a, c, g, or t
  misc_feature (476)..(477): n is a, c, g, or t
  misc_feature (480)..(483): n is a, c, g, or t
  misc_feature (485)..(488): n is a, c, g, or t
  misc_feature (490)..(490): n is a, c, g, or t
  misc_feature (493)..(495): n is a, c, g, or t
  misc_feature (497)..(498): n is a, c, g, or t
  misc_feature (500)..(503): n is a, c, g, or t
  misc_feature (506)..(508): n is a, c, g, or t
  misc_feature (511)..(511): n is a, c, g, or t
  misc_feature (514)..(514): n is a, c, g, or t
  misc_feature (516)..(518): n is a, c, g, or t
  misc_feature (520)..(525): n is a, c, g, or t
  misc_feature (527)..(534): n is a, c, g, or t
  misc_feature (536)..(537): n is a, c, g, or t
  misc_feature (539)..(539): n is a, c, g, or t
  misc_feature (541)..(542): n is a, c, g, or t
  misc_feature (544)..(545): n is a, c, g, or t
  misc_feature (547)..(548): n is a, c, g, or t
  misc_feature (551)..(556): n is a, c, g, or t
  misc_feature (558)..(558): n is a, c, g, or t
  misc_feature (564)..(567): n is a, c, g, or t
  misc_feature (572)..(573): n is a, c, g, or t
  misc_feature (575)..(578): n is a, c, g, or t
  misc_feature (580)..(582): n is a, c, g, or t
  misc_feature (585)..(585): n is a, c, g, or t
  misc_feature (587)..(589): n is a, c, g, or t
  misc_feature (591)..(593): n is a, c, g, or t
  misc_feature (596)..(597): n is a, c, g, or t
  misc_feature (599)..(599): n is a, c, g, or t
  misc_feature (601)..(601): n is a, c, g, or t
  misc_feature (607)..(611): n is a, c, g, or t
  misc_feature (617)..(618): n is a, c, g, or t
  misc_feature (623)..(627): n is a, c, g, or t
  misc_feature (630)..(633): n is a, c, g, or t
  misc_feature (636)..(637): n is a, c, g, or t
  misc_feature (639)..(639): n is a, c, g, or t
  misc_feature (641)..(641): n is a, c, g, or t
  misc_feature (643)..(648): n is a, c, g, or t
  misc_feature (650)..(651): n is a, c, g, or t
  misc_feature (653)..(653): n is a, c, g, or t
  misc_feature (655)..(658): n is a, c, g, or t
  misc_feature (661)..(661): n is a, c, g, or t
  misc_feature (664)..(667): n is a, c, g, or t
  misc_feature (669)..(669): n is a, c, g, or t
  misc_feature (671)..(674): n is a, c, g, or t
  misc_feature (676)..(677): n is a, c, g, or t
  misc_feature (679)..(685): n is a, c, g, or t
  misc_feature (687)..(687): n is a, c, g, or t
  misc_feature (689)..(690): n is a, c, g, or t
  misc_feature (694)..(696): n is a, c, g, or t
  misc_feature (698)..(699): n is a, c, g, or t
  misc_feature (717)..(717): n is a, c, g, or t
  misc_feature (770)..(771): n is a, c, g, or t
  misc_feature (805)..(805): n is a, c, g, or t
  misc_feature (1095)..(1095): n is a, c, g, or t
  misc_feature (1137)..(1137): n is a, c, g, or t
  misc_feature (1140)..(1140): n is a, c, g, or t
  misc_feature (1960)..(1960): n is a, c, g, or t
  misc_feature (1966)..(1967): n is a, c, g, or t
  misc_feature (1972)..(1972): n is a, c, g, or t
  misc_feature (1974)..(1974): n is a, c, g, or t
  misc_feature (1978)..(1978): n is a, c, g, or t
  misc_feature (1993)..(1993): n is a, c, g, or t
  misc_feature (1997)..(1997): n is a, c, g, or t
  misc_feature (2514)..(2514): n is a, c, g, or t
  misc_feature (2877)..(2877): n is a, c, g, or t
  misc_feature (2889)..(2889): n is a, c, g, or t
  misc_feature (3143)..(3143): n is a, c, g, or t
  misc_feature (3293)..(3293): n is a, c, g, or t
  misc_feature (3677)..(3677): n is a, c, g, or t
  misc_feature (3680)..(3680): n is a, c, g, or t
  misc_feature (3803)..(3803): n is a, c, g, or t
  misc_feature (3809)..(3810): n is a, c, g, or t
  misc_feature (3812)..(3812): n is a, c, g, or t
  misc_feature (3998)..(3998): n is a, c, g, or t
cnnncngnntgcnnccnncntnnnccngnnnnncntnnannnnnngggnnnnnccncannngcnnnnnnnnnnnnnggcnnncggnnnnncncnnnnnngntnnngggtncngnnngnngcngggntncngnngnnntnnncnnnnngccnggnnnnngnnnnnccnnngggccgnccnnngnnannccnnngncnngnnnccncnnnntnntnccnnttcnnnnnnnnncnnggngnntnanngnnnnnannnnnccnntnngggnnnnnggnnnnngggnanccngnngnnncnnaacnntnnnnnnnnnnntnccnnngttnggngggngnnnggcnncngnnnncntnnnnggggcnnnngnnnnnnnnnnnnnggtngnnnncnggngnntnggnnnggggnnnngnnnnanngnnnnnggnnnngncngnnnnntnnttcnnntntnaantnnnnnnncnnnncnccncnnggnnnntnnnncnggnnngnncnnnnggnnnggngtnannncnnnnnncnnnnnnnngnngngnntnngnnccnnnnnngnacgggnnnncgggnngnnnncnnnccngnnngnnnccnngncngggggnnnnnccttannccttnnnnnctnnnngcnncncntnnnnnncnncntnnnngcnggnnnngntnnnntnncnnnnnnnantnngggnnntnnttttccttccatagattncggcgggttcgccgaaacggatggtctatgtgttgggttcttggggccccgcnncgcctcaccgatagagcgggtccgggacggcggncggagggcgaaataaccccgtccgcgcatcggccacacgggcggatgagcgaacggggtcattcacggttctaccagttctcgctgccctggtagagggggtacttggcgcagagtgcatccacgcgagcgcgcagggccgcgatgtccgggttcggcagcagcacggaggcgatgatgtcagccacctcggtgaagccctcggcgtcgaagccgcgggttgccagcgcggaggtgccgatgcgcagaccggaggtcaccatcggcgggcgcgggtcgttcggaacggcnttacggttgacggtgatgccggcgtcgtgcagcaggtcctcngcntccttgccgttgagcgcgtggtggcgcaggtcgacgagcaccaggtgaacgtcggtgccgccggaggcaatcgaaacgccggcgtccttcacgtcctgctccagcaggcgcttcgccaggatctgcgcgccctcaatggtgcgcttctgacgctccttgaagccctcggatgcggcaatcttgaacgcggtagccttcgcggcgatcacgtgcatgagcgggccgccctgctggccggggaacacggccgagtcaatcttcttcttcagctcctcggtgcagaggatgaagcccgagcgggggccgcccagggtcttgtgtacggtggaggacaccacgtgtgcgtgcgggacggggttcgggtgcagacccgcagccaccaggcccgcgaagtgtgccatgtccacccacaggtacgcgccgatttcgtcggcaatcgcgcggaatgcggcgaagtccagctggcgggggtacgcggaccagccggcgataatcagcttggggcgctcggccagggccagctcgcgcacctgctccatgtcaacgtagccgttctcgtccacgctgtaggcgacaacgttgtacagcttgccggagacgttcagcttcataccgtgggtcaggtggccaccgtgcgccagggacagacccatgatggtgtcgccggggttcagcagcgcgtgcatgacggcgttgttcgcctgcgcgccggagtggggctgtacgttcgcgtgctccgcgccgaagagctccttcacacgggcaatggcgaggtcctcaacgatatcgacgtactcgcagccgccgtagtagcggcggncggggnntcccncngcgnacttgttggtcagcnccgngccctggctctgcatcacagcgcgggggacaaagttctcggatgcaatcatctcgagggtgttctgctggcgcttgcgctccagctcaatggcttctgctacctcggggtcgaggtcggcgaggggcatctcgaggatcttctgctcggtcattacgctcctgggagtgtttttacggtatcttcggtggctcgtcatcggggttgcggcagcgtctgcggctgaaaaccctgaatgaaaaaatatgagctacacctcataataccgtaaagcccgttctccttcgagaaggaaaacgggctttgggatgcatcatgatgaagttttacggcgccggtatggtaccggtgcgggacgcttgacacgccccggcgggcctatcggcaaggcggcgcaggtcggtgagtcctaagcctggcgcaggatggcggaggcgtactccaggtaggcctcgcgggcgctatccttcttaccgccggccaccagctgggtctgcaccacgtaaccggtcagcacngagagcacggccgcgccgatgacggtcagccattcctcgagctcctcatcggtgaagtccagttcagcggcgccccaggcgcggtagcgctccagggcctgatcgcgcaggtaggttagctgctcggaaaccacggcacccagctgcggcatggagaccgcctcgccccaggtcaccagcaggtgacggcgcaccttgggggtgtccagcaccttcaggcacccgaacacgtagtcccagggctgctcggcgcggatgcggtcgaagggagccaggtccatgcgcgcggcggcgaggataatctcatccttggaggagaagtgattgtagatggctccagcagacaggccggtggcggcgatnatctcgctcatngaggccttctggtagccgtgcttgatgaaacactcgcgggcggtctctacaatctgagaacgcctgttctttttgtattcttcgctgactttaggcacaacctaatcctagcgaattttttggcgctccgcgcgccttccgggcgcaccttccgagctgtggagccccaaaacgcaaaaaatagaataaaaattccataaaaaggcggggtgccccgaaaatccggggcaccccgcctcactcacgcgctcacncccgcccggccgtaaccggccgcggcggtacgcgtagccgcaaaatcttagtggaagaagtggcgggtaccggtcaggtacatggtcacgccggcagccttagcggcctcgataacttcctcatcacggatcgaaccgcccgggtgcacnacggcacgcacgccggcgtccagcagaacctgcaggccgtcagcgaaggggaagaacgcatcggatgcggcaaccgcaccgcgggcacgctcgttaccctcgccgccgagggtgttcgcacgctcaacggacagcttgcaggagtccacgcggttcacctggcccatgccgatgcccactgcggcgccgttatcggccagcagaatggcgttcgacttgggcgagcgcagtgcacgccacgcgaattcgaggtcgcgcagggtggcctcgtcggcgggctcgccggcaaccagggtccagttcttcgggtcgtcgccctcagcctgcaggcggtcggcctcctggaagagcgcgccgccggagatggggcggtactcgatggcntcncggctaaagccctcgggcagaaccagcaggcgcaggttcttcttctcgcgcagaatctccagggcctcgggctcgtagccgggggccacgacaacctcggtgaagatgcccttgacggtacgngccatnncngcggtcaccgggcggttagcggcaatcacgccaccgtatgcggacagcgggtcgcaggcgtgagccttcgcgtgagcgtccgcaatcggatcggcggcaccgggggttgccacggcgataccacaggggttgttgtgcttgatgacggcaacggccggctcgtcgaagtcgtaggcggcgcgcagngc

SEQ ID NO: 279 - DNA, 4000 bp, Escherichia coli
tgctgtcgcggccggtgccggatgcagcgatttcctcgacaccagtctcgaccagaacgaaacgggggagtcgatcgagacgacactcggtacgttgtggaaattcggcaatgctttctacaccccgattgcttccggttatactacgctcgactccaatcttttcgcagcggcgaccgacgaggcacagcaaaccaaagtgcagtgcaatgccagctatttcaacaagggggtcatcaacgctaacctcaacccgatttcgaatctttataccgactgctacgaagggatccgtgccgccaattttttccttgactacacagccaacggcaaaggcgagtacatggtgggcatgaaccgcgatacgatcaacgaccgccccaactatgaacgggacttggcctcgctgcactggtaccaggccgaagcgcacatcgcacgggcttattactatgccgaactgatcaagcagtacggcggcgttcccatcgtcgagagccagtatgccgcgaacaagttcatcccgcgttcctcctacgaccagatagtcgagtacattgtcaaggagatcgatgaccataagggaaaactggctgtcgactgggcgagtttctccgagcgcaacggccgctttacgctgggcgccgcgctggccatcaaggcgcgtgtgctgctctatgccgcctcgccgctccacaatcccgacaacgatgtcgagaagtggaaaaaagccgccgcggctgcctacgatattatcagcaacccggatttgaactactccctcgacagcgattacggggcttatttccaaggtaaccgcagcctttccagcccggaaaccatctatgtcgtacgccgcgaacagtccaatgcgatggagagcaacaactatccgatcgctacgccgggcggtgcgtcgggcgtgacgccgacgcagaacttggtcgaggcctatgagtgggtcggcgatcccgttgccggggatccctatgccaaccgcgacccgcgtctggcggcaagcgtcgtgaccaacggcagcacctggaacggtcatgtgatcgaccagtcaccgggcggtaggcacgacatgtccgccccgaatgcaagcaagacgggatattaccttaaaaagttcctgaccgacaacctcgacctgacgcagggcgccaaggtgcagcataactgggtgtcctaccgctatgccgaggtgctgctcaactatgccgaagcgatgaatgaggcctatggccccgaccaggctcccggcgactatgcgctcacggcgctcgatgccctgcaactggtgcgcgaccgtgccagtctgcagcttccgattgtcacggcggcgacccgcgacgaattccgcgaggccgtcaagcacgaacgccgcatcgaactggccttcgaggatcatcgttactgggatctgctgcggtggaaggatgcgatggaggtactcaacaaacccgtccgcggtgtgaaggtaacgaaaacaggagaaggcaagtggtcgtatacgcagaccgaagtggctacgcgcactttcctcgaacgcaactattatatgcctttcacccgttccgaggttgaaaattcgaatcatacgctcgaacagaaccccggttattagttccgggatgcaaaagaacaatgaattatgaaaaacaagttgatcctgctcatcgcatttctttgcacatgtgcctttgcagcctgcgagggcgacggcgacgccgattacggattcggtaaagtatatatgccccaggccgtttcgaccggcggcctgaacaactcctatgccgtaccttcgggcggtggtgactatacctacaatttccgtgttgaaaacggtacggttcgaataatcctgggtgtcatacgctcgggaaagctctccgataagaaagggtataccgtcgatgtctacacttctgcggaggacacggcggccgccgtgtccgcattcggcggcgaagccatgcccgagggactttattcgctgccttcgacggtcgtggtgccagacgggaaaaccggtgggacattctacctcgatattcccgtgctggcgatttcgaggagcgaatacgccggcaagaaactggtgctttccgtcggaatccggaatccgtcggcatacgaactttccgatgcggcgaccaaaaccgccgttatcgtgaatgtcgatgccctgaaggccttgctctaaacatcttaacctgtgagaacgatatgcctcttgtcggagaggcatatcgtttctcaaaatcatgacgacctatgaaaaaagccattctgatcctctttgtactcctctccgcggccgggatacgggcgcagatccgttccgtggaatgcactgcgcccaggcccggcctttacgagcgtaccgatttcacgatccgcttgacggcccgttacgacaatgcctatctgcaggagcaggttgctctcgacatgctgattaccacgccttcgggcgccgaacgtatgctgccttgttactgggtcgagggggcgtcgggtgccgagtcgcgctgggaagcccgtttcacgcctcaggaagagggacgctatgcctgccgcttccgcctgagcgaacagggccgtgaaacctcccgctcgaaaaccgtacacctcgatgtcggccctgccgcggattcccggggtattctgcatgtgcgcgattactggacgttgatttacgacgacggaacgccgttccggggtgttgctgaaaacatctgctgggaatcgcgtgccaacgacgattcgcgctttttcaaggccctgcacgaacagcacgacaaatataactacgactacatgctgccgctcttcgcccgcaacggtggtaattttattcgcgtttggatgtgcggattcaatttcccgatcgaccagcaagaccatttcaacaacatacgctacgaggcatccgatgcatactataatcccagcgccatcgcccgtctcgaccatttcgtcgggctttgcgaacggctggggatacacgcgatgctctgcatgggacagggtgccgtgcatgccgaccgggcgtttttcaccggggagccgcaggcccgccgctacatgaaccgcctgcgctatatcgtcgcacgctggggttacagtccggcgatcggtatgtgggagttcttcaacgagatcgacaacatccagttccgcgatgcgaagaacccgatcccggccgaagagatagtcgcctggcatgcccgcatggccaggtacctgaaaagtatcgacccttacggacaccccgtcaccacgtcgatttcccaccgggatctcgaagggctcaattcggtgcctgggatcgacgtcaaccagaagcatatctattgcaatacgggcattattccggccgagatactccgctatgaaaaccgtttcggcaaaccctacgttatcggcgagttcggctatgagtgggactggtcgaagaacttcgatgattttggcgcggatatggatcgcgatttccgccggggactttggtacggcattttctcgcccacgcctctgacgccgatgagctggtggtgggagtatttcgagaaccgcggtatgatggcctatttcaggggagtgcggcaaatatccgaccggatgctcgccgacggcaagggctctttcgaacagatgaccgtagcgtgcaacccggcagaagcaatgggcatccggtgtggcgacgtggtctatgtttacctttataacaattctgccgagcacatcagggaggcgggactcaccgtcaatctgggttgtaatggcagctatgcggtcgaagcgttcgatcccgcgacgtgcattagcacggcgcagggcaaccttccgaccccagggcgttttgtactcgaaaaaatcacgctcgcgccatatgccgagcggatctacatctttactcccgaatccgttaaatgaccggtttatgcgtcttaaaacaattgccatgatgctgacgctgggcatcgct

SEQ ID NO: 280 - DNA, 4000 bp, Escherichia coli
  misc_feature (140)..(140): n is a, c, g, or t
  misc_feature (156)..(156): n is a, c, g, or t
  misc_feature (224)..(224): n is a, c, g, or t
  misc_feature (264)..(264): n is a, c, g, or t
  misc_feature (294)..(294): n is a, c, g, or t
  misc_feature (300)..(300): n is a, c, g, or t
  misc_feature (404)..(404): n is a, c, g, or t
  misc_feature (447)..(447): n is a, c, g, or t
  misc_feature (474)..(474): n is a, c, g, or t
  misc_feature (546)..(546): n is a, c, g, or t
  misc_feature (558)..(558): n is a, c, g, or t
  misc_feature (570)..(570): n is a, c, g, or t
  misc_feature (595)..(595): n is a, c, g, or t
  misc_feature (597)..(597): n is a, c, g, or t
  misc_feature (724)..(724): n is a, c, g, or t
  misc_feature (766)..(766): n is a, c, g, or t
  misc_feature (781)..(781): n is a, c, g, or t
  misc_feature (907)..(907): n is a, c, g, or t
  misc_feature (940)..(940): n is a, c, g, or t
  misc_feature (964)..(964): n is a, c, g, or t
  misc_feature (1003)..(1003): n is a, c, g, or t
  misc_feature (1015)..(1015): n is a, c, g, or t
  misc_feature (1027)..(1027): n is a, c, g, or t
  misc_feature (1066)..(1066): n is a, c, g, or t
  misc_feature (1108)..(1108): n is a, c, g, or t
  misc_feature (1138)..(1138): n is a, c, g, or t
  misc_feature (1144)..(1144): n is a, c, g, or t
  misc_feature (1223)..(1223): n is a, c, g, or t
  misc_feature (1336)..(1336): n is a, c, g, or t
  misc_feature (1373)..(1373): n is a, c, g, or t
  misc_feature (1404)..(1404): n is a, c, g, or t
  misc_feature (1426)..(1426): n is a, c, g, or t
  misc_feature (1441)..(1441): n is a, c, g, or t
  misc_feature (1548)..(1548): n is a, c, g, or t
  misc_feature (1551)..(1551): n is a, c, g, or t
  misc_feature (2062)..(2062): n is a, c, g, or t
  misc_feature (2388)..(2388): n is a, c, g, or t
  misc_feature (2741)..(2741): n is a, c, g, or t
  misc_feature (3248)..(3248): n is a, c, g, or t
cgattaagcgatagccaggcgtgccagtcactgctgggctcggtacgacgcagttctgaggcgaggcgctgcactgaagcctctgagatcaggtcgaagacggttgaatggctgatctgactgtctgtatctggcgccangcgaagtcgatcgagngctactttcgccgcctcaatgggctgttgagactcttggaatcgtctctgacgctctgagagcagcangtcatgctcttgaatgctgttaaatgagatcgcgtctaanaaccgattggactgcctgaggtcgccgcgnagccanaagagctgcgaacgaataaactgttctgtctttggagaaatgtctgcctcggttagggcgtcgagctccgtctgcgcaaacagccagccccgcgcgctcgacanatcttgactccatgcaatgatgcgcgtgtccaaagtgtcgtcntgggtgatgccgggcgacgtctcctgncgactgggaatgggataagcggtttgctgattactggcgcttttgggctcggtgggagaggtcgtggtacangacgacgtggcnaggacaacagcngtcaggaccgccaatcgatgcagtngngcagataaagtgccattatgtcctgctcccgcagggtcttttaacgtcattgtagagaaaccactcattttccatccgattgtacgtagaggagcgtgaattgaaagccgcattgtatgttgtgccnacaccaatcggtaactttgaggacatgacgcttcgcgcaatnagcgtgctgcagggngtggatcttattgcggctgaggatacgagacattcgcggatgctcttgagtcattacgatatcgacacgcctatgacaagttttcacgagcacagcggcgaggcggtcgttactgatgtcgccagncgcatcgagcagggacaagccgttgcattaatnagcgatgccggaacaccgctcgtntctgatcccgggtacgtcctggtaaggtccgtgcaagancggggcctgtcnattgtccccctncctggcgcgtgtgccgctgtgactgcactcagtgctgcnggcttgccaacccatagtttccggttcgagggtttcctctcngccaaacgcggtccgcgacgctcccgcctngacgcncttaagtcaattgattcaacactgatcttctatgaggccccacaccggattttggatttgttgagtgacatgctcgagntcctcgagcccgatcgcgaaatttgcattgctcgagaaattacaaaaacatttgaaactattcgtcgtgggtcgattgcggaaatttatgcctgggtgggcagtgattcaaancagcagcgaggcgagcttgtcgtgatggtggcgtcanggcaggagcaagcaagcacggtaagtgacgnggcgttaaagctgctttaccgnctctcggacgagttnccacctcggaaagctgcacagcttgtggccgatcattacaaactgaaatcgcgcgcgctttatcagttactgctagatcgagagtaatcgtttgttgagtctgttcnttncgggtgctagcgtacgcgtgagtcagttagacggccgctgtaactccggttacagaggaaagtccgggctccaacgggtcagagcgccaggtaacgcctggggggcgtgagctcacggaaagtgcagcagaaaggaaaccgcccatgtgttttgtgggtaagggtgaaaaggtgcggtaagagcgcaccgcgcggctggtaacaggcgtggcgatggtaaaccccgctcggagcaagaccaaatagggatccttatgccgtgaccctcggcggatccgggtaggtcgctacaggcgtctggtgacaggcgtcgcagatgaatggccgttctcgacagaacccggcttatcgactgactcttctgtgcacccccgtaaaagggggtgttctttatacttttttagaatataaaactaattttcaattacctttcctgcttctggcatagaaagtatctccaacacccacctaatagactgacttttttcttaattaccgtcctcataagccncgaaaaaaaccgccgatttgttgccgagaggcgcatataaggtgctgaaatacttagagatttttatttcaagacattgaccctccgtcgtcacgttgttaaggtggtgattagtgggagaaagtgggtaattggggaattaacctgcttttttttgaaataagtggaggtttgtggtgtttaggggagtacagcacatcaatcttgatgcgaaagggcgattgtctgtccctgcgcgtcaacgcgagttgcttctcgatatcagtgcgggctccgtggtcgtgaccatcgatacacagtcttcatgtttggtgttgtatcccttncgcgagtgggagcgcattgagcgcgatgttcaagacctgcccacactcaaccctgcggttcgacgtttccagcggcttgtgctgggttatgccagtgatcttgaccttgatggaaatggtcgggtgttgttgcctggcgcgctgcgtgagtacgcgcagctcgacaagcgcgtggtgttggtcggacaggggaataagctcgagctttggtctgagcccctttgggaggctgagtgcaaagctgcattggcggccgacggcgacgagttgcctgccgagctcctagggctgaagctttgaacgatacgggacatgtttccgtattgctcgaggagtcggtcgcggccttggcnattaaccccgacggcacgtatctcgatgggacgtttggccgaggcggtcacagcaaagcaatcttaggtgccttgtcctctaagggcagactcatcgcggtcgataaggaccccgctgctgaggcgtcggccaagtcgtttgctgacgactcgagatttgaatttatggcgggtagttttgcagatctaccggcatcggtttccgacggcgcgctcgacggtattttgctcgacctgggcgtctcgtcaccgcagcttgataacgcggatcgtggctttggatttcgcgacgacggtccactggacatgcgaatggatacgcgttcgggtgtcactgctgcggactggatcgccgtggcgtcagaagcccagatcgctgaggtgattaaaacgtacggtgaagagcggttcgcacgtcgcatggcatccgccattgtgaaggtgagggctgagaccccgatatcccgaactaagcagttggccagcattgtcgccgaggcaaatccncggtgggagcctaacaaacatcctgcgactcgggcgttccaggccattcgtatctatatcaaccgagagcttgaggacctagagctcgcactcgatcctatggtcgccaagttggcgccgcgaggccgtttagttgttatcagctttcactcccttgaagatcgaattgtgaaacggtttatgcgcaatcaggctagaggtgagcaactccctcggcgcgtgccagtgattgatagcgatacgggtaaaacgctaaatttggtgggtaaggccgtgaagccctcaagcagcgaggtcgagcgtaatccaaggtcgcgatcggccattatgcgaattgcggagcgacggtaatgcgggggcgattcagcgcttcacccttgcggatcgccctctgtgctggacttgttttgttcagcgcgttgttggttgtcggtgagacgcatcaaacgcgtttgctctttaccaagcttcaggctcaggagagtgagcggtggcacttacaagagcgctacagtcgtcttttattggaatactcaacactctcggcgcctcaccgcatcagtgcgctttcacagacatcgctcgctatgaagtcgcccaatacggggtcgattagggtggtggcgcaatgagccgcggtcgcccccccgttcttgtttatcgctggcgaatcgcccttacggcggcagtgcttgcagggctctttggcatgttggttgttcgactggtgcaactgcaggtgggtgcaagtc

SEQ ID NO: 281 - DNA, 4000 bp, Escherichia coli
  misc_feature (1968)..(1968): n is a, c, g, or t
  misc_feature (1971)..(1971): n is a, c, g, or t
  misc_feature (1974)..(1974): n is a, c, g, or t
  misc_feature (1985)..(1985): n is a, c, g, or t
  misc_feature (1992)..(1992): n is a, c, g, or t
  misc_feature (1995)..(1996): n is a, c, g, or t
  misc_feature (1999)..(1999): n is a, c, g, or t
  misc_feature (2014)..(2014): n is a, c, g, or t
  misc_feature (2019)..(2019): n is a, c, g, or t
  misc_feature (2032)..(2032): n is a, c, g, or t
  misc_feature (2035)..(2035): n is a, c, g, or t
  misc_feature (2041)..(2041): n is a, c, g, or t
  misc_feature (2053)..(2053): n is a, c, g, or t
  misc_feature (2780)..(2780): n is a, c, g, or t
  misc_feature (2984)..(2986): n is a, c, g, or t
  misc_feature (2988)..(2994): n is a, c, g, or t
  misc_feature (2996)..(2996): n is a, c, g, or t
  misc_feature (2998)..(2998): n is a, c, g, or t
  misc_feature (3000)..(3001): n is a, c, g, or t
  misc_feature (3005)..(3010): n is a, c, g, or t
  misc_feature (3015)..(3017): n is a, c, g, or t
  misc_feature (3020)..(3021): n is a, c, g, or t
  misc_feature (3023)..(3024): n is a, c, g, or t
  misc_feature (3026)..(3028): n is a, c, g, or t
  misc_feature (3033)..(3035): n is a, c, g, or t
  misc_feature (3037)..(3039): n is a, c, g, or t
  misc_feature (3041)..(3042): n is a, c, g, or t
  misc_feature (3044)..(3044): n is a, c, g, or t
  misc_feature (3046)..(3046): n is a, c, g, or t
  misc_feature (3048)..(3050): n is a, c, g, or t
  misc_feature (3052)..(3057): n is a, c, g, or t
  misc_feature (3059)..(3064): n is a, c, g, or t
  misc_feature (3066)..(3069): n is a, c, g, or t
  misc_feature (3071)..(3071): n is a, c, g, or t
  misc_feature (3073)..(3076): n is a, c, g, or t
  misc_feature (3078)..(3078): n is a, c, g, or t
  misc_feature (3080)..(3082): n is a, c, g, or t
  misc_feature (3084)..(3084): n is a, c, g, or t
  misc_feature (3088)..(3088): n is a, c, g, or t
  misc_feature (3090)..(3091): n is a, c, g, or t
  misc_feature (3093)..(3094): n is a, c, g, or t
  misc_feature (3096)..(3096): n is a, c, g, or t
  misc_feature (3098)..(3098): n is a, c, g, or t
  misc_feature (3100)..(3100): n is a, c, g, or t
  misc_feature (3104)..(3104): n is a, c, g, or t
  misc_feature (3106)..(3127): n is a, c, g, or t
  misc_feature (3129)..(3133): n is a, c, g, or t
  misc_feature (3136)..(3140): n is a, c, g, or t
  misc_feature (3143)..(3144): n is a, c, g, or t
  misc_feature (3146)..(3163): n is a, c, g, or t
  misc_feature (3165)..(3165): n is a, c, g, or t
  misc_feature (3168)..(3172): n is a, c, g, or t
  misc_feature (3174)..(3174): n is a, c, g, or t
  misc_feature (3176)..(3177): n is a, c, g, or t
  misc_feature (3179)..(3181): n is a, c, g, or t
  misc_feature (3184)..(3188): n is a, c, g, or t
  misc_feature (3193)..(3208): n is a, c, g, or t
  misc_feature (3210)..(3210): n is a, c, g, or t
  misc_feature (3212)..(3213): n is a, c, g, or t
  misc_feature (3216)..(3217): n is a, c, g, or t
  misc_feature (3219)..(3219): n is a, c, g, or t
  misc_feature (3223)..(3227): n is a, c, g, or t
  misc_feature (3231)..(3234): n is a, c, g, or t
  misc_feature (3236)..(3240): n is a, c, g, or t
  misc_feature (3244)..(3245): n is a, c, g, or t
  misc_feature (3247)..(3256): n is a, c, g, or t
  misc_feature (3259)..(3260): n is a, c, g, or t
  misc_feature (3263)..(3270): n is a, c, g, or t
  misc_feature (3273)..(3273): n is a, c, g, or t
  misc_feature (3276)..(3276): n is a, c, g, or t
  misc_feature (3278)..(3289): n is a, c, g, or t
  misc_feature (3291)..(3298): n is a, c, g, or t
  misc_feature (3301)..(3303): n is a, c, g, or t
  misc_feature (3305)..(3311): n is a, c, g, or t
  misc_feature (3314)..(3316): n is a, c, g, or t
  misc_feature (3318)..(3321): n is a, c, g, or t
  misc_feature (3323)..(3326): n is a, c, g, or t
  misc_feature (3328)..(3331): n is a, c, g, or t
  misc_feature (3333)..(3333): n is a, c, g, or t
  misc_feature (3335)..(3338): n is a, c, g, or t
  misc_feature (3342)..(3348): n is a, c, g, or t
  misc_feature (3353)..(3357): n is a, c, g, or t
  misc_feature (3359)..(3368): n is a, c, g, or t
  misc_feature (3371)..(3372): n is a, c, g, or t
  misc_feature (3374)..(3380): n is a, c, g, or t
  misc_feature (3382)..(3384): n is a, c, g, or t
  misc_feature (3386)..(3389): n is a, c, g, or t
  misc_feature (3392)..(3393): n is a, c, g, or t
  misc_feature (3395)..(3396): n is a, c, g, or t
  misc_feature (3398)..(3399): n is a, c, g, or t
  misc_feature (3402)..(3402): n is a, c, g, or t
  misc_feature (3404)..(3404): n is a, c, g, or t
  misc_feature (3406)..(3407): n is a, c, g, or t
  misc_feature (3409)..(3410): n is a, c, g, or t
  misc_feature (3415)..(3416): n is a, c, g, or t
  misc_feature (3418)..(3424): n is a, c, g, or t
  misc_feature (3427)..(3428): n is a, c, g, or t
  misc_feature (3430)..(3434): n is a, c, g, or t
  misc_feature (3436)..(3437): n is a, c, g, or t
  misc_feature (3441)..(3443): n is a, c, g, or t
  misc_feature (3445)..(3450): n is a, c, g, or t
  misc_feature (3452)..(3453): n is a, c, g, or t
  misc_feature (3458)..(3458): n is a, c, g, or t
  misc_feature (3460)..(3460): n is a, c, g, or t
  misc_feature (3462)..(3462): n is a, c, g, or t
  misc_feature (3464)..(3467): n is a, c, g, or t
  misc_feature (3469)..(3469): n is a, c, g, or t
  misc_feature (3471)..(3483): n is a, c, g, or t
  misc_feature (3486)..(3486): n is a, c, g, or t
  misc_feature (3488)..(3492): n is a, c, g, or t
  misc_feature (3495)..(3495): n is a, c, g, or t
  misc_feature (3497)..(3504): n is a, c, g, or t
  misc_feature (3506)..(3517): n is a, c, g, or t
  misc_feature (3519)..(3522): n is a, c, g, or t
  misc_feature (3525)..(3525): n is a, c, g, or t
  misc_feature (3527)..(3528): n is a, c, g, or t
  misc_feature (3530)..(3530): n is a, c, g, or t
  misc_feature (3532)..(3535): n is a, c, g, or t
  misc_feature (3537)..(3537): n is a, c, g, or t
  misc_feature (3539)..(3539): n is a, c, g, or t
  misc_feature (3542)..(3543): n is a, c, g, or t
  misc_feature (3545)..(3547): n is a, c, g, or t
  misc_feature (3549)..(3557): n is a, c, g, or t
  misc_feature (3559)..(3561): n is a, c, g, or t
  misc_feature (3563)..(3563): n is a, c, g, or t
  misc_feature (3566)..(3568): n is a, c, g, or t
  misc_feature (3571)..(3571): n is a, c, g, or t
  misc_feature (3573)..(3577): n is a, c, g, or t
  misc_feature (3580)..(3580): n is a, c, g, or t
  misc_feature (3582)..(3582): n is a, c, g, or t
  misc_feature (3584)..(3586): n is a, c, g, or t
  misc_feature (3588)..(3591): n is a, c, g, or t
  misc_feature (3594)..(3597): n is a, c, g, or t
  misc_feature (3600)..(3600): n is a, c, g, or t
  misc_feature (3602)..(3607): n is a, c, g, or t
  misc_feature (3610)..(3619): n is a, c, g, or t
  misc_feature (3622)..(3624): n is a, c, g, or t
  misc_feature (3626)..(3627): n is a, c, g, or t
  misc_feature (3630)..(3635): n is a, c, g, or t
  misc_feature (3637)..(3637): n is a, c, g, or t
  misc_feature (3639)..(3639): n is a, c, g, or t
  misc_feature (3641)..(3648): n is a, c, g, or t
  misc_feature (3652)..(3655): n is a, c, g, or t
  misc_feature (3657)..(3657): n is a, c, g, or t
  misc_feature (3659)..(3661): n is a, c, g, or t
  misc_feature (3663)..(3663): n is a, c, g, or t
  misc_feature (3665)..(3677): n is a, c, g, or t
  misc_feature (3679)..(3681): n is a, c, g, or t
  misc_feature (3683)..(3690): n is a, c, g, or t
  misc_feature (3692)..(3697): n is a, c, g, or t
  misc_feature (3700)..(3702): n is a, c, g, or t
  misc_feature (3704)..(3710): n is a, c, g, or t
  misc_feature (3712)..(3713): n is a, c, g, or t
  misc_feature (3715)..(3716): n is a, c, g, or t
  misc_feature (3718)..(3721): n is a, c, g, or t
  misc_feature (3723)..(3723): n is a, c, g, or t
  misc_feature (3725)..(3727): n is a, c, g, or t
  misc_feature (3729)..(3729): n is a, c, g, or t
  misc_feature (3731)..(3732): n is a, c, g, or t
  misc_feature (3737)..(3739): n is a, c, g, or t
  misc_feature (3741)..(3746): n is a, c, g, or t
  misc_feature (3752)..(3752): n is a, c, g, or t
  misc_feature (3754)..(3755): n is a, c, g, or t
  misc_feature (3758)..(3762): n is a, c, g, or t
  misc_feature (3764)..(3779): n is a, c, g, or t
  misc_feature (3781)..(3781): n is a, c, g, or t
  misc_feature (3783)..(3783): n is a, c, g, or t
  misc_feature (3785)..(3789): n is a, c, g, or t
  misc_feature (3791)..(3793): n is a, c, g, or t
  misc_feature (3795)..(3795): n is a, c, g, or t
  misc_feature (3797)..(3797): n is a, c, g, or t
  misc_feature (3799)..(3802): n is a, c, g, or t
  misc_feature (3811)..(3812): n is a, c, g, or t
  misc_feature (3816)..(3816): n is a, c, g, or t
  misc_feature (3818)..(3819): n is a, c, g, or t
  misc_feature (3821)..(3822): n is a, c, g, or t
  misc_feature (3824)..(3824): n is a, c, g, or t
  misc_feature (3826)..(3826): n is a, c, g, or t
  misc_feature (3829)..(3830): n is a, c, g, or t
  misc_feature (3832)..(3833): n is a, c, g, or t
  misc_feature (3835)..(3835): n is a, c, g, or t
  misc_feature (3838)..(3838): n is a, c, g, or t
  misc_feature (3840)..(3843): n is a, c, g, or t
  misc_feature (3846)..(3846): n is a, c, g, or t
  misc_feature (3849)..(3851): n is a, c, g, or t
  misc_feature (3854)..(3858): n is a, c, g, or t
  misc_feature (3860)..(3862): n is a, c, g, or t
  misc_feature (3864)..(3864): n is a, c, g, or t
  misc_feature (3866)..(3866): n is a, c, g, or t
  misc_feature (3868)..(3868): n is a, c, g, or t
  misc_feature (3871)..(3871): n is a, c, g, or t
  misc_feature (3875)..(3875): n is a, c, g, or t
  misc_feature (3877)..(3880): n is a, c, g, or t
  misc_feature (3882)..(3882): n is a, c, g, or t
  misc_feature (3884)..(3888): n is a, c, g, or t
  misc_feature (3890)..(3891): n is a, c, g, or t
  misc_feature (3893)..(3897): n is a, c, g, or t
  misc_feature (3899)..(3899): n is a, c, g, or t
  misc_feature (3901)..(3901): n is a, c, g, or t
  misc_feature (3908)..(3910): n is a, c, g, or t
  misc_feature (3912)..(3913): n is a, c, g, or t
  misc_feature (3915)..(3915): n is a, c, g, or t
  misc_feature (3920)..(3920): n is a, c, g, or t
  misc_feature (3925)..(3926): n is a, c, g, or t
  misc_feature (3930)..(3930): n is a, c, g, or t
  misc_feature (3934)..(3934): n is a, c, g, or t
  misc_feature (3937)..(3937): n is a, c, g, or t
  misc_feature (3946)..(3950): n is a, c, g, or t
  misc_feature (3952)..(3953): n is a, c, g, or t
  misc_feature (3956)..(3957): n is a, c, g, or t
  misc_feature (3965)..(3965): n is a, c, g, or t
  misc_feature (3968)..(3970): n is a, c, g, or t
  misc_feature (3980)..(3984): n is a, c, g, or t
  misc_feature (3986)..(3986): n is a, c, g, or t
  misc_feature (3989)..(3989): n is a, c, g, or t
aatattttttaaacaccttttcaaatttacctggctaatccttatcagattgggaaatattctgtaacctaagaaaggaataccttgactaactttatttaactgggttactttatcttttattttcaggtgcagggcattagacaaaaaacatctaattaaaacaaggtctctttgaagattttcttttttatttgaaaaaagaataatatcatccatatatcttacataacccttataaccaaggttatgtttaacatattgatcaagtttattcaaataaatattggcaaaaaattgggatgttaaattacccaccggtaacccaatttctatattattattcatactcgtgttctgattttttagaatgatggaacataaattaataataaaagggtctttaattttgcggttaattaaatccaataaaatgttatgatctatattaggaaagaatttctcaatatccagtttcataaaccaggaatatttcctggaataattttgaactgctgatacagctaaatgtagtccttttcctttacgcgtagcataagaatctggaataaaaatattttcaaaatatggttcaattacattaactaatgcatggtggactactctatctctaaaatcagcaatactaataagccgttctttaggttccttaatattaaagtatctataaggatggggtttataggttccattttgcaattcactttgtaattcaaatatattcttttcacaataatatatccattctgctgtttcttcttttctttttttatgtttacatgctttttgataagcaagataaaggttctgccaagaaattaatttttcccaaagatatcctatccttttaggcactttttaaccaaccccctaccattttcccgctttccagtaattccctactgatatattgatattggttttcagctaataatttcattttataagccatttgaattaatgttcttaatacatccaacttcaaatttattttatttaaatattcccttttagatgaactatagatagtttgaacaatcaattctaatatatctaaacatatattatccattttctgagctaatgaatatctcagattttttggaaatctttctgtccttccaaatatccagatagatacatctatccattttacatacaaagggtaatcatttttcattttttaataccgtttcttgtaatatcttgataatctgctcaccatatttttctgctttccccttcatccctttaatagaataaaaatcacttattgtttggggttgttttttcacaatctcataaagctgagaattatacattataatataggcaggtaatccttcattggcagcaaattcatttcgccaatctcttaatctctcatattgttcttgttccgatttacttaaactatttaaatcaggcctaagatgtgtccctttacgcggtaaatattctacaaaaaaagaataatagatattcccttcattattaataaattctttttctatcctaataacattgttatcttgacaaaaacggttaaattcttgatcttcaaattcacccctatctctgtcaaatctaactaacatcaatttaaacataccttttccattctattatttttattgctaagtaaaaccatatttcttgtttaaactaaaataaggtaacatcatttcctaaaaaagatgtataaaatttagcttaacaaatctcttaattatgatgttcatatctatcatacttaattaaatactctaaatacaattatgtgttttaccttatccaaaatattttggcagggggacaggtccccctgcacccccactcatcgtttacctcattcatttcttgcttttgttcttcatttgcaaaaggcaaaaaaggaaaaaagcaaaaattaattaagggaaatcctacaaacgcggaagccaatgncgntgntgctgtaggtngcactgntgnngtnacgattggaaacagngcaantgctggcaatgtngtnccagcnaccgccacgtanaacacgataggtaccactttctgctccatggggattattttgatctcctgtgggataagctccataaatatcccaacaccactcccaaacattaccactcatatcaaacaattgtaattcattggcactttttgtagctaccggatgagtagtaccatctgaattagtagtataccaggcaactccatctatatcattacttccactataggtataacccaggctgctattaccaccccgggcagcaaacatccattccatttcagtaggtaaacgatagccgttagcagtccagttacaactgaaattagtatgattagaagcagttccgctccacccggagggccaagcattagggttagttccatactcaatttctccaactttataactgtaacaaggtgtaagattttcctgcatacttctccggttgcaatactcaatagcattgaaccaggttgtttgctccacaggcctgctgagatcaccggtaaaataagagggattagttcccattacagctaaatattcaccctgcgtaatttcagttctatcaagataaaaagtgctgattgtaacattggaggtgccgttattaaaagttccaccttccactttgataaatcctaccggctgaagggtgggagaaggattatcgcgagcaatcaatttaagcttgtaattagaaccagtaaccattccatcttgagcgggataccaggttatntgttttcctgttccagttgtaactgcattacctatatcacctgttgtatgggtagggaaaaaagtataacttgctcccccgttattagaaacgagcattataacttgacagtttccatcagctgaaagatcataagatattgtaatctgtccggtaccaggtgttaccgtaacattgcttactgttgggacagtagcagcaaannngnnnnnnnanananntaannnnnnaatannnatnngnntnnntttcnnntnnntnntncntnnntnnnnnntnnnnnntnnnngntnnnntntnnntngttngnngnnanangnaaanannnnnnnnnnnnnnnnnnnnnntnnnnnttnnnnnttnncnnnnnnnnnnnnnnnnnntngcnnnnngntnncnnnttnnnnntttcnnnnnnnnnnnnnnnntnannttnnanattnnnnntttnnnntnnnnnattnntnnnnnnnnnnaannaannnnnnnnccnggntnnnnnnnnnnnngnnnnnnnntannnannnnnnntannngnnnnannnngnnnntncnnnnttcnnnnnnngtaannnnnannnnnnnnnntcnntnnnnnnnannntnnnnatnnanntnnatnantnncnnccagnnannnnnnntanntnnnnnanntatnnntnnnnnnanntacanananannnncntnnnnnnnnnnnnngtngnnnnnatnannnnnnnnannnnnnnnnnnngnnnnagntnntncnnnntngnttnntnnntnnnnnnnnnannnanatnnnttncnnnnngantnannnannnnaannnnacncnnnnnnttnnnnnnnnnntgnnngnnaannnnnntngntnnnnnnnnaggnnnngntnnntnannnnnnnnnnnnntnnntnnnnnnnncnnnnnngannnannnnnnntnngnntnnnngnannngnannaacannngnnnnnncctttncnnaannnnncnnnnnnnnnnnnnnnntnantnnnnnannntntnannnnccctttccnntaanannanntncnctnntnntnatnannnnaantannnatnnnnntnnntntntnttnatantnnnncncnnnnntnngnnnnntnanctttttnnntnntntttanatctnnttanattntanatataaatnnnnnannccnnattctctnttnnntaaaatattnnnnntnttncctatataata

SEQ ID NO: 282 - DNA, 4000 bp, Escherichia coli
  misc_feature (1996)..(1996): n is a, c, g, or t
cgttcttcgtccattcgtgtcgtttccagacggtttcgcgaagacgcgccgaagaggttccaacgcactaacaccccacgcgttccacgcgtactactttcaacaaccaccaccacatccatgcgcagatgttcactttccccacggcgtcgtcggtttgagacgctcgggaggcgcaaacgtcattggacagatttttgcgctggcgaaattcgcttggatccatcgtctattcatgtccaaagaatccgctctattggtgatcgtgcgctgatgaatgaacacctcgcgcatctccattccctcctcggcgaataaagccaccaaatcttctattgtgaagtagtacgcgcgcgtgccgtcgtgtcgcacataaaagttttccgacaacttttgattcgccgccaccttcccttcgaacctttcctgcgctaaatcccccgcggcgtagtcacgaacgcatattgcgcctcgttgaccgtctcgcatgacggtcgatagatttcgtacgcagtacttcatcttctctcgcgacatcgcgctcagcgcgaacaccatcgtggcgacgtcgacgcatccggcgggtacgttctccaacaagctctcacacgtcgcgtcgcacacgaacgccttgacgcgatcgcgatcgcgtggcggcagcgtcgccgcgcgttcgagcaccatatctatcgcgcgcttactaaaatcgcagcagtacaccgtcgcttcggcgtcgagctcgagcagcggaaacaccgtgttcccgaccccgcacccgagctctagaaacgcgcgcggcgcgtcttcacgaggcgcgtacgacggcgcgggacctcgcgcgcggtccacgcgcgcgcccatgtcctcgtcgacgtcctcgagcgcggtttcctcgggaggtttggcgaacacgtccggccattcgcgcgccaaccagtgccgatccttgaagaaattcgtcgcgtgcgtcttgtaaaagacgtcccagttttttcgcgcgtctgtttcgtatttttggcgccaaaaatcgctcacggtgtcggacatgacgcgcgagccgtcgccacggcgcgtcccgcagtgcggcggttacgacgccgcggcgacgcctcggtcggtgcacgcgatcgtgcgggtttcggtgacgatgatatcgactaacttatcgtgcgcgtccacgggaacggcacctggggggtagacttgacacccgtacgcgagggcgacgacgagtggcggcgtcgcgccgacgcgcgccgcctcgtcggcgtaccgcgtcaaaaacgcgtcgtaatacccgcctccgcgaccgagtctgcgcccatcctcgccgaacgccacgccaggaacgacgacgacgtccaacgcgccaaccttcgcgatgtccctcaccgcgtctaagcgccgcgacccgtccgcgtacgtctcgcgcggctcggccaaatcgtacgcgccgcgagtcgcgtccgcctcgacgtctcgcacgtgaagcatgcgcatcgacgacgacccggcgtcgtcaacgatcggcacgaaaaccatgacgtcgtccgtcgcccctcgcaccgcggcgtcgtcgatgtacgtcgccatcgagcactctcgcaggcgttcgctcgccaagtacgcgccgacgcgccgcgcgttcgccgacgccttcatctccctcaaccgtcccgcgatcgccgcgtccgcggcgcgcatcgcctccgtcgtcatcagtctcagcgcgtcccgcgccgcgcggcgcatcgaccgcttcgcgtcgccatcgccgtcgccgtcgcgcgcgctcgacgccatccgtcccgcgcgcgcgcgtccgcgcgtccacgcgcgcgcgtccgcgagcgcgagcgcgcgcgcgagtccgcgcatgcgcgctcgaacgcccgcgcgcgattcgcgcgattcgcgcgctcgagcgcgcgcgcgtcgccgcgcgtcgccgcgcgtcggcgtctgcgaccgccccgcaacacccacggcgccagancggcgcgcatggtgctcgcgtcggtcgtcgaggcgacgctcggacgcgtcgccgcgctcggacgcacggcctcgagcgcgtcgacgtccgcgagcggcgtcgcggacgccggcgcggcgacgctgcggcgactcggcgcggcgaagacgcgcgggacgtcgtcgctcgatgacttgaacgaacacgcgaaaatcatcaccgacggcgtcgatttccggccggtgacggacacgtcgtgcttcgtcgacgcgtatcgctcgagcgacgcggcgacggcggtgatgttcgtcttcatcagcgggtgcgtgctcggggcggtgccgcagtacctgaaggtggtggtgttggggacttcggaggggctgtcgctgagctcgttggcgctgatgaacgtgtcgaacgtgtgcgcgacgatgaatgtgttcattctgcattacgagcagatccgacggtgcgtcgcgggagcggcggggtacgagtacgagcggtgtcaggcgtcgctgttgacgctgtattacacgttgatttacacgttgctgtggataccgctctacccgctcgcggcgcacttcacgagcgatcgcaagacggaatactttgggtacgtcatgtctaagcgtaaggcggcgtggtacgggttagcgttgtgggcggtgccgtgcgcgttgctcgcggcgcccgtcgcgaggatgttgttcggatcgacgtgttttgagtttgaacgttatgcgattttcttagggttgacgaacgcagttttagaaaccacgcgatacgtgccgcagttgtgggagtccgtacactccaaaggttcgggggcgatgagttacatgcgattagcgctgtccgtcgcgggcgggctcggggcgacgattcaaaaggcggtgatgcacgagtcttggtccacgtgggggcctccgctcatcgggcacggattggagatggctatcttctgcgtgaacctattcaacgacatgacgcgccgtcgcgagcgcacggacatgaggaaagaggctttaggattaatgcgcgattcggacgacgactacgaagacagccgcgacgacatggagacggacgcccacgcgaagcgcaaggctgcgatgttagagtcagccgaatccgccgcgcgcacgggatcgcccacgaaatccgaatcagacgtggaggattgggtgcaaaatatccccaccgagggcggtttcaaggcgaagacgtccttcgtgtggcatcgcgcgtgcacggacaagcacttcttcacgtcgttggtgcgatacctctagatttccctcgttcggcgcgcgcgcgtcgagtgctcaaccatttagtcatcgtcaatatcagtagattctctagcgactcaagccgtccgcgagcgcgtcgccgcgtcgccgcgtagcgcgtcccgtcccgactcgccgcgccactccgtgacatgcgcgcgagcgcgctcgccaaaacgctcgtcgagaacggtgcgagacgcgtcgttggtcacgcgtcgactccgcgcgtcgtcgcgcccggcgcgcgcgcaccgccgccgcgcgcgagacgaatgcgcgtccaggcttcgccagtcaccgtcgcgcccgcaccgccctcgacgccgcgcttcacctctgacatcaccgccgatggcgtcgatgcgttggtaacgacgatcgtctccgagtacgagcgcgcgctgcgcgacgccgcgcgcgggacgacgtgggaatcgacgttttcaacgacgctgcgcgcgcttggacgcgcgagcgaggcgagcgccgcggcgacgcttccggcgatgacgcatcgcgaacgcgacgtgcgagaggcgagcacgaaggcgaaggataagttgaaagcgatgtttgacgggacattcgcgcgaagggaggtgtacgaggcgatgaaagcggtcggcgcggacgcggcgccgacgagcgaggcgagacgcgcgagcgagtatttgatgcgagagtttgagaggaacggtgcggcgttgagcgccgagaa

SEQ ID NO: 283 - DNA, 4000 bp, Escherichia coli
  misc_feature (1)..(2): n is a, c, g, or t
  misc_feature (5)..(6): n is a, c, g, or t
  misc_feature (8)..(12): n is a, c, g, or t
  misc_feature (14)..(18): n is a, c, g, or t
  misc_feature (20)..(32): n is a, c, g, or t
  misc_feature (34)..(38): n is a, c, g, or t
  misc_feature (40)..(53): n is a, c, g, or t
  misc_feature (55)..(57): n is a, c, g, or t
  misc_feature (59)..(59): n is a, c, g, or t
  misc_feature (61)..(63): n is a, c, g, or t
  misc_feature (65)..(65): n is a, c, g, or t
  misc_feature (67)..(72): n is a, c, g, or t
  misc_feature (74)..(74): n is a, c, g, or t
  misc_feature (76)..(80): n is a, c, g, or t
  misc_feature (83)..(85): n is a, c, g, or t
  misc_feature (87)..(89): n is a, c, g, or t
  misc_feature (91)..(96): n is a, c, g, or t
  misc_feature (98)..(103): n is a, c, g, or t
  misc_feature (105)..(114): n is a, c, g, or t
  misc_feature (116)..(116): n is a, c, g, or t
  misc_feature (119)..(120): n is a, c, g, or t
  misc_feature (122)..(122): n is a, c, g, or t
  misc_feature (127)..(127): n is a, c, g, or t
  misc_feature (130)..(133): n is a, c, g, or t
  misc_feature (135)..(140): n is a, c, g, or t
  misc_feature (143)..(144): n is a, c, g, or t
  misc_feature (146)..(153): n is a, c, g, or t
  misc_feature (156)..(156): n is a, c, g, or t
  misc_feature (158)..(164): n is a, c, g, or t
  misc_feature (166)..(166): n is a, c, g, or t
  misc_feature (168)..(171): n is a, c, g, or t
  misc_feature (175)..(176): n is a, c, g, or t
  misc_feature (178)..(180): n is a, c, g, or t
  misc_feature (182)..(182): n is a, c, g, or t
  misc_feature (185)..(196): n is a, c, g, or t
  misc_feature (198)..(203): n is a, c, g, or t
  misc_feature (205)..(207): n is a, c, g, or t
  misc_feature (209)..(211): n is a, c, g, or t
  misc_feature (213)..(216): n is a, c, g, or t
  misc_feature (218)..(222): n is a, c, g, or t
  misc_feature (224)..(226): n is a, c, g, or t
  misc_feature (228)..(228): n is a, c, g, or t
  misc_feature (230)..(233): n is a, c, g, or t
  misc_feature (235)..(235): n is a, c, g, or t
  misc_feature (237)..(242): n is a, c, g, or t
  misc_feature (244)..(244): n is a, c, g, or t
  misc_feature (246)..(252): n is a, c, g, or t
  misc_feature (254)..(255): n is a, c, g, or t
  misc_feature (258)..(266): n is a, c, g, or t
  misc_feature (268)..(270): n is a, c, g, or t
  misc_feature (275)..(278): n is a, c, g, or t
  misc_feature (281)..(283): n is a, c, g, or t
  misc_feature (285)..(286): n is a, c, g, or t
  misc_feature (288)..(289): n is a, c, g, or t
  misc_feature (291)..(293): n is a, c, g, or t
  misc_feature (295)..(303): n is a, c, g, or t
  misc_feature (305)..(307): n is a, c, g, or t
  misc_feature (309)..(311): n is a, c, g, or t
  misc_feature (313)..(314): n is a, c, g, or t
  misc_feature (316)..(316): n is a, c, g, or t
  misc_feature (322)..(325): n is a, c, g, or t
  misc_feature (327)..(330): n is a, c, g, or t
  misc_feature (333)..(335): n is a, c, g, or t
  misc_feature (337)..(340): n is a, c, g, or t
  misc_feature (343)..(344): n is a, c, g, or t
  misc_feature (346)..(348): n is a, c, g, or t
  misc_feature (350)..(350): n is a, c, g, or t
  misc_feature (352)..(355): n is a, c, g, or t
  misc_feature (357)..(357): n is a, c, g, or t
  misc_feature (359)..(359): n is a, c, g, or t
  misc_feature (362)..(363): n is a, c, g, or t
  misc_feature (365)..(366): n is a, c, g, or t
  misc_feature (368)..(370): n is a, c, g, or t
  misc_feature (372)..(383): n is a, c, g, or t
  misc_feature (386)..(391): n is a, c, g, or t
  misc_feature (393)..(396): n is a, c, g, or t
  misc_feature (398)..(398): n is a, c, g, or t
  misc_feature (400)..(402): n is a, c, g, or t
  misc_feature (405)..(410): n is a, c, g, or t
  misc_feature (413)..(414): n is a, c, g, or t
  misc_feature (416)..(418): n is a, c, g, or t
  misc_feature (420)..(422): n is a, c, g, or t
  misc_feature (424)..(424): n is a, c, g, or t
  misc_feature (426)..(426): n is a, c, g, or t
  misc_feature (429)..(438): n is a, c, g, or t
  misc_feature (441)..(443): n is a, c, g, or t
  misc_feature (445)..(450): n is a, c, g, or t
  misc_feature (453)..(454): n is a, c, g, or t
  misc_feature (457)..(457): n is a, c, g, or t
  misc_feature (459)..(463): n is a, c, g, or t
  misc_feature (465)..(466): n is a, c, g, or t
  misc_feature (469)..(479): n is a, c, g, or t
  misc_feature (485)..(485): n is a, c, g, or t
  misc_feature (487)..(489): n is a, c, g, or t
  misc_feature (491)..(497): n is a, c, g, or t
  misc_feature (499)..(499): n is a, c, g, or t
  misc_feature (501)..(502): n is a, c, g, or t
  misc_feature (504)..(508): n is a, c, g, or t
  misc_feature (510)..(511): n is a, c, g, or t
  misc_feature (513)..(514): n is a, c, g, or t
  misc_feature (519)..(519): n is a, c, g, or t
  misc_feature (521)..(524): n is a, c, g, or t
  misc_feature (527)..(531): n is a, c, g, or t
  misc_feature (533)..(535): n is a, c, g, or t
  misc_feature (537)..(538): n is a, c, g, or t
  misc_feature (540)..(540): n is a, c, g, or t
  misc_feature (544)..(545): n is a, c, g, or t
  misc_feature (547)..(547): n is a, c, g, or t
  misc_feature (550)..(550): n is a, c, g, or t
  misc_feature (552)..(553): n is a, c, g, or t
  misc_feature (556)..(559): n is a, c, g, or t
  misc_feature (561)..(561): n is a, c, g, or t
  misc_feature (563)..(566): n is a, c, g, or t
  misc_feature (568)..(570): n is a, c, g, or t
  misc_feature (572)..(577): n is a, c, g, or t
  misc_feature (579)..(585): n is a, c, g, or t
  misc_feature (588)..(592): n is a, c, g, or t
  misc_feature (597)..(598): n is a, c, g, or t
  misc_feature (600)..(603): n is a, c, g, or t
  misc_feature (605)..(605): n is a, c, g, or t
  misc_feature (607)..(609): n is a, c, g, or t
  misc_feature (613)..(613): n is a, c, g, or t
  misc_feature (615)..(616): n is a, c, g, or t
  misc_feature (618)..(618): n is a, c, g, or t
  misc_feature (622)..(622): n is a, c, g, or t
  misc_feature (624)..(627): n is a, c, g, or t
  misc_feature (630)..(633): n is a, c, g, or t
  misc_feature (635)..(638): n is a, c, g, or t
  misc_feature (642)..(644): n is a, c, g, or t
  misc_feature (646)..(649): n is a, c, g, or t
  misc_feature (651)..(654): n is a, c, g, or t
  misc_feature (656)..(658): n is a, c, g, or t
  misc_feature (660)..(673): n is a, c, g, or t
  misc_feature (675)..(683): n is a, c, g, or t
  misc_feature (685)..(695): n is a, c, g, or t
  misc_feature (697)..(706): n is a, c, g, or t
  misc_feature (708)..(711): n is a, c, g, or t
  misc_feature (713)..(715): n is a, c, g, or t
  misc_feature (717)..(719): n is a, c, g, or t
  misc_feature (721)..(723): n is a, c, g, or t
  misc_feature (725)..(727): n is a, c, g, or t
  misc_feature (731)..(731): n is a, c, g, or t
  misc_feature (733)..(733): n is a, c, g, or t
  misc_feature (736)..(740): n is a, c, g, or t
  misc_feature (742)..(743): n is a, c, g, or t
  misc_feature (746)..(749): n is a, c, g, or t
  misc_feature (752)..(759): n is a, c, g, or t
  misc_feature (761)..(764): n is a, c, g, or t
  misc_feature (767)..(767): n is a, c, g, or t
  misc_feature (769)..(778): n is a, c, g, or t
  misc_feature (785)..(789): n is a, c, g, or t
  misc_feature (792)..(793): n is a, c, g, or t
  misc_feature (795)..(796): n is a, c, g, or t
  misc_feature (798)..(799): n is a, c, g, or t
  misc_feature (801)..(808): n is a, c, g, or t
  misc_feature (810)..(811): n is a, c, g, or t
  misc_feature (813)..(813): n is a, c, g, or t
  misc_feature (815)..(815): n is a, c, g, or t
  misc_feature (817)..(821): n is a, c, g, or t
  misc_feature (824)..(825): n is a, c, g, or t
  misc_feature (827)..(828): n is a, c, g, or t
  misc_feature (830)..(832): n is a, c, g, or t
  misc_feature (834)..(835): n is a, c, g, or t
  misc_feature (837)..(844): n is a, c, g, or t
  misc_feature (846)..(850): n is a, c, g, or t
  misc_feature (852)..(853): n is a, c, g, or t
  misc_feature (855)..(857): n is a, c, g, or t
  misc_feature (859)..(861): n is a, c, g, or t
  misc_feature (863)..(863): n is a, c, g, or t
  misc_feature (865)..(869): n is a, c, g, or t
  misc_feature (871)..(871): n is a, c, g, or t
  misc_feature (873)..(877): n is a, c, g, or t
  misc_feature (879)..(879): n is a, c, g, or t
  misc_feature (882)..(882): n is a, c, g, or t
  misc_feature (884)..(886): n is a, c, g, or t
  misc_feature (889)..(894): n is a, c, g, or t
  misc_feature (897)..(899): n is a, c, g, or t
  misc_feature (902)..(904): n is a, c, g, or t
  misc_feature (906)..(906): n is a, c, g, or t
  misc_feature (913)..(913): n is a, c, g, or t
  misc_feature (916)..(917): n is a, c, g, or t
  misc_feature (919)..(920): n is a, c, g, or t
  misc_feature (923)..(923): n is a, c, g, or t
  misc_feature (925)..(927): n is a, c, g, or t
  misc_feature (929)..(931): n is a, c, g, or t
  misc_feature (933)..(939): n is a, c, g, or t
  misc_feature (941)..(949): n is a, c, g, or t
  misc_feature (951)..(955): n is a, c, g, or t
  misc_feature (957)..(958): n is a, c, g, or t
  misc_feature (960)..(964): n is a, c, g, or t
  misc_feature (967)..(967): n is a, c, g, or t
  misc_feature (969)..(973): n is a, c, g, or t
  misc_feature (975)..(975): n is a, c, g, or t
  misc_feature (977)..(979): n is a, c, g, or t
  misc_feature (981)..(984): n is a, c, g, or t
  misc_feature (986)..(987): n is a, c, g, or t
  misc_feature (989)..(989): n is a, c, g, or t
  misc_feature (991)..(995): n is a, c, g, or t
  misc_feature (997)..(1005): n is a, c, g, or t
  misc_feature (1008)..(1009): n is a, c, g, or t
  misc_feature (1011)..(1025): n is a, c, g, or t
  misc_feature (1027)..(1027): n is a, c, g, or t
  misc_feature (1029)..(1031): n is a, c, g, or t
  misc_feature (1033)..(1033): n is a, c, g, or t
  misc_feature (1035)..(1037): n is a, c, g, or t
  misc_feature (1041)..(1049): n is a, c, g, or t
  misc_feature (1051)..(1051): n is a, c, g, or t
  misc_feature (1053)..(1056): n is a, c, g, or t
  misc_feature (1058)..(1061): n is a, c, g, or t
  misc_feature (1063)..(1064): n is a, c, g, or t
  misc_feature (1066)..(1066): n is a, c, g, or t
  misc_feature (1068)..(1069): n is a, c, g, or t
  misc_feature (1071)..(1075): n is a, c, g, or t
  misc_feature (1078)..(1080): n is a, c, g, or t
  misc_feature (1082)..(1085): n is a, c, g, or t
  misc_feature (1091)..(1091): n is a, c, g, or t
  misc_feature (1218)..(1218): n is a, c, g, or t
  misc_feature (1235)..(1235): n is a, c, g, or t
  misc_feature (1238)..(1241): n is a, c, g, or t
  misc_feature (1243)..(1243): n is a, c, g, or t
  misc_feature (1250)..(1250): n is a, c, g, or t
  misc_feature (1277)..(1277): n is a, c, g, or t
  misc_feature (1284)..(1284): n is a, c, g, or t
  misc_feature (1331)..(1331): n is a, c, g, or t
  misc_feature (1380)..(1380): n is a, c, g, or t
  misc_feature (1382)..(1382): n is a, c, g, or t
  misc_feature (1409)..(1409): n is a, c, g, or t
  misc_feature (1415)..(1415): n is a, c, g, or t
  misc_feature (1418)..(1418): n is a, c, g, or t
  misc_feature (1442)..(1442): n is a, c, g, or t
  misc_feature (1458)..(1458): n is a, c, g, or t
  misc_feature (1463)..(1463): n is a, c, g, or t
  misc_feature (1923)..(1924): n is a, c, g, or t
  misc_feature (1929)..(1929): n is a, c, g, or t
  misc_feature (1932)..(1932): n is a, c, g, or t
  misc_feature (1938)..(1938): n is a, c, g, or t
  misc_feature (1941)..(1942): n is a, c, g, or t
  misc_feature (1957)..(1957): n is a, c, g, or t
  misc_feature (1962)..(1963): n is a, c, g, or t
  misc_feature (1968)..(1969): n is a, c, g, or t
  misc_feature (1971)..(1971): n is a, c, g, or t
  misc_feature (1983)..(1984): n is a, c, g, or t
  misc_feature (1989)..(1989): n is a, c, g, or t
  misc_feature (1995)..(1996): n is a, c, g, or t
  misc_feature (1998)..(1998): n is a, c, g, or t
  misc_feature (2179)..(2179): n is a, c, g, or t
  misc_feature (2197)..(2197): n is a, c, g, or t
  misc_feature (2230)..(2230): n is a, c, g, or t
  misc_feature (2252)..(2255): n is a, c, g, or t
  misc_feature (2293)..(2293): n is a, c, g, or t
  misc_feature (2295)..(2295): n is a, c, g, or t
  misc_feature (2305)..(2305): n is a, c, g, or t
  misc_feature (2309)..(2309): n is a, c, g, or t
  misc_feature (2365)..(2365): n is a, c, g, or t
  misc_feature (2404)..(2404): n is a, c, g, or t
  misc_feature (2431)..(2431): n is a, c, g, or t
  misc_feature (2434)..(2435): n is a, c, g, or t
  misc_feature (2437)..(2440): n is a, c, g, or t
  misc_feature (2446)..(2446): n is a, c, g, or t
  misc_feature (2448)..(2451): n is a, c, g, or t
  misc_feature (2453)..(2480): n is a, c, g, or t
  misc_feature (2482)..(2487): n is a, c, g, or t
  misc_feature (2489)..(2491): n is a, c, g, or t
  misc_feature (2493)..(2495): n is a, c, g, or t
  misc_feature (2497)..(2503): n is a, c, g, or t
  misc_feature (2505)..(2506): n is a, c, g, or t
  misc_feature (2508)..(2519): n is a, c, g, or t
  misc_feature (2521)..(2524): n is a, c, g, or t
  misc_feature (2526)..(2526): n is a, c, g, or t
  misc_feature (2528)..(2528): n is a, c, g, or t
  misc_feature (2530)..(2537): n is a, c, g, or t
  misc_feature (2539)..(2539): n is a, c, g, or t
  misc_feature (2541)..(2549): n is a, c, g, or t
  misc_feature (2551)..(2556): n is a, c, g, or t
  misc_feature (2558)..(2562): n is a, c, g, or t
  misc_feature (2564)..(2564): n is a, c, g, or t
  misc_feature (2566)..(2572): n is a, c, g, or t
  misc_feature (2575)..(2576): n is a, c, g, or t
  misc_feature (2578)..(2580): n is a, c, g, or t
  misc_feature (2582)..(2582): n is a, c, g, or t
  misc_feature (2584)..(2584): n is a, c, g, or t
  misc_feature (2586)..(2586): n is a, c, g, or t
  misc_feature (2589)..(2595): n is a, c, g, or t
  misc_feature (2597)..(2598): n is a, c, g, or t
  misc_feature (2600)..(2601): n is a, c, g, or t
  misc_feature (2603)..(2603): n is a, c, g, or t
  misc_feature (2605)..(2607): n is a, c, g, or t
  misc_feature (2611)..(2612): n is a, c, g, or t
  misc_feature (2614)..(2620): n is a, c, g, or t
  misc_feature (2623)..(2623): n is a, c, g, or t
  misc_feature (2625)..(2635): n is a, c, g, or t
  misc_feature (2637)..(2638): n is a, c, g, or t
  misc_feature (2640)..(2642): n is a, c, g, or t
  misc_feature (2646)..(2647): n is a, c, g, or t
  misc_feature (2649)..(2650): n is a, c, g, or t
  misc_feature (2652)..(2658): n is a, c, g, or t
  misc_feature (2660)..(2662): n is a, c, g, or t
  misc_feature (2665)..(2667): n is a, c, g, or t
  misc_feature (2669)..(2671): n is a, c, g, or t
  misc_feature (2673)..(2675): n is a, c, g, or t
  misc_feature (2678)..(2679): n is a, c, g, or t
  misc_feature (2681)..(2689): n is a, c, g, or t
  misc_feature (2691)..(2694): n is a, c, g, or t
  misc_feature (2697)..(2708): n is a, c, g, or t
  misc_feature (2711)..(2720): n is a, c, g, or t
  misc_feature (2722)..(2725): n is a, c, g, or t
  misc_feature (2727)..(2731): n is a, c, g, or t
  misc_feature (2733)..(2735): n is a, c, g, or t
  misc_feature (2737)..(2745): n is a, c, g, or t
  misc_feature (2747)..(2747): n is a, c, g, or t
  misc_feature (2749)..(2749): n is a, c, g, or t
  misc_feature (2751)..(2756): n is a, c, g, or t
  misc_feature (2758)..(2759): n is a, c, g, or t
  misc_feature (2761)..(2763): n is a, c, g, or t
  misc_feature (2765)..(2770): n is a, c, g, or t
  misc_feature (2772)..(2776): n is a, c, g, or t
  misc_feature (2778)..(2778): n is a, c, g, or t
  misc_feature (2780)..(2783): n is a, c, g, or t
  misc_feature (2785)..(2785): n is a, c, g, or t
  misc_feature (2787)..(2796): n is a, c, g, or t
  misc_feature (2799)..(2801): n is a, c, g, or t
  misc_feature (2803)..(2810): n is a, c, g, or t
  misc_feature (2814)..(2821): n is a, c, g, or t
  misc_feature (2823)..(2823): n is a, c, g, or t
  misc_feature (2825)..(2834): n is a, c, g, or t
  misc_feature (2836)..(2842): n is a, c, g, or t
  misc_feature (2844)..(2844): n is a, c, g, or t
  misc_feature (2846)..(2849): n is a, c, g, or t
  misc_feature (2851)..(2851): n is a, c, g, or t
  misc_feature (2854)..(2854): n is a, c, g, or t
  misc_feature (2856)..(2865): n is a, c, g, or t
  misc_feature (2867)..(2868): n is a, c, g, or t
  misc_feature (2870)..(2871): n is a, c, g, or t
  misc_feature (2873)..(2873): n is a, c, g, or t
  misc_feature (2875)..(2875): n is a, c, g, or t
  misc_feature (2878)..(2880): n is a, c, g, or t
  misc_feature (2882)..(2891): n is a, c, g, or t
  misc_feature (2893)..(2896): n is a, c, g, or t
  misc_feature (2898)..(2899): n is a, c, g, or t
  misc_feature (2901)..(2905): n is a, c, g, or t
  misc_feature (2907)..(2907): n is a, c, g, or t
  misc_feature (2910)..(2918): n is a, c, g, or t
  misc_feature (2921)..(2921): n is a, c, g, or t
  misc_feature (2924)..(2931): n is a, c, g, or t
  misc_feature (2934)..(2936): n is a, c, g, or t
  misc_feature (2938)..(2938): n is a, c, g, or t
  misc_feature (2940)..(2953): n is a, c, g, or t
  misc_feature (2957)..(2960): n is a, c, g, or t
  misc_feature (2962)..(2965): n is a, c, g, or t
  misc_feature (2967)..(2970): n is a, c, g, or t
  misc_feature (2973)..(2974): n is a, c, g, or t
  misc_feature (2976)..(2979): n is a, c, g, or t
  misc_feature (2982)..(2990): n is a, c, g, or t
  misc_feature (2992)..(2993): n is a, c, g, or t
  misc_feature (2995)..(3000): n is a, c, g, or t
  misc_feature (3002)..(3006): n is a, c, g, or t
  misc_feature (3009)..(3015): n is a, c, g, or t
  misc_feature (3017)..(3017): n is a, c, g, or t
  misc_feature (3020)..(3020): n is a, c, g, or t
  misc_feature (3022)..(3022): n is a, c, g, or t
  misc_feature (3024)..(3024): n is a, c, g, or t
  misc_feature (3026)..(3029): n is a, c, g, or t
  misc_feature (3031)..(3033): n is a, c, g, or t
  misc_feature (3035)..(3036): n is a, c, g, or t
  misc_feature (3038)..(3042): n is a, c, g, or t
  misc_feature (3044)..(3044): n is a, c, g, or t
  misc_feature (3046)..(3046): n is a, c, g, or t
  misc_feature (3048)..(3050): n is a, c, g, or t
  misc_feature (3053)..(3055): n is a, c, g, or t
  misc_feature (3057)..(3058): n is a, c, g, or t
  misc_feature (3061)..(3068): n is a, c, g, or t
  misc_feature (3070)..(3074): n is a, c, g, or t
  misc_feature (3076)..(3077): n is a, c, g, or t
  misc_feature (3079)..(3082): n is a, c, g, or t
  misc_feature (3084)..(3084): n is a, c, g, or t
  misc_feature (3086)..(3087): n is a, c, g, or t
  misc_feature (3089)..(3090): n is a, c, g, or t
  misc_feature (3092)..(3101): n is a, c, g, or t
  misc_feature (3104)..(3111): n is a, c, g, or t
  misc_feature (3113)..(3120): n is a, c, g, or t
  misc_feature (3122)..(3125): n is a, c, g, or t
  misc_feature (3127)..(3130): n is a, c, g, or t
  misc_feature (3132)..(3137): n is a, c, g, or t
  misc_feature (3139)..(3141): n is a, c, g, or t
  misc_feature (3143)..(3144): n is a, c, g, or t
  misc_feature (3146)..(3146): n is a, c, g, or t
  misc_feature (3149)..(3157): n is a, c, g, or t
  misc_feature (3159)..(3161): n is a, c, g, or t
  misc_feature (3163)..(3164): n is a, c, g, or t
  misc_feature (3166)..(3167): n is a, c, g, or t
  misc_feature (3169)..(3169): n is a, c, g, or t
  misc_feature (3171)..(3173): n is a, c, g, or t
  misc_feature (3175)..(3176): n is a, c, g, or t
  misc_feature (3178)..(3185): n is a, c, g, or t
  misc_feature (3188)..(3191): n is a, c, g, or t
  misc_feature (3193)..(3193): n is a, c, g, or t
  misc_feature (3195)..(3195): n is a, c, g, or t
  misc_feature (3197)..(3202): n is a, c, g, or t
  misc_feature (3206)..(3206): n is a, c, g, or t
  misc_feature (3208)..(3209): n is a, c, g, or t
  misc_feature (3211)..(3212): n is a, c, g, or t
  misc_feature (3214)..(3214): n is a, c, g, or t
  misc_feature (3216)..(3220): n is a, c, g, or t
  misc_feature (3222)..(3225): n is a, c, g, or t
  misc_feature (3227)..(3228): n is a, c, g, or t
  misc_feature (3230)..(3234): n is a, c, g, or t
  misc_feature (3237)..(3237): n is a, c, g, or t
  misc_feature (3239)..(3241): n is a, c, g, or t
  misc_feature (3244)..(3244): n is a, c, g, or t
  misc_feature (3246)..(3247): n is a, c, g, or t
  misc_feature (3249)..(3255): n is a, c, g, or t
  misc_feature (3257)..(3258): n is a, c, g, or t
  misc_feature (3260)..(3264): n is a, c, g, or t
  misc_feature (3266)..(3270): n is a, c, g, or t
  misc_feature (3272)..(3277): n is a, c, g, or t
  misc_feature (3279)..(3287): n is a, c, g, or t
  misc_feature (3290)..(3290): n is a, c, g, or t
  misc_feature (3292)..(3292): n is a, c, g, or t
  misc_feature (3294)..(3294): n is a, c, g, or t
  misc_feature (3296)..(3298): n is a, c, g, or t
  misc_feature (3301)..(3306): n is a, c, g, or t
  misc_feature (3308)..(3309): n is a, c, g, or t
  misc_feature (3311)..(3312): n is a, c, g, or t
  misc_feature (3314)..(3314): n is a, c, g, or t
  misc_feature (3316)..(3323): n is a, c, g, or t
  misc_feature (3325)..(3325): n is a, c, g, or t
  misc_feature (3327)..(3327): n is a, c, g, or t
  misc_feature (3329)..(3336): n is a, c, g, or t
  misc_feature (3338)..(3349): n is a, c, g, or t
  misc_feature (3351)..(3361): n is a, c, g, or t
  misc_feature (3363)..(3363): n is a, c, g, or t
  misc_feature (3365)..(3366): n is a, c, g, or t
  misc_feature (3368)..(3370): n is a, c, g, or t
  misc_feature (3372)..(3375): n is a, c, g, or t
  misc_feature (3377)..(3377): n is a, c, g, or t
  misc_feature (3380)..(3392): n is a, c, g, or t
  misc_feature (3394)..(3395): n is a, c, g, or t
  misc_feature (3397)..(3398): n is a, c, g, or t
  misc_feature (3401)..(3401): n is a, c, g, or t
  misc_feature (3403)..(3403): n is a, c, g, or t
  misc_feature (3405)..(3408): n is a, c, g, or t
  misc_feature (3410)..(3411): n is a, c, g, or t
  misc_feature (3413)..(3414): n is a, c, g, or t
  misc_feature (3416)..(3417): n is a, c, g, or t
  misc_feature (3419)..(3420): n is a, c, g, or t
  misc_feature (3422)..(3424): n is a, c, g, or t
  misc_feature (3426)..(3434): n is a, c, g, or t
  misc_feature (3437)..(3443): n is a, c, g, or t
  misc_feature (3445)..(3446): n is a, c, g, or t
  misc_feature (3448)..(3450): n is a, c, g, or t
  misc_feature (3452)..(3452): n is a, c, g, or t
  misc_feature (3454)..(3457): n is a, c, g, or t
  misc_feature (3459)..(3460): n is a, c, g, or t
  misc_feature (3462)..(3467): n is a, c, g, or t
  misc_feature (3469)..(3480): n is a, c, g, or t
  misc_feature (3484)..(3484): n is a, c, g, or t
  misc_feature (3486)..(3488): n is a, c, g, or t
  misc_feature (3491)..(3491): n is a, c, g, or t
  misc_feature (3493)..(3494): n is a, c, g, or t
  misc_feature (3497)..(3497): n is a, c, g, or t
  misc_feature (3499)..(3500): n is a, c, g, or t
  misc_feature (3502)..(3505): n is a, c, g, or t
  misc_feature (3507)..(3510): n is a, c, g, or t
  misc_feature (3512)..(3513): n is a, c, g, or t
  misc_feature (3515)..(3518): n is a, c, g, or t
  misc_feature (3521)..(3527): n is a, c, g, or t
  misc_feature (3529)..(3533): n is a, c, g, or t
  misc_feature (3537)..(3537): n is a, c, g, or t
  misc_feature (3539)..(3541): n is a, c, g, or t
  misc_feature (3543)..(3545): n is a, c, g, or t
  misc_feature (3547)..(3554): n is a, c, g, or t
  misc_feature (3558)..(3558): n is a, c, g, or t
  misc_feature (3560)..(3560): n is a, c, g, or t
  misc_feature (3563)..(3569): n is a, c, g, or t
  misc_feature (3571)..(3572): n is a, c, g, or t
  misc_feature (3574)..(3577): n is a, c, g, or t
  misc_feature (3579)..(3581): n is a, c, g, or t
  misc_feature (3583)..(3584): n is a, c, g, or t
  misc_feature (3587)..(3589): n is a, c, g, or t
  misc_feature (3591)..(3592): n is a, c, g, or t
  misc_feature (3594)..(3594): n is a, c, g, or t
  misc_feature (3596)..(3597): n is a, c, g, or t
  misc_feature (3600)..(3602): n is a, c, g, or t
  misc_feature (3604)..(3604): n is a, c, g, or t
  misc_feature (3606)..(3613): n is a, c, g, or t
  misc_feature (3615)..(3615): n is a, c, g, or t
  misc_feature (3617)..(3618): n is a, c, g, or t
  misc_feature (3620)..(3625): n is a, c, g, or t
  misc_feature (3629)..(3638): n is a, c, g, or t
  misc_feature (3640)..(3643): n is a, c, g, or t
  misc_feature (3646)..(3647): n is a, c, g, or t
  misc_feature (3649)..(3649): n is a, c, g, or t
  misc_feature (3651)..(3651): n is a, c, g, or t
  misc_feature (3654)..(3655): n is a, c, g, or t
  misc_feature (3657)..(3659): n is a, c, g, or t
  misc_feature (3661)..(3670): n is a, c, g, or t
  misc_feature (3672)..(3675): n is a, c, g, or t
  misc_feature (3677)..(3679): n is a, c, g, or t
  misc_feature (3683)..(3683): n is a, c, g, or t
  misc_feature (3685)..(3689): n is a, c, g, or t
  misc_feature (3691)..(3691): n is a, c, g, or t
  misc_feature (3693)..(3694): n is a, c, g, or t
  misc_feature (3696)..(3696): n is a, c, g, or t
  misc_feature (3698)..(3698): n is a, c, g, or t
  misc_feature (3700)..(3709): n is a, c, g, or t
  misc_feature (3711)..(3718): n is a, c, g, or t
  misc_feature (3722)..(3731): n is a, c, g, or t
  misc_feature (3733)..(3733): n is a, c, g, or t
  misc_feature (3735)..(3737): n is a, c, g, or t
  misc_feature (3739)..(3739): n is a, c, g, or t
  misc_feature (3741)..(3744): n is a, c, g, or t
  misc_feature (3746)..(3753): n is a, c, g, or t
  misc_feature (3755)..(3757): n is a, c, g, or t
  misc_feature (3759)..(3759): n is a, c, g, or t
  misc_feature (3761)..(3764): n is a, c, g, or t
  misc_feature (3766)..(3766): n is a, c, g, or t
  misc_feature (3768)..(3769): n is a, c, g, or t
  misc_feature (3771)..(3772): n is a, c, g, or t
  misc_feature (3774)..(3775): n is a, c, g, or t
  misc_feature (3777)..(3777): n is a, c, g, or t
  misc_feature (3779)..(3782): n is a, c, g, or t
  misc_feature (3784)..(3790): n is a, c, g, or t
  misc_feature (3792)..(3794): n is a, c, g, or t
  misc_feature (3797)..(3801): n is a, c, g, or t
  misc_feature (3803)..(3803): n is a, c, g, or t
  misc_feature (3806)..(3821): n is a, c, g, or t
  misc_feature (3824)..(3824): n is a, c, g, or t
  misc_feature (3826)..(3828): n is a, c, g, or t
  misc_feature (3832)..(3839): n is a, c, g, or t
  misc_feature (3841)..(3841): n is a, c, g, or t
  misc_feature (3844)..(3845): n is a, c, g, or t
  misc_feature (3847)..(3848): n is a, c, g, or t
  misc_feature (3850)..(3851): n is a, c, g, or t
  misc_feature (3854)..(3862): n is a, c, g, or t
  misc_feature (3864)..(3870): n is a, c, g, or t
  misc_feature (3872)..(3872): n is a, c, g, or t
  misc_feature (3874)..(3882): n is a, c, g, or t
  misc_feature (3884)..(3887): n is a, c, g, or t
  misc_feature (3889)..(3893): n is a, c, g, or t
  misc_feature (3896)..(3899): n is a, c, g, or t
  misc_feature (3901)..(3902): n is a, c, g, or t
  misc_feature (3905)..(3910): n is a, c, g, or t
  misc_feature (3912)..(3913): n is a, c, g, or t
  misc_feature (3916)..(3921): n is a, c, g, or t
  misc_feature (3923)..(3923): n is a, c, g, or t
  misc_feature (3926)..(3926): n is a, c, g, or t
  misc_feature (3928)..(3933): n is a, c, g, or t
  misc_feature (3935)..(3939): n is a, c, g, or t
  misc_feature (3941)..(3944): n is a, c, g, or t
  misc_feature (3947)..(3950): n is a, c, g, or t
  misc_feature (3952)..(3952): n is a, c, g, or t
  misc_feature (3954)..(3964): n is a, c, g, or t
  misc_feature (3966)..(3973): n is a, c, g, or t
  misc_feature (3975)..(3982): n is a, c, g, or t
  misc_feature (3984)..(3986): n is a, c, g, or t
  misc_feature (3988)..(3989): n is a, c, g, or t
  misc_feature (3991)..(3991): n is a, c, g, or t
  misc_feature (3993)..(3997): n is a, c, g, or t
  misc_feature (3999)..(4000): n is a, c, g, or t
nnccnncnnnnnannnnncnnnnnnnnnnnnnannnnnannnnnnnnnnnnnncnnncngnnngntnnnnnncncnnnnntcnnncnnncnnnnnncnnnnnntnnnnnnnnnntnaannanaacancannnnannnnnngannannnnnnnncancnnnnnnntnannnncggnngnnncntcnnnnnnnnnnnnannnnnnannncnnngnnnntnnnnncnnncngnnnnangnnnnnntntnnnnnnncnncannnnnnnnnannncagcnnnnccnnngnngnngnnntnnnnnnnnnannntnnnannangacgannnntnnnncgnnncnnnngtnntnnncnannnntngncgnngnngnnnannnnnnnnnnnncgnnnnnngnnnntntnnncannnnnnacnncnnntnnngngntgnnnnnnnnnncgnnnannnnnnatnntcncnnnnntnntcnnnnnnnnnnngcggcngnnncnnnnnnngncnncnnnnngnnannagaanannnngcnnnnnannncnncntcgnngntgntnntcnnnncnannnnannnannnnnntnnnnnnnttnnnnnacaannannnntnannncagnannanaagnannnntcnnnnannnnatcnnngnnnntnnnnannncnnnnnnnnnnnnnncnnnnnnnnngnnnnnnnnnnnannnnnnnnnncnnnntnnncnnngnnntnnnggangncgnnnnnannaannnngcnnnnnnnncnnnnctncnnnnnnnnnnggaggannnnngcnncnncnncnnnnnnnncnncncngnnnnntcnncnncnnncnncnnnnnnnncnnnnncnncnnncnnnanannnnncngnnnnncnacngnnngannnnnngcnnnctnnncnacgacgncgnngnngtngnnnannncnnnnnnncnnnnnnnnngnnnnngnngnnnnncgncnnnnngngnnngnnnntnntngnnnnncnnnnnnnnnacnncnnnnnnnnnnnnnnngncnnnangnnncggnnnnnnnnnancnnnnannnncnncncnncnnnnntcnnntnnnngggaanagatacgtttcggcgtatcaggctaccatacagcgcagcacgacgaccctctgctcggtcgtgaatatggatgccgactaccgaggcggcaacaacaatacggcgtatgacggaacctatcgcacgntcctcggacgcccggcnacnnnnanctcccgnaccaatttccgcaattacgcccgcaancgcaagnccggttcgacggaatggaactgcatgacctacgacatccaaaaaganctgtattggctcttcgtcatcgaatatgccacgctcaactcgcaggcgncnttcaatgcggaaaaggacagcaacggntatgcncanggcggcctcggagcaggtgtaacnaacatgtccgattggngcggnttcaacggctattatccgttcgtgccgtgcggccataccgacgaactcggaaacggcacgggcgaggtagcataccccgtcatcaatgaggacggatcgacccgatgcacggtcatggttccgcgctatcggggtgtcgagaatcctttcggtcatgtttggcaatggacggacggcatcaacatccggatcagcccgaccgaggagaatggcggcgacgggttgagcaaggtattcgtctgcaccgatccggccaaattctcggatagcggttacgacggctacgcccatgtaggcaacgaggcccgcgcagagggatatgtcaaagaggtgattttcggcgagggaggagagatcatgccctccgtcgtaggaggcggttcttcgacctatttctgcgactaccactataccaacatcccgacggccgaagcattgcgcggtgtcctgttcggcggtnntgcgnatnacggcncgnntgccggttttgcgtntgcgnnttcgnntnacgcgccctcgnntacgnatgcgnntntcgggtctcgcctttgctttatccccgcataacggataacgccacagaaaacacgctcggccaataattaaacgatacgacaatggagaataaccataatccgatggaagatgacggttcgctggatttcctgaaaatccccgccgacgaaaccaacaagcattttaactgccccgaaacnacgcagcagaagttgatnaacctcaccttttgggtctgcgactacatcganggagtgaaaacgaagttcggannnnatcggacgctcgtcaagatcaagatgaatcgggacgancncgaccgcgangcangcaagttcttcaccaattcgcgggaaatcaaatatgtcctcgccaagattcggganatggacaaattcccgcgacgggtaacgatgcgggcatcnggaacgcggtactatttggagtaatgnatnnannnnggttgntnnnncnnnnnnnnnnnnnnnnnnnnnnnnnnnnannnnnngnnngnnngnnnnnnntnngnnnnnnnnnnnnannnncncncnnnnnnnnangnnnnnnnnngnnnnnncnnnnnantnnnnnnnagnnannnanananatnnnnnnngnnannancnnncctnncnnnnnnnaanannnnnnnnnnnannannnagtnngnngnnnnnnncnnnccnnncnnncnnncgnncnnnnnnnnnannnnaannnnnnnnnnnnaannnnnnnnnnannnnannnnnannnannnnnnnnntngntnnnnnncnncnnncnnnnnnannnnnangnnnngngnnnnnnnnnncgnnngnnnnnnnncttnnnnnnnnanannnnnnnnnnannnnnnntncnnnncntgnannnnnnnnnnannanncntncannnannnnnnnnnnannnngnncnnnnncnatnnnnnnnnnganagnnnnnnnnatnnntngnnnnnnnnnnnnnnccgnnnncnnnntnnnncanncnnnnatnnnnnnnnncnnannnnnntnnnnntcnnnnnnnanganananannnntnnntnnannnnngngngnnncannnanngannnnnnnngnnnnncnngnnnncnannanngnnnnnnnnnncgnnnnnnnntnnnnnnnnannnncnnnngnnnnnncnnncnntngannnnnnnnnannnanngnnancnnncnncnnnnnnnnaannnnangnannnnnncgcncnncnngntnnnnncnnnnanngnnnnnacngnnngcntnncnnnnnnnanntnnnnnannnnntnnnnnncnnnnnnnnngcntncntnnntcnnnnnntnnannangnnnnnnnngngngnnnnnnnntnnnnnnnnnnnncnnnnnnnnnnntntnncnnncnnnnangannnnnnnnnnnnncnncnngcngncnnnnannannanntnncnnncnnnnnnnnnacnnnnnnngnnannnancnnnnanntnnnnnngnnnnnnnnnnnncggncnnncangnncgngnncnnnntnnnntnngnnnngtnnnnnnncnnnnncaancnnncnnncnnnnnnnnatcnancannnnnnntnncnnnngnnngnncgnnngnntnannaannnantnnnnnnnngngnnannnnnnacannnnnnnnnnannnngtnngnanggnngnnngnnnnnnnnnnannnnannnattnannnnnancnntnantnnnnnnnnnntnnnnnnnncgtnnnnnnnnnnangnnngncnnnntnnnnnnnngnnngnannnnangnnanntnnancnnnngnnnnnnnannnagnnnnngnccnnnnnnnnnnnnnnnntgncnnngggnnnnnnnnanccnncnncnnaannnnnnnnnannnnnnntncnnnnnnnnngnnnntnnnnnggnnnncnntannnnnnannaannnnnngnagncnnnnnncnnnnnannnnggnnnncnannnnnnnnnnnannnnnnnnannnnnnnnannncnncnannnnngnn

SEQ ID NO: 284 - DNA, 4000 bp, Escherichia coli
  misc_feature (1349)..(1349): n is a, c, g, or t
  misc_feature (1377)..(1377): n is a, c, g, or t
  misc_feature (1986)..(1986): n is a, c, g, or t
  misc_feature (2000)..(2000): n is a, c, g, or t
  misc_feature (3812)..(3812): n is a, c, g, or t
  misc_feature (3983)..(3983): n is a, c, g, or t
aggatcggtctctgacgaaatgattgcacacaaaattgagggtacggcactctaccagagattgccaggagaaatgcacgcgtcctcccgggtagtagaaccattgaacgtcgagccggagaatcgaattgcccagttcccaacgtttgaaacgtggcaagcgcgccgcaagaacaaatagaagtgggcacgtctgtaaatcgaatcatgcagtttaagcagttcagtgttcgagatgaccgctgcgctatgaaagttggaacagacgcgctgctgcttgcatcatggtgctcagtagattcaatgttcgacattgttgatttgggatgtggatcaggcattattgccatcatgttggctcaacgagccaccgaagcgcaggtccttggagttgaacttgaagagaacgctgccatacaggcgtcgagcaatatggcaggatcacctttttcaaatcggatggaggccatcctcgagagcgcacaagaatttgcgagccatcccgacaacaaatggaagtttgatttggtggtttgcaacccgccctatttccatggcaaacctaagtcaccagatcaagcgcgtaatctcgctcggcatgatgaatcacttccgctgaaagagttgctgctggctgctcacgaagtcatgaggccgaacggcacattggcccttgcttggccaatggacagaaaggagaagctgatgaaagaatccttggaaatgggattagcactgactcgttattgtgaaatagctggaacaacgaatcatgagccgaagcgttttttatcggagtggaagaagatttccagcaacttcgaagctggacagcctgttgaaacggagcgactcaacattgaatcaagaccacggatttcaggcaaacctcaacattctgctcggtacaaacagctgcttgagtccttcttgatagaatgggggtaggcagcttatgccccaatcacttgcttcaatcgatcaatttgtgcggaccacaattctttcgcatcatcgatttcgtcttcttcggcaaagtctgttactacgatggcggtgtctcctgttaaatcgtcaatcttgattcgaaattcaaaaaaggttgacaatccttcctcttcgtcttccgtccagcgaaatttcacgaactcgtcgcgcttctttgtcaccaatcgagcactttcttcgcttccatcccataaaaagatgtgtacatcctttttgatattgacatcgtcacaaaaccattcggctaggccgctgggtgtgctgaacatattaaaaagcacgcctttggagctattgattgggtgctcaacttggaatctctctttctccatgggtcacangtgtgtcaaatggcaagatacagcgaanttcgcaagggtaggcggggtttttgaaaaattgatttttaaaggcttttctcgcgttcgtcattatatttgcgcccgaaatggcgggatagctcagccggttagagcgcaggattcataatcctgaggtcgagagttcgagtctctctcccgctactacccgagacccgaagacattttgtcttcgggttttgttttgctattctcgtgaatacacggaaacattggggctgtggagtaatgcatgattccaaacgtgtgttcggaattttccaaacgattagttcaagccatttgatatccccttgcggagatttaattcactcaatcagctttggttcatccattcgattgagcttcgaccttttcaccagaatgtctatttgaaacctccgatgcattgcgtctgggctttttttcttctgtgtttcttgctgccatgcaatcatttgctctttcaagtagtaagagcaaagaaagacaggggttgtggcagtttgttcgcccaatctctgcatgccaaaaatttttattcagtcttgaatgcgcattattttaaatgttattcgatgtttttgtaagtaaaaacaaattgagaccacgcttttangggtataaaagatnaatattaatcgacgaaagtaaatatacacccgaattaatgtgttatattagtgggagaatcgtcccattatgaagccaaattatttgttttttccttcggtgttcattgcattcttgctcggtagtgcccagctggccagcggtcaagttgaaatcaacctgactgaacacacagcttcaaccaacggaaccacctaccgtctctacgctgaattcgacgagacggcaaacattacttcagtatttgcgccggaagccatttatcaagatcaatggtggccaggtctcgacccttcggattcgagtgatgatctccctccgaactccattccctccatttcttttgcgacagacgcttccaacggtttctttcaatttgcacttggccaacattacaacacgccttcaggaatcattccttctttgtttcagttctaccctgacatggagttcgactcatggttcaccattggcggggcagagggggtctcggcgggtgttcaacttattccaggacagacggatgcgttgaataatttcaacaatggcggatcctttgatacggatgggtttgccgatggtggggggtggtacactgcgacgagcacgcccatttacacggatgaaaatggtcaaattttattagcgcagcttaccgttgaagagggcgcaagcatcgatgtcgttttgtccttgatctggcgggatgataatgcggtgagtcatgtggaaatcggacttacggcatcaataggcgacaatggagcgggctgcatggattcgatggcctgcaattacaattcaagtgctacggaagcgggagattgtgttttcgcatctgatccatgtgaatcttgttcaggggagtctgatggcaccggaacgatcgtgttaaatgatgcagacggcgatgatgtttgcgatagcgatgaagtgatcggttgccagaatgccagtgcctgtaattacaattcaagtgccaccgactctggtgtttgctcatttgcatcgggttgcgacgaatgcgctggtaaccctacgaacggatcgggattcgtacaggacaatgatgctgacaatgatggtgtatgcgacgttgatgaagttctgggttgcaccaattcttcagcctgcaactatttggaagatgcaacagaggacagtggagcatgcgttttgcctgctaattgtgaaacatgtacaggagaaacagatggctcaggtacaattgtagataatgaccaagacggcgatggggtatgtgatgttgatgaagttgcgggatgtttggatgcctccgcgtgcaattacaatgcccaggccacagacgatggtggagggtgcatatatgctaccggctgcgactactgttcgggcgctacagatggaagcgggtctattttaaatggcgataccgatggagattccgtttgcaattcggatgaaattgaagggtgtttggacagcatggcgtgcaattacaatcaatttgcaacggattctagcgcttgtgaatatgcgtttggatgtgccgaatgctctggtgccgatgacggaacagggatggttgttgccaatgacgacgatgaagatggggtttgcaatgtggatgagatcagcggttgtcaggattcaaatgcgtgcaactataacaatgatgctacagacgatagcggcgattgtcagtaccccgcgggttgtgacagttgctcaggcgcatccgatggatcaggtgttataattgacaacgatgcagacaatgatggggtttgtgatgcagatgagattgtgggttgccaagtcccgtcggcntgtaacttcaatgaaaatgctaccgaatcgggtgattgcacttaccctgatactgggtacaactgcgcgggcgtttgtttaaatgactttgatggcgacggcgtgtgcgatgttttcgaggtcagcggctgcgtttacgctagcgcgtgcaactatgatgcgtcagcgacngatgacgacggatcatg

SEQ ID NO: 285 - DNA, 4000 bp, Escherichia coli
  misc_feature (13)..(13): n is a, c, g, or t
  misc_feature (72)..(72): n is a, c, g, or t
  misc_feature (335)..(336): n is a, c, g, or t
  misc_feature (338)..(338): n is a, c, g, or t
  misc_feature (340)..(342): n is a, c, g, or t
  misc_feature (344)..(344): n is a, c, g, or t
  misc_feature (346)..(360): n is a, c, g, or t
  misc_feature (362)..(367): n is a, c, g, or t
  misc_feature (369)..(369): n is a, c, g, or t
  misc_feature (371)..(371): n is a, c, g, or t
  misc_feature (373)..(374): n is a, c, g, or t
  misc_feature (376)..(377): n is a, c, g, or t
  misc_feature (379)..(381): n is a, c, g, or t
  misc_feature (383)..(387): n is a, c, g, or t
  misc_feature (389)..(390): n is a, c, g, or t
  misc_feature (392)..(419): n is a, c, g, or t
  misc_feature (421)..(422): n is a, c, g, or t
  misc_feature (424)..(424): n is a, c, g, or t
  misc_feature (426)..(427): n is a, c, g, or t
  misc_feature (429)..(429): n is a, c, g, or t
  misc_feature (431)..(432): n is a, c, g, or t
  misc_feature (434)..(434): n is a, c, g, or t
  misc_feature (437)..(437): n is a, c, g, or t
  misc_feature (439)..(445): n is a, c, g, or t
  misc_feature (447)..(448): n is a, c, g, or t
  misc_feature (450)..(453): n is a, c, g, or t
  misc_feature (455)..(455): n is a, c, g, or t
  misc_feature (1545)..(1545): n is a, c, g, or t
  misc_feature (1989)..(1989): n is a, c, g, or t
  misc_feature (1997)..(1997): n is a, c, g, or t
  misc_feature (2004)..(2004): n is a, c, g, or t
  misc_feature (2018)..(2018): n is a, c, g, or t
  misc_feature (2026)..(2026): n is a, c, g, or t
  misc_feature (2040)..(2040): n is a, c, g, or t
  misc_feature (2055)..(2055): n is a, c, g, or t
  misc_feature (2757)..(2757): n is a, c, g, or t
  misc_feature (2820)..(2820): n is a, c, g, or t
  misc_feature (2869)..(2869): n is a, c, g, or t
  misc_feature (3935)..(3935): n is a, c, g, or t
ggttgcttgttanctgtttacgctttgatggttgactgacaacctggcgtgagaatggccaggttaaacggngccgtttataccggaacgtcttgtttaacagcgaaaattaccggtgtgaaccgatgacaatgcttagttaggctgctcatattgagcaaccagcattgttataaggtcttataacgctatagattagctgaatctagcgttctctctcattggttgtttcttggtcacgtggttactgaattcaaatgtatgccgtgtacgggtgatacagacaattcgatgattgtaatttatcatgtggattatgttcgctcgtttggttnncnannntngnnnnnnnnnnnnnnncnnnnnncntnanngnntnnnannnnnannannnnnnnnnnnnnnnnnnnnnnnnnnnnannantnntnannanatntnnnnnnngnntnnnntngatgaacaaccttgaattcagacgagacggccagacctccttcgttactgcaatgcccgaagctggcaattggatttcgacccgttaacggatttacttcataatcaaattgttattatttttgtattggtttgaggtagcactgtagaaagaggattttaaaagctagacatgtgagaagattttacgctatgaaaacatttttcttagtcagtgattatatcttaatgttttcgctatattaagaacaagcgatcttgtgattgacaaacaaattcttaagcattatagatctatatttggtgtagtcaaaaagcaaaataaattttaagcttaaattgcttatttgcttagttttgtggttcaagtatgaagggtgatcacattactatcaccccaccttttcataacaaaacttagcttaggtgaaaaaaaaatagaaatttatgagttggtaaggctggtggaataggccatttccgagttactccagcctctgtttcaaaacgagtcctcgtgcaaaactttcgaatgaaaatgagtttgatttgcgtgaaaatggacctttaggggaaacacagtttcacatgaatagtttcgcacgaagactcgttttgagaaagaggcaaaagccaactcggaaatgacctattgtgataaagaaactaaccttgcagtggttgcgggaagtaagcctgtaactcgtagaggcaggcaagttccttgcagatcatctcggtttattagtgatatcaatacttgctttcaagttcagccctgcttttaagtttgttgcgaacaaatgaacaataatgaattatttttaggtgttgctctaaaccatgacacgaggttattgcgctgtcaggagaaatcatttggctcgctcgcttgtcagattaaaattagaggcgttataacatttgacattccattcaaatgtggcagaggctttgcatatttcgataagtaaacattccgaaataccattaattacaaaaagaagcgaaagtaaactacgatgtttcgaagtcatcttaactccataaacaggtagagaaaatgaaataacggtcaagatgttaatttntagggtgaaagttggaagaatatgtgtaagtgtaacacgatctaattaaggtttttaggtaaaccaacaatgcattgtttataatttcaaatgtgatctatacaattcagaacatgtcggctatactactagcccacctttgccagcacatcgaagaccaaagagcctattccactgcaagaccatggtgtcaagtcccttgacccgtctaacatgtttgccgtgctgaaagaaagtgcccaggaaagcattactgttgaatttacgaagtgcttttcagtttcatttgtgaaagaaaacccaaactcaatagacagacggacttaactcgtgcacaaatattcatctaagtttattccacgtttttataattgttgacacgtaagaactcttaataagaccgtgttacactctcttcttacaccgttcacacactacggattnacatctcnaccgttnttttatcttctctncatgtttntggagttggggtgncttggagacgtcgtngtttactctcgcttctttttgtaattacttatgtatttaatccaacatgatcaaaggctgccgtttcattctggaatgtctttggtaaatgatgggtcacgtgatgggtcacgtgatgggtcacgtgatggtgggtagtacgaattctcgaacttattagtgcgcctgcgtaaagtcatcgcatctcacgcgacgtgtcacgtcagtcacgttttggagtccgagagtcttagagactgggactgcttccaaagtagaaatacgtgttcgtccttatattctgtctcttactatttacttataaggcaaactggtatctttttggctttcgtgcggtttcaacaaaacctaaaacgagacacgcacgaaacactttcttacaaaccgttttaaaaactgctctttttgtaggccctttgtctagaattaattatcattttactttcttttcactttcttgctgtttataataaaaattttcccacaaatatcgacattatacaggttcaacggtctcctcgttattattttctatccttcggattttcttggtttgcgttgcgtgtttacaggtgttaaaactcggtctgtataatcgccaattataagtactgaaatagtggattcaaattcatgaaattagtcgtggatgtgaacataatctgtacctagttaagctaaaatcaaaggaaatatttgaantaaaaatttcatagcaatgtaagtttatgccgtgcttacccactttctataatcgtggcaaantctattgttttattttttcggtttcgtagccatgcgtgtagtttatcgntctgattacgagccaatttggatattttaattatttttcttggcattttctcacttttatcttcgctctgtctcacagcacccaatcagcgattttcaaattggattgacaacgattattcctcgaatgttgcgacaagctggcaaaaaaatacggcataattgaaaactttttatgtgtaaacgaaataattaaaatagaattgatgaggaaacgaactaatataatgcgttctgttgtagctcttttggaggactgaatgctttgtcttcccgtttgtttcactatgccttggatcacaatttttagcgtattttgtttgttcctttagtcctttaattcaacttccaatttttgaacacaggataaattacacaaaaagacgaccaattaaaacagtattcattcgaaggggaaaacctcgtgaatacaactatgttttattctcctccgtatatttgaaaagctgttttacactctcttgtcacgttctgaccaagaaactcagtgaaatatgaaacaacttgcgtaaaaaggtcatctgattgtaaaatcaaatggttttaaaaaatgttctctatatggatcagccaattttctgcgaatgttttgaaaaccttactttttctctgtgtttgaacaaaccatgaaaacacaaaaggctatttggaaacgtttttaacgtcttggatcacaattccatttgaaggagttgagtgttttcctttctgacaacggatatgaaaatggtaattatcagaggccttcaaacaaacaaaagattttaaatgcagatgttttattttctctcgatattttcaactcctaaggtaaatttgctttgtaaaatgtttacagacgaaagcaaaacagaactgggtattgtcctttcttgcagttaattcgagaatagattcactgactttctttctatgtttatttatcagtatggatgctcgaataattatacaattttctttcgtgtcttcgtttacgtgtgtataacgatgcacaacacagaaggaaaacgatgttttgaaggtaaaccatgcatcaaagaacattnaaatttgcattaattcacaaaaggcgtattgcaaaaggtcctacattgcagccgcttattaaaat

SEQ ID NO: 286 - DNA, 4000 bp, Escherichia coli
  misc_feature (2)..(3): n is a, c, g, or t
  misc_feature (5)..(6): n is a, c, g, or t
  misc_feature (12)..(12): n is a, c, g, or t
  misc_feature (15)..(15): n is a, c, g, or t
  misc_feature (19)..(20): n is a, c, g, or t
  misc_feature (46)..(46): n is a, c, g, or t
  misc_feature (98)..(98): n is a, c, g, or t
  misc_feature (118)..(118): n is a, c, g, or t
  misc_feature (122)..(122): n is a, c, g, or t
  misc_feature (139)..(139): n is a, c, g, or t
  misc_feature (141)..(141): n is a, c, g, or t
  misc_feature (161)..(161): n is a, c, g, or t
  misc_feature (432)..(432): n is a, c, g, or t
  misc_feature (434)..(438): n is a, c, g, or t
  misc_feature (448)..(449): n is a, c, g, or t
  misc_feature (451)..(451): n is a, c, g, or t
  misc_feature (453)..(454): n is a, c, g, or t
  misc_feature (484)..(484): n is a, c, g, or t
  misc_feature (488)..(488): n is a, c, g, or t
  misc_feature (504)..(504): n is a, c, g, or t
  misc_feature (506)..(508): n is a, c, g, or t
  misc_feature (817)..(817): n is a, c, g, or t
  misc_feature (1051)..(1052): n is a, c, g, or t
  misc_feature (1076)..(1076): n is a, c, g, or t
  misc_feature (1079)..(1079): n is a, c, g, or t
  misc_feature (1114)..(1115): n is a, c, g, or t
  misc_feature (1119)..(1120): n is a, c, g, or t
  misc_feature (1127)..(1127): n is a, c, g, or t
  misc_feature (1141)..(1141): n is a, c, g, or t
  misc_feature (1151)..(1151): n is a, c, g, or t
  misc_feature (1158)..(1159): n is a, c, g, or t
  misc_feature (1163)..(1163): n is a, c, g, or t
  misc_feature (1172)..(1172): n is a, c, g, or t
  misc_feature (1188)..(1188): n is a, c, g, or t
  misc_feature (1231)..(1231): n is a, c, g, or t
  misc_feature (1445)..(1445): n is a, c, g, or t
  misc_feature (1449)..(1449): n is a, c, g, or t
  misc_feature (1482)..(1482): n is a, c, g, or t
  misc_feature (1497)..(1497): n is a, c, g, or t
  misc_feature (1986)..(1986): n is a, c, g, or t
  misc_feature (1991)..(1991): n is a, c, g, or t
  misc_feature (2639)..(2639): n is a, c, g, or t
  misc_feature (2780)..(2780): n is a, c, g, or t
  misc_feature (2784)..(2787): n is a, c, g, or t
  misc_feature (2790)..(2790): n is a, c, g, or t
  misc_feature (2792)..(2792): n is a, c, g, or t
  misc_feature (2796)..(2797): n is a, c, g, or t
  misc_feature (2800)..(2805): n is a, c, g, or t
  misc_feature (2819)..(2821): n is a, c, g, or t
  misc_feature (2825)..(2825): n is a, c, g, or t
  misc_feature (2827)..(2832): n is a, c, g, or t
  misc_feature (2834)..(2845): n is a, c, g, or t
  misc_feature (2847)..(2852): n is a, c, g, or t
  misc_feature (2854)..(2855): n is a, c, g, or t
  misc_feature (2857)..(2858): n is a, c, g, or t
  misc_feature (2860)..(2860): n is a, c, g, or t
  misc_feature (2862)..(2872): n is a, c, g, or t
  misc_feature (2874)..(2874): n is a, c, g, or t
  misc_feature (2876)..(2877): n is a, c, g, or t
  misc_feature (2879)..(2895): n is a, c, g, or t
  misc_feature (2897)..(2904): n is a, c, g, or t
  misc_feature (2906)..(2915): n is a, c, g, or t
  misc_feature (2917)..(2918): n is a, c, g, or t
  misc_feature (2921)..(2930): n is a, c, g, or t
  misc_feature (2932)..(2936): n is a, c, g, or t
  misc_feature (2938)..(2939): n is a, c, g, or t
  misc_feature (2941)..(2951): n is a, c, g, or t
  misc_feature (2953)..(2960): n is a, c, g, or t
  misc_feature (2962)..(2981): n is a, c, g, or t
  misc_feature (2983)..(2993): n is a, c, g, or t
  misc_feature (2995)..(2997): n is a, c, g, or t
  misc_feature (2999)..(3041): n is a, c, g, or t
  misc_feature (3043)..(3045): n is a, c, g, or t
  misc_feature (3047)..(3047): n is a, c, g, or t
  misc_feature (3049)..(3052): n is a, c, g, or t
  misc_feature (3054)..(3055): n is a, c, g, or t
  misc_feature (3057)..(3078): n is a, c, g, or t
  misc_feature (3080)..(3080): n is a, c, g, or t
  misc_feature (3082)..(3082): n is a, c, g, or t
  misc_feature (3084)..(3085): n is a, c, g, or t
  misc_feature (3087)..(3087): n is a, c, g, or t
  misc_feature (3089)..(3092): n is a, c, g, or t
  misc_feature (3094)..(3094): n is a, c, g, or t
  misc_feature (3096)..(3097): n is a, c, g, or t
  misc_feature (3109)..(3109): n is a, c, g, or t
  misc_feature (3111)..(3111): n is a, c, g, or t
  misc_feature (3113)..(3114): n is a, c, g, or t
  misc_feature (3117)..(3118): n is a, c, g, or t
  misc_feature (3121)..(3121): n is a, c, g, or t
  misc_feature (3126)..(3126): n is a, c, g, or t
  misc_feature (3132)..(3132): n is a, c, g, or t
  misc_feature (3134)..(3134): n is a, c, g, or t
  misc_feature (3136)..(3137): n is a, c, g, or t
  misc_feature (3139)..(3141): n is a, c, g, or t
  misc_feature (3145)..(3146): n is a, c, g, or t
  misc_feature (3148)..(3148): n is a, c, g, or t
  misc_feature (3151)..(3152): n is a, c, g, or t
  misc_feature (3155)..(3155): n is a, c, g, or t
  misc_feature (3157)..(3157): n is a, c, g, or t
  misc_feature (3160)..(3160): n is a, c, g, or t
  misc_feature (3165)..(3165): n is a, c, g, or t
  misc_feature (3179)..(3181): n is a, c, g, or t
  misc_feature (3184)..(3184): n is a, c, g, or t
  misc_feature (3198)..(3200): n is a, c, g, or t
  misc_feature (3202)..(3205): n is a, c, g, or t
  misc_feature (3207)..(3209): n is a, c, g, or t
  misc_feature (3211)..(3215): n is a, c, g, or t
  misc_feature (3219)..(3225): n is a, c, g, or t
  misc_feature (3227)..(3227): n is a, c, g, or t
  misc_feature (3229)..(3238): n is a, c, g, or t
  misc_feature (3240)..(3240): n is a, c, g, or t
  misc_feature (3242)..(3252): n is a, c, g, or t
  misc_feature (3254)..(3254): n is a, c, g, or t
  misc_feature (3256)..(3263): n is a, c, g, or t
  misc_feature (3265)..(3265): n is a, c, g, or t
  misc_feature (3267)..(3273): n is a, c, g, or t
  misc_feature (3275)..(3276): n is a, c, g, or t
  misc_feature (3278)..(3278): n is a, c, g, or t
  misc_feature (3280)..(3282): n is a, c, g, or t
  misc_feature (3284)..(3285): n is a, c, g, or t
  misc_feature (3287)..(3296): n is a, c, g, or t
  misc_feature (3298)..(3307): n is a, c, g, or t
  misc_feature (3309)..(3309): n is a, c, g, or t
  misc_feature (3311)..(3313): n is a, c, g, or t
  misc_feature (3493)..(4000): n is a, c, g, or t
tnncnntccggnggntgcnnctccaggatcgtgccgtcgacggagnggtccgacccgtcttgaaacacggaccaaggagtctgacatgggtgcgagtngtagggtggcaaaccctagngcgnagagaaatcgagatagncngagcctgttacagggcgcanggctggcagagcgttgttcttttgttcagtgcctagcaagagcacttatgtcgggacccgaaagatggtgaactatgcttgtgcagggtgaagtcaggagaaatcctgatggaagctcgaagcgatactgacgtgcaaatcgttcgtctgacatgagtataggggcgaaagactaatcgaaccatctagtagctggttccctccgaagtttcccccaggatagcaggaattcactgtgagttttatcaggtaaagcgaatgattaggggantnnnnnctgaaacagnntngnnccattctcaaactttaaatgggtaagaagngggngttgcttaattgaacntnnncgtcgaatcagggttcttagtgggccatttttggtaagcagaactggcgatgtgggatgctccagacgcgttggttaaggggccaaagtactcgctcattccgataccacaaagggtgttggttgatgaagacagcaggacggtggtcatggaagtcgaaatccgctaaggagtgtgtaacaactcacctgccgaatcaactagccccgaaaatggatggcgctcaagcgagtccccgaaaccgggccattggagcagatgcgacgctccaatgagtaggagggcgcgggggttgcggcgaaggcgctngcgcgagccacgcttagagcagcctctggtgcagatcttggtgttagtagcaaatattcaaatgaaaactttgaagaccgaagtggagaaaggtttcacgtgaacatcatttggacgtgagtgactcggtcctaaggtattccgtatgggattcagaaggcgcggcttgtcgcgccatcggccaaaagggcaatcggttaaaattccgatagtgcggacacggtgctgagcggnnacgcgttcgaaccaggtgacggtngcncgggccccgggaagagttctcttttctttttgacnnagcnncaggccntgaaataggattanccttagatanggcgggnngcgnggcagagcngctgaccctttcagcngtccggtgcgctcgggaagccccttgaaaagcctggggagtgnatgcactcggtcccagccgtactcataaccgcatcaggtctccaaggttaaaagcctctggtcaatagaacaatgtaggtaagggaagtcggcaaattggttccgtaagttcgcgaaatggaatggctcgtcagactggatggtagaggctcggtccatgaagcgtgctagccgacgggactggctagctggccctcgggctggcgggccgggnctgnccggcaggcgcgtggaggggctgagattgcgcngggccttcgggaccngtcgcgttctcgccataacaagcagtcaatgacgaactcgtagtgaccacaggaacccgactgtttaattaaaacaaagcattgtgacggtcgcaagtcgatgttgacacaatgtgatttctgcccagtgctctgaatgtcaaagtgatgtaattcaaccaagcgcgggtaaacggcgggagtaactatgactctcttaaggtagccaaatgcctcgtcatctaattagtgacgcgcatgaatggatcaacgaggttcctactgtccctatctactatctagcgaaaccacagccaagggaacgggcttgggagtaacggcggggaaagaagaccctgttgagcttgactctagtctgacattgtgaaatgacctgattggtgcagcataagtgggagcgcaagcaacagtgagataccactactttcagcgttgttttacttacatggttagcaaccgcggacactctgttgtccatttctagtattnaaggncttcgggccgaggttcgtcgtggacactgtcaggtggggagtttggctggggcggcacatctgttaaatgataacacaggtgacccaagatcagctcagagcgaacggaaatcgctcgtcgagtttaagggcaaaagctgatttgactttcattttcagtatgagtggaagcagtgaaagctcaggcctagcgatcctttaggtcctcggacattgaggctagaggtgtcagaaaagttaccacagggataactggcttgtggcggccaagcgttcatagcgacgtcgctttttgattcttcgatgtcggctcttcctacccctttctcgcacaagggaaaaaaggtaagattgttcacctactaacagggaacgtgagctgggtttagaccgtcgcgagacaggttagttttatcctactgttacacaatcacgccaatagtacgccccttcagtacgagaggaaccatgggcgcgcacgtccggtaaattgggttggtggaaacgccattgcccagaaactgccatgcgtcggataacggctgaacgcctctaagccggaaaccgtactagcacgcgtgatgttttgggtgttctcatcggttgaagttccgatagccttcgggccaggaccatacgcactttcgnggtgcgcacagcaacgctagatttgaactcccgtggatcatttgtagacgacttaaattccaaaccgggtattgtaatgtgtagagatgccttgttgcatcgatcgcatgagattcagcccgcgtttttcgattcggaaanaaannnnttntntttnnttnnnnnnttctttttttcttnnntttntnnnnnntnnnnnnnnnnnngnnnnnngnncnntngnnnnnnnnnnntngnngnnnnnnnnnnnnnnnnngnnnnnnnnannnnnnnnnntnnttnnnnnnnnnngnnnnntnntnnnnnnnnnnncnnnnnnnngnnnnnnnnnnnnnnnnnnnncnnnnnnnnnnnannngnnnnnnnnnnnnnnnnnnnnnnnnnnnnnnnnnnnnnnnnnnngnnnanannnnanntnnnnnnnnnnnnnnnnnnnnnnananannanannnngncnnaaatatacagcncncnngannaanaaaanaaaatnanannannntatnnanttnntantnctnttttnttcatctttttcannnatnagtactttttttgnnnannnnannngnnnnncggnnnnnnnangnnnnnnnnnncncnnnnnnnnnnnantnnnnnnnnangnnnnnnngnncncnnncnntnnnnnnnnnngnnnnnnnnnngnannntcgggtgctgtatgtcttttttgtttttttgaaggtctccttcgcttgaacccagaatataatctccatgtccgtaccttttagagtctcgattttcagcatgttgagcataccttctcggccttttggctaagatcaagtgtagtatctgttcttatcagcttaatctctggtacgtgnnnnnnnnnnnnnnnnnnnnnnnnnnnnnnnnnnnnnnnnnnnnnnnnnnnnnnnnnnnnnnnnnnnnnnnnnnnnnnnnnnnnnnnnnnnnnnnnnnnnnnnnnnnnnnnnnnnnnnnnnnnnnnnnnnnnnnnnnnnnnnnnnnnnnnnnnnnnnnnnnnnnnnnnnnnnnnnnnnnnnnnnnnnnnnnnnnnnnnnnnnnnnnnnnnnnnnnnnnnnnnnnnnnnnnnnnnnnnnnnnnnnnnnnnnnnnnnnnnnnnnnnnnnnnnnnnnnnnnnnnnnnnnnnnnnnnnnnnnnnnnnnnnnnnnnnnnnnnnnnnnnnnnnnnnnnnnnnnnnnnnnnnnnnnnnnnnnnnnnnnnnnnnnnnnnnnnnnnnnnnnnnnnnnnnnnnnnnnnnnnnnnnnnnnnnnnnnnnnnnnnnnnnnnnnnnnnnnnnnnnnnnnnnnnnnnnnnnnnnnnnnnnnnnnnnnnnnnnnnnnnnnnnnnnnnnnnnnnnnnnnnnnnnn

SEQ ID NO: 287 - DNA, 4000 bp, Escherichia coli
  misc_feature (1991)..(1992): n is a, c, g, or t
  misc_feature (2511)..(2511): n is a, c, g, or t
  misc_feature (2898)..(2898): n is a, c, g, or t
cagcagtcatggcttgatgctagaggtcgcctaagagagcatgcaaaggatcttacagcctgaaatgctggatggattgccagcggatcaccctgcagcagtggcgtctagaaaggacttgagaatcatcaatcggttgatgaatcacgtatcatttctcaatcggtcgacacgctggatccaggacaaagcaaagaaaagtccggttcggatcgtcgaactgggaagcggagatggtagcctcgcgtgcaggatgttattgagatggggtaaggtagctactggaagccgcattctttttgtggatcaatctccctgcttggaaaaaaatcatgcggagccactcgacagattgggatgggaagtcgacaaccaggtggtagacgtctttaagtggttcgaaaaagatgcttctgaaatcgatttatgttttgccagtctattcgtgcatcattttacatttgaggagatcagtcgcttatttgatcaactaaaagccaggacaaaagcgttcgtctgtcttgaacctcgacgagattggaaaggccttttagcggccaaggccctttggtgcatccgatgcgatcccgtcaccttaaatgatgcatgcatcagcgtacgcgctggattcctcaatcaagaactctcccagatttggatgcagaacaccgaaacatcatgggatatggaagagcgctcagccggtctgttcagtcaccttttttccgctaagaacctgtccgatagatcatcatgagtctcaggcccatcaccattgtcggcggagggatcagcggtttgtctttgggcattgatctccaactaaaaggctttgcagttcagctttttgaagccggcgattatccccgccatcgggtttgcggtgaatttctcagcggacaaggttatcgccaactcaaggaatgggggttggccaagtcattcctggcagccggtgccgtcgaagcaactcactttaaatgttatggcccagcgggcatgtctccagtcttacgtttgccatcgcctgccttgtgcctctctcgttattgcatggatgactgcatggcagaacatttcagagaactaggcggccatctcatcactcggtatcgcgttcatcctgctgattttgagcagaaggagggaacgatttgggcacacggccgactcgctcaaacacgtcaaaaatgcccctggattggttacaagtgtcacattaaggattacccattggcagctgatctggagatgcattttggcagaaatggctacgtgggtctttgccgcgtggaagatggaaaaatcaatgtatgcggactgacgcgcatggcagaacgggcctcagcgatgcccggaaaaggccgttggctgccatgggccttgtcatcccttcacccctcaaaacacaagaaccttcagaaagcacaatgccttgaggacagcctttgctacacggctggtctgcaatacaaagcgcggtggtttgaaaagacacgcacaaaagctgtcattggagaccataggacgctcatacctccgcttacgggcaatggcatgtccatggcggtggaatccgctcatctggccacctccttcatccaaaactattttgaggggggccttcagtgggatgaggtctgtcagcaaatgaaccgagccatgaacaaacgtttccgaaaacgcctcctggttgccggcgtgctacagagactgatcctagcacgccatggtgaggggatccgaaacaacctcattcaaaacatgagtgcgtttcaccgatatctgtatgcttggactcgctaagagcccgatgaaggatcccgagcaatgtattcaaaggaaaactagattaaaggctgaaagactgggaaatgatgcccatttctcaccaccaaccattcaaaatggttgccatccaatgggttattaacagatggtagaatgatacttttttgtatacatctagtttggtttatgtataaatagannggctattccttaatagtgattcatcaaaagtgggcttctgcagagggtgcagaggccctttttgatgtcgtgggagccttttttgatatgatttgaggctgacaggaggtttacccatttttttcgtgttgaagaaacgcagatcacgaaccctcagaaaggcaggagagactaccttcgagagtccccttgaaaccagggaagatctttctggatgaactcctgatcttcaaacgccgaatggccatcgacataggtgatcacactgccgggtttcgagccgctaccagaaccatgacgagcgtgctgtttgttaggaggattgatggtcgacccaatgggatgaggccccccagcattgtagacccgctcgtgatcccagtctggagcaataaaataagtggcacagccaaaaaagaaaatggaggtgggttcaggcacggtgctgaatttgggcatcttgatgcccgcgggacccgccatacgctcgttgataccataggaagcagtgaattcgancgtctttgcatccggcccacggccactcatgcgcatccgcaccttccttaggtcactgtggtcgtaaggtccctcatgttcggcagggtcttcaaaagatttgaggctctcaaaataacctgctgcgatcatggacttgatccagtcggtgtggtcggaagtggtggccttaggaaactgaccattgaagtcatccccatacatcatggttgccagcgcaatttgcttctgattgttcatgcagagaatcttgcgcgcagagaccttggctcctgccagggcgggaagcaataaggacgcaagaatggcaatgatggcaaccaccaccaacaattcaatcagggtaaaagcacgcagagacttcatgatttgcaacgggttatcganaatcgtgaagtttcacgccagaaaaatcaagcaggaagctaggaagcctcggctgcccgtgcgttcagctctggcttttcatccatgccaaccatcaggcgcgcatcctgggcaaaacactcccaaggcctccatcgacacccaggacttgccccgtcacccaggaggactcctccgatagaagccaggccatgctgtgagccacgtctgcgggagaacccagccggcctaaggcgtgcatgccttgggatgccttgcggttggcgtcgctggaaaggagagattctgtcaggggtgtctcgaccaatcccggtgccacacaattcacccggatacctcttgcagcataggtcgctgctgcggaaagggtcagtcccataatggctcccttggcagcggcaatagcctcgtggttggccatcccaatccttgaagctgccgaggccgtcaggacaatagaaccgccggtgcgcatcatcgcatgagcagcagctcccaaaataccaaaagcggtgcttacgtgggtgtgcatgacatcattccactcttcctgtgacgtcagatgagctggtttgagcaacaggctgccgatgcataccgcgactccatcaagaccatccatctcttccttagacctggcgatggttgaacgaaccgcctgccaatcatgcatatccaccacttgagtaccgtcgcatacttcggaagtcaccttctggagccgatcagcgtctctaccaaaaccacaaacgtgatgagcttgttgtttcagtttcataccaagggccgtaccgataccgccggtgattccaaagatcatgtatttacgctgtttcataggattttctaccccgccctcatcgaaatttgagccacttttcatgtgccatcatccaagaagctgtcaaccgtctcctttccattcgatgagctagacttaggttcaagaatgcaggcgatccaagttaatccaaggccaacgaacaacctactggtaaaaagaccgttgcatcatcgccactcggagttaagttgctctattctgtcatggatgaattctgcctcaaaaagatgtcttcgatgctttcagacctcgatcact

SEQ ID NO: 288 - DNA, 4000 bp, Escherichia coli
  misc_feature (1)..(2): n is a, c, g, or t
  misc_feature (5)..(7): n is a, c, g, or t
  misc_feature (10)..(10): n is a, c, g, or t
  misc_feature (12)..(18): n is a, c, g, or t
  misc_feature (20)..(21): n is a, c, g, or t
  misc_feature (23)..(23): n is a, c, g, or t
  misc_feature (25)..(26): n is a, c, g, or t
  misc_feature (29)..(37): n is a, c, g, or t
  misc_feature (39)..(39): n is a, c, g, or t
  misc_feature (41)..(58): n is a, c, g, or t
  misc_feature (61)..(64): n is a, c, g, or t
  misc_feature (66)..(66): n is a, c, g, or t
  misc_feature (68)..(68): n is a, c, g, or t
  misc_feature (70)..(70): n is a, c, g, or t
  misc_feature (72)..(82): n is a, c, g, or t
  misc_feature (85)..(85): n is a, c, g, or t
  misc_feature (87)..(88): n is a, c, g, or t
  misc_feature (92)..(107): n is a, c, g, or t
  misc_feature (111)..(140): n is a, c, g, or t
  misc_feature (144)..(144): n is a, c, g, or t
  misc_feature (146)..(157): n is a, c, g, or t
  misc_feature (159)..(160): n is a, c, g, or t
  misc_feature (162)..(163): n is a, c, g, or t
  misc_feature (165)..(165): n is a, c, g, or t
  misc_feature (167)..(167): n is a, c, g, or t
  misc_feature (170)..(174): n is a, c, g, or t
  misc_feature (177)..(189): n is a, c, g, or t
  misc_feature (191)..(191): n is a, c, g, or t
  misc_feature (193)..(193): n is a, c, g, or t
  misc_feature (195)..(195): n is a, c, g, or t
  misc_feature (197)..(197): n is a, c, g, or t
  misc_feature (199)..(211): n is a, c, g, or t
  misc_feature (213)..(213): n is a, c, g, or t
  misc_feature (221)..(221): n is a, c, g, or t
  misc_feature (223)..(227): n is a, c, g, or t
  misc_feature (229)..(229): n is a, c, g, or t
  misc_feature (231)..(236): n is a, c, g, or t
  misc_feature (238)..(238): n is a, c, g, or t
  misc_feature (240)..(248): n is a, c, g, or t
  misc_feature (250)..(250): n is a, c, g, or t
  misc_feature (252)..(253): n is a, c, g, or t
  misc_feature (255)..(262): n is a, c, g, or t
  misc_feature (268)..(268): n is a, c, g, or t
  misc_feature (270)..(271): n is a, c, g, or t
  misc_feature (273)..(284): n is a, c, g, or t
  misc_feature (290)..(290): n is a, c, g, or t
  misc_feature (292)..(297): n is a, c, g, or t
  misc_feature (300)..(300): n is a, c, g, or t
  misc_feature (302)..(306): n is a, c, g, or t
  misc_feature (308)..(310): n is a, c, g, or t
  misc_feature (312)..(312): n is a, c, g, or t
  misc_feature (314)..(322): n is a, c, g, or t
  misc_feature (324)..(331): n is a, c, g, or t
  misc_feature (333)..(333): n is a, c, g, or t
  misc_feature (335)..(338): n is a, c, g, or t
  misc_feature (340)..(340): n is a, c, g, or t
  misc_feature (342)..(349): n is a, c, g, or t
  misc_feature (351)..(354): n is a, c, g, or t
  misc_feature (356)..(356): n is a, c, g, or t
  misc_feature (359)..(359): n is a, c, g, or t
  misc_feature (362)..(362): n is a, c, g, or t
  misc_feature (364)..(367): n is a, c, g, or t
  misc_feature (372)..(373): n is a, c, g, or t
  misc_feature (376)..(377): n is a, c, g, or t
  misc_feature (379)..(379): n is a, c, g, or t
  misc_feature (381)..(382): n is a, c, g, or t
  misc_feature (384)..(384): n is a, c, g, or t
  misc_feature (386)..(397): n is a, c, g, or t
  misc_feature (399)..(399): n is a, c, g, or t
  misc_feature (401)..(401): n is a, c, g, or t
  misc_feature (403)..(403): n is a, c, g, or t
  misc_feature (405)..(407): n is a, c, g, or t
  misc_feature (411)..(411): n is a, c, g, or t
  misc_feature (413)..(413): n is a, c, g, or t
  misc_feature (415)..(415): n is a, c, g, or t
  misc_feature (417)..(417): n is a, c, g, or t
  misc_feature (419)..(421): n is a, c, g, or t
  misc_feature (423)..(423): n is a, c, g, or t
  misc_feature (425)..(429): n is a, c, g, or t
  misc_feature (432)..(434): n is a, c, g, or t
  misc_feature (439)..(441): n is a, c, g, or t
  misc_feature (444)..(444): n is a, c, g, or t
  misc_feature (446)..(447): n is a, c, g, or t
  misc_feature (449)..(451): n is a, c, g, or t
  misc_feature (453)..(453): n is a, c, g, or t
  misc_feature (455)..(455): n is a, c, g, or t
  misc_feature (457)..(459): n is a, c, g, or t
  misc_feature (461)..(464): n is a, c, g, or t
  misc_feature (466)..(466): n is a, c, g, or t
  misc_feature (468)..(469): n is a, c, g, or t
  misc_feature (471)..(475): n is a, c, g, or t
  misc_feature (477)..(477): n is a, c, g, or t
  misc_feature (479)..(481): n is a, c, g, or t
  misc_feature (492)..(495): n is a, c, g, or t
  misc_feature (497)..(498): n is a, c, g, or t
  misc_feature (503)..(505): n is a, c, g, or t
  misc_feature (507)..(513): n is a, c, g, or t
  misc_feature (515)..(516): n is a, c, g, or t
  misc_feature (520)..(521): n is a, c, g, or t
  misc_feature (525)..(525): n is a, c, g, or t
  misc_feature (527)..(528): n is a, c, g, or t
  misc_feature (530)..(541): n is a, c, g, or t
  misc_feature (543)..(543): n is a, c, g, or t
  misc_feature (546)..(552): n is a, c, g, or t
  misc_feature (554)..(554): n is a, c, g, or t
  misc_feature (556)..(565): n is a, c, g, or t
  misc_feature (567)..(571): n is a, c, g, or t
  misc_feature (573)..(573): n is a, c, g, or t
  misc_feature (575)..(575): n is a, c, g, or t
  misc_feature (577)..(577): n is a, c, g, or t
  misc_feature (579)..(582): n is a, c, g, or t
  misc_feature (586)..(590): n is a, c, g, or t
  misc_feature (592)..(594): n is a, c, g, or t
  misc_feature (596)..(601): n is a, c, g, or t
  misc_feature (605)..(605): n is a, c, g, or t
  misc_feature (607)..(610): n is a, c, g, or t
  misc_feature (612)..(623): n is a, c, g, or t
  misc_feature (625)..(625): n is a, c, g, or t
  misc_feature (627)..(631): n is a, c, g, or t
  misc_feature (633)..(633): n is a, c, g, or t
  misc_feature (635)..(638): n is a, c, g, or t
  misc_feature (640)..(640): n is a, c, g, or t
  misc_feature (642)..(647): n is a, c, g, or t
  misc_feature (650)..(652): n is a, c, g, or t
  misc_feature (654)..(654): n is a, c, g, or t
  misc_feature (656)..(662): n is a, c, g, or t
  misc_feature (664)..(664): n is a, c, g, or t
  misc_feature (666)..(667): n is a, c, g, or t
  misc_feature (669)..(669): n is a, c, g, or t
  misc_feature (671)..(671): n is a, c, g, or t
  misc_feature (673)..(679): n is a, c, g, or t
  misc_feature (682)..(684): n is a, c, g, or t
  misc_feature (686)..(686): n is a, c, g, or t
  misc_feature (688)..(688): n is a, c, g, or t
  misc_feature (690)..(690): n is a, c, g, or t
  misc_feature (692)..(692): n is a, c, g, or t
  misc_feature (694)..(707): n is a, c, g, or t
  misc_feature (709)..(709): n is a, c, g, or t
  misc_feature (712)..(713): n is a, c, g, or t
  misc_feature (715)..(721): n is a, c, g, or t
  misc_feature (723)..(729): n is a, c, g, or t
  misc_feature (734)..(734): n is a, c, g, or t
  misc_feature (736)..(736): n is a, c, g, or t
  misc_feature (739)..(744): n is a, c, g, or t
  misc_feature (746)..(748): n is a, c, g, or t
  misc_feature (750)..(750): n is a, c, g, or t
  misc_feature (753)..(757): n is a, c, g, or t
  misc_feature (759)..(759): n is a, c, g, or t
  misc_feature (761)..(761): n is a, c, g, or t
  misc_feature (763)..(764): n is a, c, g, or t
  misc_feature (766)..(766): n is a, c, g, or t
  misc_feature (768)..(776): n is a, c, g, or t
  misc_feature (779)..(795): n is a, c, g, or t
  misc_feature (799)..(808): n is a, c, g, or t
  misc_feature (810)..(818): n is a, c, g, or t
  misc_feature (820)..(828): n is a, c, g, or t
  misc_feature (833)..(835): n is a, c, g, or t
  misc_feature (841)..(841): n is a, c, g, or t
  misc_feature (844)..(844): n is a, c, g, or t
  misc_feature (846)..(847): n is a, c, g, or t
  misc_feature (849)..(852): n is a, c, g, or t
  misc_feature (854)..(858): n is a, c, g, or t
  misc_feature (862)..(868): n is a, c, g, or t
  misc_feature (870)..(870): n is a, c, g, or t
  misc_feature (873)..(873): n is a, c, g, or t
  misc_feature (875)..(877): n is a, c, g, or t
  misc_feature (879)..(879): n is a, c, g, or t
  misc_feature (881)..(881): n is a, c, g, or t
  misc_feature (883)..(885): n is a, c, g, or t
  misc_feature (887)..(887): n is a, c, g, or t
  misc_feature (889)..(892): n is a, c, g, or t
  misc_feature (897)..(898): n is a, c, g, or t
  misc_feature (909)..(909): n is a, c, g, or t
  misc_feature (911)..(911): n is a, c, g, or t
  misc_feature (913)..(916): n is a, c, g, or t
  misc_feature (920)..(921): n is a, c, g, or t
  misc_feature (923)..(925): n is a, c, g, or t
  misc_feature (927)..(927): n is a, c, g, or t
  misc_feature (929)..(946): n is a, c, g, or t
  misc_feature (948)..(958): n is a, c, g, or t
  misc_feature (960)..(964): n is a, c, g, or t
  misc_feature (966)..(973): n is a, c, g, or t
  misc_feature (975)..(980): n is a, c, g, or t
  misc_feature (982)..(983): n is a, c, g, or t
  misc_feature (985)..(987): n is a, c, g, or t
  misc_feature (989)..(998): n is a, c, g, or t
  misc_feature (1000)..(1000): n is a, c, g, or t
  misc_feature (1002)..(1005): n is a, c, g, or t
  misc_feature (1011)..(1017): n is a, c, g, or t
  misc_feature (1019)..(1019): n is a, c, g, or t
  misc_feature (1021)..(1028): n is a, c, g, or t
  misc_feature (1032)..(1032): n is a, c, g, or t
  misc_feature (1034)..(1039): n is a, c, g, or t
  misc_feature (1043)..(1048): n is a, c, g, or t
  misc_feature (1050)..(1053): n is a, c, g, or t
  misc_feature (1058)..(1060): n is a, c, g, or t
  misc_feature (1062)..(1065): n is a, c, g, or t
  misc_feature (1067)..(1067): n is a, c, g, or t
  misc_feature (1071)..(1073): n is a, c, g, or t
  misc_feature (1075)..(1075): n is a, c, g, or t
  misc_feature (1078)..(1084): n is a, c, g, or t
  misc_feature (1086)..(1086): n is a, c, g, or t
  misc_feature (1088)..(1094): n is a, c, g, or t
  misc_feature (1096)..(1097): n is a, c, g, or t
  misc_feature (1099)..(1099): n is a, c, g, or t
  misc_feature (1104)..(1106): n is a, c, g, or t
  misc_feature (1108)..(1109): n is a, c, g, or t
  misc_feature (1111)..(1116): n is a, c, g, or t
  misc_feature (1118)..(1118): n is a, c, g, or t
  misc_feature (1120)..(1126): n is a, c, g, or t
  misc_feature (1128)..(1137): n is a, c, g, or t
  misc_feature (1139)..(1141): n is a, c, g, or t
  misc_feature (1143)..(1147): n is a, c, g, or t
  misc_feature (1149)..(1149): n is a, c, g, or t
  misc_feature (1151)..(1156): n is a, c, g, or t
  misc_feature (1158)..(1158): n is a, c, g, or t
  misc_feature (1160)..(1162): n is a, c, g, or t
  misc_feature (1165)..(1166): n is a, c, g, or t
  misc_feature (1168)..(1168): n is a, c, g, or t
  misc_feature (1170)..(1170): n is a, c, g, or t
  misc_feature (1172)..(1172): n is a, c, g, or t
  misc_feature (1178)..(1178): n is a, c, g, or t
  misc_feature (1182)..(1188): n is a, c, g, or t
  misc_feature (1190)..(1192): n is a, c, g, or t
  misc_feature (1194)..(1203): n is a, c, g, or t
  misc_feature (1205)..(1210): n is a, c, g, or t
  misc_feature (1212)..(1212): n is a, c, g, or t
  misc_feature (1214)..(1219): n is a, c, g, or t
  misc_feature (1221)..(1221): n is a, c, g, or t
  misc_feature (1223)..(1223): n is a, c, g, or t
  misc_feature (1225)..(1225): n is a, c, g, or t
  misc_feature (1227)..(1227): n is a, c, g, or t
  misc_feature (1229)..(1231): n is a, c, g, or t
  misc_feature (1236)..(1241): n is a, c, g, or t
  misc_feature (1243)..(1243): n is a, c, g, or t
  misc_feature (1245)..(1245): n is a, c, g, or t
  misc_feature (1247)..(1247): n is a, c, g, or t
  misc_feature (1249)..(1249): n is a, c, g, or t
  misc_feature (1251)..(1251): n is a, c, g, or t
  misc_feature (1253)..(1255): n is a, c, g, or t
  misc_feature (1257)..(1265): n is a, c, g, or t
  misc_feature (1267)..(1271): n is a, c, g, or t
  misc_feature (1273)..(1273): n is a, c, g, or t
  misc_feature (1278)..(1278): n is a, c, g, or t
  misc_feature (1280)..(1285): n is a, c, g, or t
  misc_feature (1287)..(1287): n is a, c, g, or t
  misc_feature (1289)..(1290): n is a, c, g, or t
  misc_feature (1294)..(1302): n is a, c, g, or t
  misc_feature (1307)..(1318): n is a, c, g, or t
  misc_feature (1325)..(1327): n is a, c, g, or t
  misc_feature (1329)..(1339): n is a, c, g, or t
  misc_feature (1341)..(1341): n is a, c, g, or t
  misc_feature (1343)..(1352): n is a, c, g, or t
  misc_feature (1354)..(1359): n is a, c, g, or t
  misc_feature (1361)..(1364): n is a, c, g, or t
  misc_feature (1366)..(1367): n is a, c, g, or t
  misc_feature (1370)..(1372): n is a, c, g, or t
  misc_feature (1374)..(1376): n is a, c, g, or t
  misc_feature (1378)..(1384): n is a, c, g, or t
  misc_feature (1386)..(1388): n is a, c, g, or t
  misc_feature (1390)..(1390): n is a, c, g, or t
  misc_feature (1392)..(1394): n is a, c, g, or t
  misc_feature (1396)..(1398): n is a, c, g, or t
  misc_feature (1402)..(1402): n is a, c, g, or t
  misc_feature (1404)..(1407): n is a, c, g, or t
  misc_feature (1409)..(1414): n is a, c, g, or t
  misc_feature (1416)..(1417): n is a, c, g, or t
  misc_feature (1419)..(1426): n is a, c, g, or t
  misc_feature (1428)..(1429): n is a, c, g, or t
  misc_feature (1431)..(1436): n is a, c, g, or t
  misc_feature (1438)..(1441): n is a, c, g, or t
  misc_feature (1443)..(1449): n is a, c, g, or t
  misc_feature (1451)..(1454): n is a, c, g, or t
  misc_feature (1456)..(1462): n is a, c, g, or t
  misc_feature (1464)..(1465): n is a, c, g, or t
  misc_feature (1468)..(1471): n is a, c, g, or t
  misc_feature (1473)..(1475): n is a, c, g, or t
  misc_feature (1477)..(1483): n is a, c, g, or t
  misc_feature (1485)..(1486): n is a, c, g, or t
  misc_feature (1489)..(1501): n is a, c, g, or t
  misc_feature (1503)..(1508): n is a, c, g, or t
  misc_feature (1510)..(1513): n is a, c, g, or t
  misc_feature (1515)..(1520): n is a, c, g, or t
  misc_feature (1522)..(1535): n is a, c, g, or t
  misc_feature (1537)..(1538): n is a, c, g, or t
  misc_feature (1540)..(1548): n is a, c, g, or t
  misc_feature (1550)..(1550): n is a, c, g, or t
  misc_feature (1552)..(1558): n is a, c, g, or t
  misc_feature (1560)..(1560): n is a, c, g, or t
  misc_feature (1562)..(1567): n is a, c, g, or t
  misc_feature (1569)..(1575): n is a, c, g, or t
  misc_feature (1577)..(1579): n is a, c, g, or t
  misc_feature (1581)..(1583): n is a, c, g, or t
  misc_feature (1585)..(1590): n is a, c, g, or t
  misc_feature (1592)..(1594): n is a, c, g, or t
  misc_feature (1596)..(1596): n is a, c, g, or t
  misc_feature (1598)..(1602): n is a, c, g, or t
  misc_feature (1604)..(1611): n is a, c, g, or t
  misc_feature (1613)..(1618): n is a, c, g, or t
  misc_feature (1620)..(1621): n is a, c, g, or t
  misc_feature (1623)..(1655): n is a, c, g, or t
  misc_feature (1657)..(1658): n is a, c, g, or t
  misc_feature (1660)..(1671): n is a, c, g, or t
  misc_feature (1673)..(1677): n is a, c, g, or t
  misc_feature (1679)..(1681): n is a, c, g, or t
  misc_feature (1683)..(1695): n is a, c, g, or t
  misc_feature (1697)..(1698): n is a, c, g, or t
  misc_feature (1700)..(1704): n is a, c, g, or t
  misc_feature (1707)..(1707): n is a, c, g, or t
  misc_feature (1709)..(1711): n is a, c, g, or t
  misc_feature (1713)..(1718): n is a, c, g, or t
  misc_feature (1720)..(1723): n is a, c, g, or t
  misc_feature (1725)..(1728): n is a, c, g, or t
  misc_feature (1730)..(1732): n is a, c, g, or t
  misc_feature (1734)..(1735): n is a, c, g, or t
  misc_feature (1737)..(1737): n is a, c, g, or t
  misc_feature (1739)..(1750): n is a, c, g, or t
  misc_feature (1752)..(1753): n is a, c, g, or t
  misc_feature (1755)..(1755): n is a, c, g, or t
  misc_feature (1757)..(1765): n is a, c, g, or t
  misc_feature (1767)..(1775): n is a, c, g, or t
  misc_feature (1777)..(1779): n is a, c, g, or t
  misc_feature (1782)..(1782): n is a, c, g, or t
  misc_feature (1784)..(1791): n is a, c, g, or t
  misc_feature (1793)..(1798): n is a, c, g, or t
  misc_feature (1800)..(1801): n is a, c, g, or t
  misc_feature (1803)..(1803): n is a, c, g, or t
  misc_feature (1805)..(1813): n is a, c, g, or t
  misc_feature (1815)..(1815): n is a, c, g, or t
  misc_feature (1817)..(1822): n is a, c, g, or t
  misc_feature (1824)..(1833): n is a, c, g, or t
  misc_feature (1835)..(1837): n is a, c, g, or t
  misc_feature (1839)..(1842): n is a, c, g, or t
  misc_feature (1844)..(1850): n is a, c, g, or t
  misc_feature (1852)..(1852): n is a, c, g, or t
  misc_feature (1954)..(1954): n is a, c, g, or t
  misc_feature (1961)..(1961): n is a, c, g, or t
  misc_feature (1965)..(1965): n is a, c, g, or t
  misc_feature (1977)..(1977): n is a, c, g, or t
  misc_feature (3374)..(3375): n is a, c, g, or t
  misc_feature (3386)..(3386): n is a, c, g, or t
  misc_feature (3392)..(3392): n is a, c, g, or t
  misc_feature (3395)..(3400): n is a, c, g, or t
  misc_feature (3405)..(3405): n is a, c, g, or t
  misc_feature (3409)..(3409): n is a, c, g, or t
  misc_feature (3413)..(3413): n is a, c, g, or t
  misc_feature (3415)..(3415): n is a, c, g, or t
  misc_feature (3417)..(3417): n is a, c, g, or t
  misc_feature (3419)..(3420): n is a, c, g, or t
  misc_feature (3422)..(3422): n is a, c, g, or t
  misc_feature (3424)..(3424): n is a, c, g, or t
  misc_feature (3428)..(3429): n is a, c, g, or t
  misc_feature (3433)..(3433): n is a, c, g, or t
  misc_feature (3435)..(3437): n is a, c, g, or t
  misc_feature (3439)..(3439): n is a, c, g, or t
  misc_feature (3445)..(3445): n is a, c, g, or t
  misc_feature (3450)..(3450): n is a, c, g, or t
  misc_feature (3452)..(3457): n is a, c, g, or t
  misc_feature (3460)..(3460): n is a, c, g, or t
  misc_feature (3463)..(3465): n is a, c, g, or t
  misc_feature (3470)..(3471): n is a, c, g, or t
  misc_feature (3473)..(3474): n is a, c, g, or t
  misc_feature (3477)..(3477): n is a, c, g, or t
  misc_feature (3480)..(3481): n is a, c, g, or t
  misc_feature (3484)..(3488): n is a, c, g, or t
  misc_feature (3491)..(3492): n is a, c, g, or t
  misc_feature (3497)..(3498): n is a, c, g, or t
  misc_feature (3500)..(3503): n is a, c, g, or t
  misc_feature (3507)..(3510): n is a, c, g, or t
  misc_feature (3514)..(3515): n is a, c, g, or t
  misc_feature (3520)..(3520): n is a, c, g, or t
  misc_feature (3525)..(3525): n is a, c, g, or t
  misc_feature (3528)..(3531): n is a, c, g, or t
  misc_feature (3533)..(3536): n is a, c, g, or t
  misc_feature (3541)..(3541): n is a, c, g, or t
  misc_feature (3544)..(3550): n is a, c, g, or t
  misc_feature (3552)..(3552): n is a, c, g, or t
  misc_feature (3555)..(3555): n is a, c, g, or t
  misc_feature (3558)..(3558): n is a, c, g, or t
  misc_feature (3563)..(3568): n is a, c, g, or t
  misc_feature (3570)..(3574): n is a, c, g, or t
  misc_feature (3576)..(3576): n is a, c, g, or t
  misc_feature (3578)..(3578): n is a, c, g, or t
  misc_feature (3581)..(3581): n is a, c, g, or t
  misc_feature (3584)..(3585): n is a, c, g, or t
  misc_feature (3591)..(3591): n is a, c, g, or t
  misc_feature (3593)..(3594): n is a, c, g, or t
  misc_feature (3598)..(3599): n is a, c, g, or t
  misc_feature (3602)..(3602): n is a, c, g, or t
  misc_feature (3604)..(3606): n is a, c, g, or t
  misc_feature (3608)..(3608): n is a, c, g, or t
  misc_feature (3611)..(3611): n is a, c, g, or t
  misc_feature (3615)..(3615): n is a, c, g, or t
  misc_feature (3617)..(3617): n is a, c, g, or t
  misc_feature (3621)..(3622): n is a, c, g, or t
  misc_feature (3624)..(3624): n is a, c, g, or t
  misc_feature (3627)..(3627): n is a, c, g, or t
  misc_feature (3630)..(3630): n is a, c, g, or t
  misc_feature (3632)..(3632): n is a, c, g, or t
  misc_feature (3636)..(3636): n is a, c, g, or t
  misc_feature (3641)..(3642): n is a, c, g, or t
  misc_feature (3646)..(3646): n is a, c, g, or t
  misc_feature (3648)..(3651): n is a, c, g, or t
  misc_feature (3653)..(3654): n is a, c, g, or t
  misc_feature (3656)..(3659): n is a, c, g, or t
  misc_feature (3661)..(3661): n is a, c, g, or t
  misc_feature (3664)..(3664): n is a, c, g, or t
  misc_feature (3669)..(3669): n is a, c, g, or t
  misc_feature (3676)..(3679): n is a, c, g, or t
  misc_feature (3681)..(3681): n is a, c, g, or t
  misc_feature (3683)..(3683): n is a, c, g, or t
  misc_feature (3685)..(3687): n is a, c, g, or t
  misc_feature (3690)..(3692): n is a, c, g, or t
  misc_feature (3694)..(3694): n is a, c, g, or t
  misc_feature (3697)..(3697): n is a, c, g, or t
  misc_feature (3702)..(3704): n is a, c, g, or t
  misc_feature (3710)..(3710): n is a, c, g, or t
  misc_feature (3715)..(3716): n is a, c, g, or t
  misc_feature (3719)..(3719): n is a, c, g, or t
  misc_feature (3722)..(3723): n is a, c, g, or t
  misc_feature (3725)..(3725): n is a, c, g, or t
  misc_feature (3727)..(3728): n is a, c, g, or t
  misc_feature (3732)..(3732): n is a, c, g, or t
  misc_feature (3738)..(3741): n is a, c, g, or t
  misc_feature (3747)..(3751): n is a, c, g, or t
  misc_feature (3753)..(3754): n is a, c, g, or t
  misc_feature (3757)..(3757): n is a, c, g, or t
  misc_feature (3760)..(3761): n is a, c, g, or t
  misc_feature (3764)..(3764): n is a, c, g, or t
  misc_feature (3767)..(3767): n is a, c, g, or t
  misc_feature (3772)..(3777): n is a, c, g, or t
  misc_feature (3779)..(3781): n is a, c, g, or t
  misc_feature (3786)..(3786): n is a, c, g, or t
  misc_feature (3788)..(3794): n is a, c, g, or t
  misc_feature (3796)..(3797): n is a, c, g, or t
  misc_feature (3800)..(3800): n is a, c, g, or t
  misc_feature (3802)..(3802): n is a, c, g, or t
  misc_feature (3805)..(3808): n is a, c, g, or t
  misc_feature (3810)..(3810): n is a, c, g, or t
  misc_feature (3815)..(3815): n is a, c, g, or t
  misc_feature (3818)..(3818): n is a, c, g, or t
  misc_feature (3820)..(3821): n is a, c, g, or t
  misc_feature (3823)..(3823): n is a, c, g, or t
  misc_feature (3826)..(3826): n is a, c, g, or t
  misc_feature (3828)..(3828): n is a, c, g, or t
  misc_feature (3830)..(3831): n is a, c, g, or t
  misc_feature (3836)..(3836): n is a, c, g, or t
  misc_feature (3838)..(3844): n is a, c, g, or t
  misc_feature (3846)..(3847): n is a, c, g, or t
  misc_feature (3850)..(3851): n is a, c, g, or t
  misc_feature (3853)..(3855): n is a, c, g, or t
  misc_feature (3858)..(3858): n is a, c, g, or t
  misc_feature (3860)..(3860): n is a, c, g, or t
  misc_feature (3864)..(3864): n is a, c, g, or t
  misc_feature (3869)..(3870): n is a, c, g, or t
  misc_feature (3872)..(3874): n is a, c, g, or t
  misc_feature (3876)..(3876): n is a, c, g, or t
  misc_feature (3879)..(3879): n is a, c, g, or t
  misc_feature (3887)..(3888): n is a, c, g, or t
  misc_feature (3890)..(3891): n is a, c, g, or t
  misc_feature (3897)..(3897): n is a, c, g, or t
  misc_feature (3900)..(3900): n is a, c, g, or t
  misc_feature (3902)..(3904): n is a, c, g, or t
  misc_feature (3906)..(3907): n is a, c, g, or t
  misc_feature (3912)..(3914): n is a, c, g, or t
  misc_feature (3916)..(3916): n is a, c, g, or t
  misc_feature (3919)..(3920): n is a, c, g, or t
  misc_feature (3922)..(3922): n is a, c, g, or t
  misc_feature (3925)..(3928): n is a, c, g, or t
  misc_feature (3931)..(3931): n is a, c, g, or t
  misc_feature (3933)..(3933): n is a, c, g, or t
  misc_feature (3936)..(3937): n is a, c, g, or t
  misc_feature (3939)..(3939): n is a, c, g, or t
  misc_feature (3942)..(3942): n is a, c, g, or t
  misc_feature (3944)..(3945): n is a, c, g, or t
  misc_feature (3947)..(3957): n is a, c, g, or t
  misc_feature (3960)..(3962): n is a, c, g, or t
  misc_feature (3965)..(3965): n is a, c, g, or t
  misc_feature (3968)..(3972): n is a, c, g, or t
  misc_feature (3977)..(3977): n is a, c, g, or t
  misc_feature (3980)..(3980): n is a, c, g, or t
  misc_feature (3988)..(3988): n is a, c, g, or t
  misc_feature (3992)..(3992): n is a, c, g, or t
  misc_feature (3994)..(3997): n is a, c, g, or t
  misc_feature (3999)..(4000): n is a, c, g, or t
nnggnnnaanannnnnnncnnanannggnnnnnnnnncncnnnnnnnnnnnnnnnnnnggnnnngngnanannnnnnnnnnnggngnncccnnnnnnnnnnnnnnnngggnnnnnnnnnnnnnnnnnnnnnnnnnnnnnngggngnnnnnnnnnnnngnnanngngnggnnnnnggnnnnnnnnnnnnntntntnanannnnnnnnnnnnnanaagagggntnnnnngngnnnnnngngnnnnnnnnngngnngnnnnnnnngggggngnngnnnnnnnnnnnnggggangnnnnnnggngnnnnntnnncncnnnnnnnnnannnnnnnngngnnnncnannnnnnnncnnnncnccnccntnnnnggggnnggnngngnngngnnnnnnnnnnnncncngngnnngggntntncncnnngngnnnnnggnnnggggnnnccntnncnnncntntnnngnnnngngnngnnnnngngnnnggggggggggnnnntnnccccnnngnnnnnnntnncccnngggntnncnnnnnnnnnnnngnggnnnnnnnanannnnnnnnnngnnnnngnangncnnnncccnnnnngnnncnnnnnngggngnnnngnnnnnnnnnnnngngnnnnncncnnnngngnnnnnngcnnncncnnnnnnngngnngnanannnnnnnggnnntntngnanannnnnnnnnnnnnngnggnntnnnnnnngnnnnnnnccccngnggnnnnnnannngnggnnnnncncntnngngnnnnnnnnnccnnnnnnnnnnnnnnnnncccnnnnnnnnnngnnnnnnnnngnnnnnnnnnccccnnngggggnggngnngnnnnannnnncccnnnnnnncnccncnnngntntnnnanannnnccccnnggggggggggncncnnnngggnntnnncncnnnnnnnnnnnnnnnnnngnnnnnnnnnnncnnnnngnnnnnnnncnnnnnnanngnnncnnnnnnnnnncncnnnngggggnnnnnnncncnnnnnnnncccncnnnnnngggnnnnnngnnnnggggnnncnnnntncccnnngnggnnnnnnngngnnnnnnngnntnttttnnncnntnnnnnntngnnnnnnngnnnnnnnnnnannngnnnnngnannnnnncncnnnggnngncncngggggntttnnnnnnntnnngnnnnnnnnnngnnnnnngngnnnnnntnantncntnnnaaaannnnnnantntncncngnnnannnnnnnnnannnnncnccccncnnnnnncncnncccnnnnnnnnnggggnnnnnnnnnnnnggggggnnngnnnnnnnnnnnangnnnnnnnnnngnnnnnngnnnntnnccnnngnnngnnnnnnncnnncnannngnnntttncnnnncnnnnnngnngnnnnnnnngnngnnnnnngnnnncnnnnnnncnnnntnnnnnnncnnggnnnngnnngnnnnnnncnnggnnnnnnnnnnnnngnnnnnntnnnngnnnnnngnnnnnnnnnnnnnngnngnnnnnnnnntngnnnnnnncntnnnnnngnnnnnnntnnngnnntnnnnnnannngntnnnnngnnnnnnnncnnnnnngnngnnnnnnnnnnnnnnnnnnnnnnnnnnnnnnnnngnntnnnnnnnnnnnntnnnnnannngnnnnnnnnnnnnnannannnnnggncnnngnnnnnncnnnngnnnncnnngnngntnnnnnnnnnnnncnngnannnnnnnnngnnnnnnnnnannnccntnnnnnnnngnnnnnncnngntnnnnnnnnngncnnnnnntnnnnnnnnnntnnntnnnntnnnnnnntnaagtgttaatgattacactgcaaaggtaggggagttaatgaatctatacaaatgaatttctctatatcgatataagcatcatttatactttgcctctacctncttcatncggngcacaaacgaancccgcccctacgactgtccaagtgaggacgtgccgtaggggcggggtgtagtctatggggagtagtcccttaggcttcagcaggtgcttcttcttcagcgggagcttcagcaggagcaggagcttcttccttcttttcttcagccttaggagcgtcggagaggacttcgacggggatttctacagccacttccttgtgcaggcgcacgatagcggtgtagttaccgatttccttgatagccttgatgtagacgagcttgcggtcggtttcgaggccgagcttcgtgagctcttcagcgatctcagcacccgtgacggagccgtagaggctacccgtagcgacgttggtgtgagccgtgatagagaggcgtacgccctggtacttctgggcacgctcttcggcttccttcttgatagcggcgatcttgtgagcgcgctgacggaggttctctgcgaggatcttcttcgcagcttccgtagcgatgatagccttaccggtggggattagaaagttgcgaccgtagccgttctttactgtgacgacatcgtccttgtagccgagaccgactacgtcttctttcaaaataacttccattgtattctgtctcctctatgtttattcgttactaagtggatgagtaaggggggatagaccttacttagccatgttgtccgtgacgtagggcagcagggcaaggtgacgagcacgcttgacagcctgtgcgacgcgacgctggaacttgaggctcgtgccggtgatacggcgggggaggatcttaccctgttcgttgaggaaacgcttgaggaagtcgggatccttgtagtcgatatacttgataccgctcttcttgaagcggcagtacttcttcttcttgctatctacggtcaggggagtgaggtagcgtacttctgatgcagccattttaattttctcctttcgttaatgggttatgccttacggcttcttctctttgctgcgtattcagctgcgaacttatcctggcggaaggtcaggaagcggaggacattctcatcgcgacggaactgcgtctcgagtacggcgatggtctctggctgagcctggaattcaacgagctggtagtaaccagtcgtcttcttctggatctgataggcgagcttcttcagcccccagttttcttcgttgacgatctcagcgccttcgcccttgaggatgccgacgaactttgcgaccgcttcctttacctgagcttcagataaatcgggagtaagaatgaaaacggtttcgtagttattcatttctctttctgtttagtgagagttaaaaatatcgggcacaaaggtacataaatatatcgttttgaccaagctatgcacctgcgaggtggtgcaaagtgccacacgcgcgtaccattattnnataggtatgtntggggngannnnnngcctngggngggngngngnnantngccnnggangnnntngcgganggccncnnnnnnggnctnnnccccnncnnggnggnngtnnnnnccnncggtnntnnnnccgnnnnggtnngcctnggggnggnnnntnnnncggangcnnnnnnncncgnccnccatnnnnnncnnnnngntncgnccnncggggngnncctnnccngnnngnccnaccncncccnngnggnagncncctncgggnngggngnnnncnngnnnngnggngaggncggcggnnnngncngnnnggnnngnggnggggnnngccagncggannccnccnncnannttgnggaagnnnnccttcnnnnngnnctngannccngcncgctnnnnnngnnnggccngnnnnnnntnnatncntcnnnngncgaanccngnncnggngngnnggggngnnnnnnngnnggnngnnntgncnagcncctgnntnnngntgnggaagggnngnncgcccnccntnnntnnggcgnnngnggnncngcnnnnctngnggnngntcngnntnnnnnnnnnnnccnnnggnttnnnnncgggncgnaggcccgnctgncnnnncnn

SEQ ID NO: 289 - DNA, 4000 bp, Escherichia coli
  misc_feature (100)..(100): n is a, c, g, or t
  misc_feature (158)..(158): n is a, c, g, or t
  misc_feature (238)..(238): n is a, c, g, or t
  misc_feature (562)..(562): n is a, c, g, or t
  misc_feature (566)..(566): n is a, c, g, or t
  misc_feature (673)..(673): n is a, c, g, or t
  misc_feature (788)..(788): n is a, c, g, or t
  misc_feature (816)..(816): n is a, c, g, or t
  misc_feature (871)..(871): n is a, c, g, or t
  misc_feature (1291)..(1291): n is a, c, g, or t
  misc_feature (1513)..(1513): n is a, c, g, or t
  misc_feature (1591)..(1591): n is a, c, g, or t
  misc_feature (2472)..(2472): n is a, c, g, or t
  misc_feature (2811)..(2811): n is a, c, g, or t
  misc_feature (2830)..(2830): n is a, c, g, or t
  misc_feature (2870)..(2870): n is a, c, g, or t
  misc_feature (2895)..(2895): n is a, c, g, or t
  misc_feature (3237)..(3237): n is a, c, g, or t
  misc_feature (3497)..(3497): n is a, c, g, or t
  misc_feature (3694)..(3695): n is a, c, g, or t
  misc_feature (3773)..(3773): n is a, c, g, or t
  misc_feature (3848)..(3848): n is a, c, g, or t
  misc_feature (3869)..(3869): n is a, c, g, or t
  misc_feature (3874)..(3875): n is a, c, g, or t
  misc_feature (3878)..(3878): n is a, c, g, or t
  misc_feature (3890)..(3890): n is a, c, g, or t
  misc_feature (3950)..(3950): n is a, c, g, or t
  misc_feature (3973)..(3973): n is a, c, g, or t
agagccataagcctcttgttgtatttgtagatgaaaataataagataagtcatataaaaaactatgaaaaacatggtttattagttgatcaagactaacngtttttgatcgaattacagtagactgtataggactatcttcgtatttacaatttatangtaccggaggcattattatggaaattataactacaatcgaaaatatacgcagcatagtaaaccattggaaagataaaggntattctattggttttgtaccaacaatgggatatttacatgatggtcatgccgcattgatagatcaagctagaaaggataatgataaggtcattgtatctatatttgttaatccaactcagtttggtgaaaacgaagacctaaattcttatccacgtgatattaatagagataaatccctttgtgaagcccataaggcggatattatattttctccaacgtcagatgaaatgtatcatgatagaaaagcatttgtaaatattgttgagttatctgatacattgtgtggtattagtagacctattcacttcaaaggtgtttgtacngttntaacgaagctatttaatattattcaacctaccaatgcctactttggtgaaaaagatgcacaacaactagccattattcgtaaaatggtttatgatctaaattttccngtcaatataattggagtgccaatcgttcgtgaatcggatggtctagcaaaatcttctcgaaatacatatttatctaaggaagaacgaaaagcggctaccatattatataaagctnttcaaatgggaaaacaaaccattaaacntggtgcttctgctgatagtatcattaatactatgacagaaattattaatactgancccttagccaagatagattatgtttcagttgttgatgctaatacaatgcaaccagttcatgagattacatctccagtattagtcgctatggctgtatatattggatctacgcgacttatcgataacttttccttcgatgcaaattagaagggagaaactatgaactatttacaaacactgactcagttaatttctaaatacttaatggttctaatcatcggtttttcatgtatggcctatatagttccttcatattttacatgggctgttgcttatacaccatttttacttggtatcgctatgttcggcatgggccttacaattaagtttgaaaacctatgtaatatttttaggcatccaaaagatatttgtattggagtgcttgcacaatacacaatcatgcctttattagcatggggnatttgccatatatttaccttaccaccagatattgcaataggcgttatattagttggttgctgtcctggtggcacggctagtaacgttataacctacatcgctaaaggtgatgtaccactatcagtaggaatgacaattacatcgacattaatagcacccattgtaacaccattattaatcttatatattggtggcgcttgggtagatgttgcattgctaccnatgatgattacaatggtgaaagtcattattataccaatcttattaggtggtgtcattcaatatgtttgtaaatcacanattaatacacttaccagtataagtcctatattttcaatgattgctattatattattaatagcagctattattgcagttaatagggataaactattggtttctggcttattaactcttattattgttggtatacataatgtattaggattactattagggttaattgtaggaaaaactcttaaattaaaatacgataaaactactgcattagcaatagaagtaggtatgcaaaatagtgggttagccgtaacgctagcagcaactaattttgctttaaaccctctcgcaactctagtaggagctatttttagtgtatggcataatatatctggcgcaattttcgctagtatacgtagaaataaaatctcaatataacaaaaagacggcaacatatgttgccgtctttttgttatattctatcacgtactaatccaattacaagtccttcaatatgacaatcatcaacaataataggatcaaaattatcattttcaggctgtaaacgaatatgaccattttccttatagaaacgttttacagtcgcttcatcatcaatgcgagctaccacaatatcgccattattggctgtattttgatgacgtacaattaacatatcgccttcatacataccaatattcatcatcgattccccttgaacacgaagcataaagcaatcagaatcacctgtaagctgaacaggtaaggtcaatgtagcctctaaattttcaacagctgtaattggtgtgcctgcttgtactgtaccgataaggggaacttgttttaatccagcaccaaggaattcaaaattatcagagctagtagtttcattgttctctttagatacagaaaccttcggttttccttcatctaaaatcgtaatngcacggtttttattaggatcgcgtttaatatacccaaatttttctaatgtatttaaatgtgattgaacagtggacgtagaactaagacctacataagcacaaatttcacgaacagtagggcaacgatattcattatgtaaagaatctcgaataaactctaatatacgacgttgttttgtattaatatcagtagctgggcgtctcacaggaacctccatatatgtactaaaaatgggatatgtaaaagtgtatactataattattttctttatatccttattatataggtatttttacacttttgcaaacatttgttcttaaaatgcttgaccgaacatncgtttgtgtgctattatcntattgtaaacaaacaaacgttctgaattttatgttcgatntataaaagaggtaatgtattatganacacattatgattatgcttggtatctgttttgcaatggttatcggttatcaacaaacaactcctgctatggaatcacatagtgttcaagagattactgtaaaatctggagataccttatgggatattgcatcacgttcaactgcatctaatgtggatgttcgtgaggtagtacatacagtaaaggaattaaataatatttctgattctggtaatttaacaccagggaccaaaataaaggtgcctgtatataaaactgatagtccaacaagagctatggactatatggctcaaaattaaatatatatgaaatggctagtatagatgttcttcaatgagaaaancatctatactagccattttcattatataatattattttaatcgtttttcaaaaattgttgagataggattatcgacgaatttatttgcctcattaatataacggcgtaccatatttacactgtgatgtcgcgtctgacgcatgatattacgttcctcgacgccataagcggctgcagtcgtagcaaagccatgccttaaactatgagcaccatacatggcaggatcgagtccgataagtgatatatatttttttacgatntctgcaatggacttatcagaaattgccgtttttcgtaatgacattgatttagtaaagccccgaaatacaggtccagatgtaatgccactggcagttaaccatttttttaaagctcgtacggcatccaatggagaaccttgtagacttggaatcgctacaatggcaccttgaccttcttggtcagctttagatgaagnnacaaatatctcaaggccttgtggagaaaactttaagttctctacagttaaggctgcaatttcactgcgtctaaaagcncccataaatccaatgagtaaaattgctttatctcgtaatttctgtatctttggaatatcactaccatcgatacantctaaaatatcttcaatatcntctannaanataggtgtcttnccttgttgaaaggttccttttagacgacgtatccctcgcaaagcttgttttacaagaggngacatacatggattttctctagncccagaagcattgtagttttctgatat

SEQ ID NO: 290 - DNA, 4000 bp, Escherichia coli
  misc_feature (1)..(4): n is a, c, g, or t
  misc_feature (6)..(12): n is a, c, g, or t
  misc_feature (14)..(15): n is a, c, g, or t
  misc_feature (17)..(17): n is a, c, g, or t
  misc_feature (19)..(33): n is a, c, g, or t
  misc_feature (36)..(40): n is a, c, g, or t
  misc_feature (42)..(44): n is a, c, g, or t
  misc_feature (46)..(56): n is a, c, g, or t
  misc_feature (62)..(63): n is a, c, g, or t
  misc_feature (65)..(66): n is a, c, g, or t
  misc_feature (68)..(68): n is a, c, g, or t
  misc_feature (70)..(70): n is a, c, g, or t
  misc_feature (74)..(78): n is a, c, g, or t
  misc_feature (80)..(82): n is a, c, g, or t
  misc_feature (85)..(90): n is a, c, g, or t
  misc_feature (92)..(93): n is a, c, g, or t
  misc_feature (95)..(96): n is a, c, g, or t
  misc_feature (98)..(98): n is a, c, g, or t
  misc_feature (100)..(101): n is a, c, g, or t
  misc_feature (103)..(104): n is a, c, g, or t
  misc_feature (106)..(106): n is a, c, g, or t
  misc_feature (108)..(109): n is a, c, g, or t
  misc_feature (111)..(111): n is a, c, g, or t
  misc_feature (113)..(113): n is a, c, g, or t
  misc_feature (115)..(115): n is a, c, g, or t
  misc_feature (119)..(123): n is a, c, g, or t
  misc_feature (125)..(126): n is a, c, g, or t
  misc_feature (128)..(129): n is a, c, g, or t
  misc_feature (132)..(134): n is a, c, g, or t
  misc_feature (136)..(137): n is a, c, g, or t
  misc_feature (139)..(145): n is a, c, g, or t
  misc_feature (149)..(149): n is a, c, g, or t
  misc_feature (155)..(158): n is a, c, g, or t
  misc_feature (160)..(166): n is a, c, g, or t
  misc_feature (169)..(174): n is a, c, g, or t
  misc_feature (176)..(183): n is a, c, g, or t
  misc_feature (185)..(196): n is a, c, g, or t
  misc_feature (199)..(201): n is a, c, g, or t
  misc_feature (203)..(206): n is a, c, g, or t
  misc_feature (209)..(215): n is a, c, g, or t
  misc_feature (218)..(219): n is a, c, g, or t
  misc_feature (221)..(221): n is a, c, g, or t
  misc_feature (226)..(233): n is a, c, g, or t
  misc_feature (235)..(237): n is a, c, g, or t
  misc_feature (239)..(245): n is a, c, g, or t
  misc_feature (247)..(252): n is a, c, g, or t
  misc_feature (255)..(257): n is a, c, g, or t
  misc_feature (259)..(262): n is a, c, g, or t
  misc_feature (264)..(272): n is a, c, g, or t
  misc_feature (274)..(275): n is a, c, g, or t
  misc_feature (277)..(282): n is a, c, g, or t
  misc_feature (284)..(288): n is a, c, g, or t
  misc_feature (290)..(297): n is a, c, g, or t
  misc_feature (299)..(301): n is a, c, g, or t
  misc_feature (303)..(304): n is a, c, g, or t
  misc_feature (306)..(308): n is a, c, g, or t
  misc_feature (310)..(310): n is a, c, g, or t
  misc_feature (313)..(315): n is a, c, g, or t
  misc_feature (319)..(320): n is a, c, g, or t
  misc_feature (322)..(325): n is a, c, g, or t
  misc_feature (327)..(328): n is a, c, g, or t
  misc_feature (330)..(332): n is a, c, g, or t
  misc_feature (334)..(338): n is a, c, g, or t
  misc_feature (341)..(342): n is a, c, g, or t
  misc_feature (344)..(344): n is a, c, g, or t
  misc_feature (347)..(349): n is a, c, g, or t
  misc_feature (352)..(352): n is a, c, g, or t
  misc_feature (354)..(357): n is a, c, g, or t
  misc_feature (359)..(360): n is a, c, g, or t
  misc_feature (363)..(363): n is a, c, g, or t
  misc_feature (365)..(365): n is a, c, g, or t
  misc_feature (367)..(367): n is a, c, g, or t
  misc_feature (370)..(371): n is a, c, g, or t
  misc_feature (373)..(383): n is a, c, g, or t
  misc_feature (385)..(392): n is a, c, g, or t
  misc_feature (395)..(395): n is a, c, g, or t
  misc_feature (397)..(400): n is a, c, g, or t
  misc_feature (403)..(403): n is a, c, g, or t
  misc_feature (405)..(405): n is a, c, g, or t
  misc_feature (408)..(410): n is a, c, g, or t
  misc_feature (412)..(413): n is a, c, g, or t
  misc_feature (415)..(416): n is a, c, g, or t
  misc_feature (418)..(428): n is a, c, g, or t
  misc_feature (430)..(430): n is a, c, g, or t
  misc_feature (433)..(433): n is a, c, g, or t
  misc_feature (435)..(435): n is a, c, g, or t
  misc_feature (437)..(438): n is a, c, g, or t
  misc_feature (440)..(442): n is a, c, g, or t
  misc_feature (444)..(447): n is a, c, g, or t
  misc_feature (449)..(457): n is a, c, g, or t
  misc_feature (459)..(465): n is a, c, g, or t
  misc_feature (468)..(471): n is a, c, g, or t
  misc_feature (473)..(473): n is a, c, g, or t
  misc_feature (475)..(478): n is a, c, g, or t
  misc_feature (481)..(483): n is a, c, g, or t
  misc_feature (485)..(485): n is a, c, g, or t
  misc_feature (489)..(490): n is a, c, g, or t
  misc_feature (492)..(493): n is a, c, g, or t
  misc_feature (495)..(496): n is a, c, g, or t
  misc_feature (498)..(498): n is a, c, g, or t
  misc_feature (500)..(510): n is a, c, g, or t
  misc_feature (512)..(518): n is a, c, g, or t
  misc_feature (520)..(534): n is a, c, g, or t
  misc_feature (536)..(540): n is a, c, g, or t
  misc_feature (543)..(543): n is a, c, g, or t
  misc_feature (545)..(545): n is a, c, g, or t
  misc_feature (547)..(549): n is a, c, g, or t
  misc_feature (694)..(694): n is a, c, g, or t
  misc_feature (881)..(881): n is a, c, g, or t
  misc_feature (1086)..(1086): n is a, c, g, or t
  misc_feature (1985)..(1985): n is a, c, g, or t
  misc_feature (2163)..(2163): n is a, c, g, or t
  misc_feature (2177)..(2177): n is a, c, g, or t
  misc_feature (2402)..(2402): n is a, c, g, or t
  misc_feature (2505)..(2505): n is a, c, g, or t
  misc_feature (3338)..(3338): n is a, c, g, or t
  misc_feature (3536)..(3536): n is a, c, g, or t
  misc_feature (3863)..(3863): n is a, c, g, or t
nnnntnnnnnnntnntntnnnnnnnnnnnnnnnttnnnnnannnannnnnnnnnnnaaaagnntnncntntatnnnnntnnnagnnnnnntnntnntntnnannananntntnantttnnnnnanntnntannnannannnnnnntttngaaaannnntnnnnnnnaannnnnncnnnnnnnntnnnnnnnnnnnnatnnncnnnngannnnnnnttnntnaattnnnnnnnntnnntnnnnnnntnnnnnnttnnnannnnannnnnnnnntnnannnnnntnnnnntnnnnnnnntnnnanntnnngngannncttnntnnnnanntnnnannnnntanngnaannnttntnnnncnntgnantnctnnannnnnnnnnnncnnnnnnnnaantnnnntangnagnnnanntnntnnnnnnnnnnntnggnanannannncnnnnannnnnnnnnannnnnnnctnnnncntnnnnagnnncntttnnannanngntnnnnnnnnnnnannnnnnnannnnnnnnnnnnnnngnnnnnttntntnnnttttcttttctgtcatatcagttgtattccgtttttcaaggcttcctgcactaccggtgaatcctcatggtcaccgatgacgtcaatcttttggtcgcccaaatgcagtttcaagcgtgcggtcatgcggatgcgtgccaatacncccttcttttctcccgtgctgcggactaataaatcaatatctcctccgcgcttttcgtcattcagacgggaaccgaagagatatacctgcactgtttcaccataaatatctttggctatttggatgatggtctgtatttctttagattgcaaacgcatgcctttattctcctttcttaccgcaaagntacaaattcccctccacatttcctagcgtccgccatccttatttcatcttctccacaaaccccaccggcatatcaaccccagcacatcccagcaaatccagtcttaccaccactttcgcttttccatccacttccaccagttctccttccagaccctttagcggacctttgaccacccgtatcaattctcccggagccaatggcncggtacacatctccaccgcctcgtccgaataatccagcataaatttgaaccgttccatctgttcgtccggaatcaccgccggagtatgttcgccatgcagcaccatataccggctgatggccgacaacgtgagcacctgcgaacgttccgccgcatctacatggacaaaaatcatcatggggataaccacccgttttattttctttttccggtaagtccattggcggatttcttcttgtacaggcaggaagttctctatgttcattgcggtcagccgttcggccgtcttcttttcgtggtgaaggcggacatacgccactagccattttttcatattcggaggaaggaaaagtaatgttagatgttctaaaaaatgaaagaaatgatgcctcttgagcacgctacgctgttacctgtgtcattcccaggtaagcttgtcgttaaattctgatgcaaatatagacatttttttacgataacaagctatttgttcgcaaaaaatgaaaaaattaacaagaatgacgtatttatttatacttttgtgctttttatattttaaatgatattaacattgtggaaaaatcaagatttataagaaaaatagtggcagattgagcttccttcaagagttggaaaaaatcatggccggatatcgcctgtccggtgaaggctacactgatgaggaaatgagagttctgaagcgcatgtgcaaaagtatgttggctgatatagacgagtttctgcggaaaaaggaggaaaagaagaagaaagaacggaaagagaagaaaaagaggaaagaaaggaaataaggagcaaaatgtgaaaagacattaaaaggaagtctcccggttatttgtacacttgtatcataaatgggtattgtaaatcagtgctttacnttgggtaagtgtacaattttaacttttgattgtatgggtttgcaatatacttttgctttcatggtggagggaaatgccctccttttgataatttaaattcatacatgaatggtttataccgatttatgctctttctatttctcggtgttcgatgaacatgccgtggatatgacattgnaagagtttgtgaancttctgcgtggcgaacgctggaaggtgcaagtagaagagtatcagcgcctgaaggcttcgggcagggagacagaggccaagaagttaaagagaaaactggccgcgctggtgatagccgggcgttgcgatgggagccatgccgaaaccaatctgaagcagtggagcggggacgccatgctggatgtggataaatgtaacggccgtgtgtctgagttcttgcaggtnttgaaggacactccttgggtgaaggcggcatggcgcagcgtttcgtacgacgggctgaaactggtggtgcgtgtggaagcggagagtgtggacgagtatcgtntggcatacgcattggtggcatggcacgtggcgcagcttcttgcctttccctgtgacatgagttgcaagaatcccacccgtccttgctttgcatcgtatgatccggaggctttttttcgtccggataccgaagtttttccctggcggcgctttgtgacggagcatcccgacagggtgggggagattctggcggagctgaaagtgaagaccccggcaggtgcgtccgggcctcccgttgcggcttcgggcatgctgcacacattcttcaacgagttcctggagcagaatccctttgtggatggcaaaaagaatgagtttttgttgaagctgggacgtatcgcccgctataaaggagtgggcgaggaagagttggcacggctgaaaacgctggcggtggaaaggctggcgggtatggggtgtgccgccggggatatacctccgcgcatagactccggataccggtatgccgacatgaacaaggggcccgaaacacctgcttccagggctcacaaggctcagggctcacctatgcggtattctgagcccaatgagggggaggaagaggctgagttagagaaacttgaggctgacaagttgcgtcgtgaagttccgtgtcttccggatgaactgttcgaccgtttgcccgactttttgaagcgtggtttgacgcacgtccgcaacaagcgcgagagggatattctgttgctctccatgattaccaacatcagcggttgtctgccgggggtgaggatgaattatggaggaatggtttattccgccgatctctacctggtggctttggccggttcgggcagaggaaagggggtgatgcanctggcggcaattctgcccgcagccattcaggagtattacgatgaattgaacaggaaggatgagcgtgagtaccggcagaagctgctgaagtggaatctggaggaacggcttgccgctcaggaaaagagggttcccgatttggaccaatgcccggagatgccggtggaacgcatcctgaaggtggctcccaatatttcnaaaagccagttgatactggctttggaggcgggtggagcggtcggcttggtgatgaatgcctccgagctggacatgataagttctgccatgcaccaggagtatggaaaacatgatgatgtgatgcgtgccgcctcccagcacgaggaggtgtcttcttatttcaagacggatcaccggcttgttgttgtgagtgaccctcatctggcattatgcgcttcgggtactcccgcccagttgcataaatttatttcttcgctggagaatggaatgtacagccgtgtggctttctatgtgggacaggcccactgggagtataagtcggcaaancccggcaaggcccggctggatatgcgcgcttatttcaaagggatgggcgaggagctgctgcgtatgtttatctttctctccggatcgcctaccgaggtggttttcaccgaggaacaatggaaagagcatacggagcg

SEQ ID NO: 291 - DNA, 4000 bp, Escherichia coli
  misc_feature (3)..(4): n is a, c, g, or t
  misc_feature (8)..(11): n is a, c, g, or t
  misc_feature (14)..(15): n is a, c, g, or t
  misc_feature (17)..(17): n is a, c, g, or t
  misc_feature (19)..(20): n is a, c, g, or t
  misc_feature (24)..(25): n is a, c, g, or t
  misc_feature (28)..(29): n is a, c, g, or t
  misc_feature (33)..(35): n is a, c, g, or t
  misc_feature (37)..(38): n is a, c, g, or t
  misc_feature (40)..(41): n is a, c, g, or t
  misc_feature (45)..(45): n is a, c, g, or t
  misc_feature (47)..(47): n is a, c, g, or t
  misc_feature (49)..(50): n is a, c, g, or t
  misc_feature (54)..(54): n is a, c, g, or t
  misc_feature (56)..(56): n is a, c, g, or t
  misc_feature (58)..(60): n is a, c, g, or t
  misc_feature (63)..(64): n is a, c, g, or t
  misc_feature (66)..(69): n is a, c, g, or t
  misc_feature (73)..(76): n is a, c, g, or t
  misc_feature (78)..(79): n is a, c, g, or t
  misc_feature (82)..(82): n is a, c, g, or t
  misc_feature (84)..(86): n is a, c, g, or t
  misc_feature (89)..(90): n is a, c, g, or t
  misc_feature (92)..(92): n is a, c, g, or t
  misc_feature (95)..(95): n is a, c, g, or t
  misc_feature (99)..(100): n is a, c, g, or t
  misc_feature (103)..(103): n is a, c, g, or t
  misc_feature (105)..(105): n is a, c, g, or t
  misc_feature (107)..(111): n is a, c, g, or t
  misc_feature (118)..(119): n is a, c, g, or t
  misc_feature (121)..(122): n is a, c, g, or t
  misc_feature (126)..(127): n is a, c, g, or t
  misc_feature (129)..(130): n is a, c, g, or t
  misc_feature (132)..(132): n is a, c, g, or t
  misc_feature (134)..(141): n is a, c, g, or t
  misc_feature (144)..(147): n is a, c, g, or t
  misc_feature (149)..(151): n is a, c, g, or t
  misc_feature (154)..(157): n is a, c, g, or t
  misc_feature (159)..(159): n is a, c, g, or t
  misc_feature (164)..(164): n is a, c, g, or t
  misc_feature (166)..(166): n is a, c, g, or t
  misc_feature (169)..(169): n is a, c, g, or t
  misc_feature (172)..(172): n is a, c, g, or t
  misc_feature (174)..(175): n is a, c, g, or t
  misc_feature (178)..(178): n is a, c, g, or t
  misc_feature (180)..(180): n is a, c, g, or t
  misc_feature (182)..(183): n is a, c, g, or t
  misc_feature (185)..(186): n is a, c, g, or t
  misc_feature (189)..(189): n is a, c, g, or t
  misc_feature (192)..(192): n is a, c, g, or t
  misc_feature (194)..(194): n is a, c, g, or t
  misc_feature (196)..(196): n is a, c, g, or t
  misc_feature (198)..(199): n is a, c, g, or t
  misc_feature (201)..(201): n is a, c, g, or t
  misc_feature (203)..(205): n is a, c, g, or t
  misc_feature (207)..(208): n is a, c, g, or t
  misc_feature (210)..(210): n is a, c, g, or t
  misc_feature (212)..(214): n is a, c, g, or t
  misc_feature (217)..(218): n is a, c, g, or t
  misc_feature (220)..(222): n is a, c, g, or t
  misc_feature (225)..(225): n is a, c, g, or t
  misc_feature (228)..(229): n is a, c, g, or t
  misc_feature (231)..(232): n is a, c, g, or t
  misc_feature (235)..(236): n is a, c, g, or t
  misc_feature (238)..(240): n is a, c, g, or t
  misc_feature (247)..(251): n is a, c, g, or t
  misc_feature (254)..(256): n is a, c, g, or t
  misc_feature (258)..(258): n is a, c, g, or t
  misc_feature (260)..(260): n is a, c, g, or t
  misc_feature (262)..(263): n is a, c, g, or t
  misc_feature (267)..(267): n is a, c, g, or t
  misc_feature (273)..(273): n is a, c, g, or t
  misc_feature (276)..(276): n is a, c, g, or t
  misc_feature (278)..(281): n is a, c, g, or t
  misc_feature (288)..(288): n is a, c, g, or t
  misc_feature (290)..(292): n is a, c, g, or t
  misc_feature (294)..(295): n is a, c, g, or t
  misc_feature (297)..(297): n is a, c, g, or t
  misc_feature (299)..(302): n is a, c, g, or t
  misc_feature (304)..(304): n is a, c, g, or t
  misc_feature (306)..(306): n is a, c, g, or t
  misc_feature (308)..(309): n is a, c, g, or t
  misc_feature (311)..(313): n is a, c, g, or t
  misc_feature (316)..(317): n is a, c, g, or t
  misc_feature (319)..(319): n is a, c, g, or t
  misc_feature (321)..(321): n is a, c, g, or t
  misc_feature (325)..(327): n is a, c, g, or t
  misc_feature (330)..(330): n is a, c, g, or t
  misc_feature (332)..(332): n is a, c, g, or t
  misc_feature (340)..(340): n is a, c, g, or t
  misc_feature (344)..(344): n is a, c, g, or t
  misc_feature (347)..(347): n is a, c, g, or t
  misc_feature (351)..(356): n is a, c, g, or t
  misc_feature (361)..(361): n is a, c, g, or t
  misc_feature (363)..(364): n is a, c, g, or t
  misc_feature (366)..(366): n is a, c, g, or t
  misc_feature (369)..(369): n is a, c, g, or t
  misc_feature (371)..(371): n is a, c, g, or t
  misc_feature (373)..(376): n is a, c, g, or t
  misc_feature (378)..(379): n is a, c, g, or t
  misc_feature (381)..(391): n is a, c, g, or t
  misc_feature (393)..(396): n is a, c, g, or t
  misc_feature (399)..(405): n is a, c, g, or t
  misc_feature (407)..(410): n is a, c, g, or t
  misc_feature (412)..(416): n is a, c, g, or t
  misc_feature (418)..(421): n is a, c, g, or t
  misc_feature (423)..(429): n is a, c, g, or t
  misc_feature (431)..(436): n is a, c, g, or t
  misc_feature (438)..(440): n is a, c, g, or t
  misc_feature (442)..(442): n is a, c, g, or t
  misc_feature (444)..(447): n is a, c, g, or t
  misc_feature (449)..(450): n is a, c, g, or t
  misc_feature (452)..(453): n is a, c, g, or t
  misc_feature (455)..(461): n is a, c, g, or t
  misc_feature (463)..(465): n is a, c, g, or t
  misc_feature (467)..(489): n is a, c, g, or t
  misc_feature (491)..(495): n is a, c, g, or t
  misc_feature (497)..(499): n is a, c, g, or t
  misc_feature (501)..(507): n is a, c, g, or t
  misc_feature (509)..(515): n is a, c, g, or t
  misc_feature (517)..(534): n is a, c, g, or t
  misc_feature (536)..(557): n is a, c, g, or t
  misc_feature (559)..(584): n is a, c, g, or t
  misc_feature (586)..(591): n is a, c, g, or t
  misc_feature (593)..(615): n is a, c, g, or t
  misc_feature (617)..(623): n is a, c, g, or t
  misc_feature (626)..(626): n is a, c, g, or t
  misc_feature (628)..(628): n is a, c, g, or t
  misc_feature (630)..(632): n is a, c, g, or t
  misc_feature (634)..(639): n is a, c, g, or t
  misc_feature (642)..(646): n is a, c, g, or t
  misc_feature (648)..(651): n is a, c, g, or t
  misc_feature (653)..(653): n is a, c, g, or t
  misc_feature (657)..(658): n is a, c, g, or t
  misc_feature (660)..(665): n is a, c, g, or t
  misc_feature (669)..(669): n is a, c, g, or t
  misc_feature (671)..(671): n is a, c, g, or t
  misc_feature (673)..(683): n is a, c, g, or t
  misc_feature (685)..(686): n is a, c, g, or t
  misc_feature (688)..(700): n is a, c, g, or t
  misc_feature (702)..(703): n is a, c, g, or t
  misc_feature (705)..(711): n is a, c, g, or t
  misc_feature (714)..(715): n is a, c, g, or t
  misc_feature (717)..(717): n is a, c, g, or t
  misc_feature (719)..(719): n is a, c, g, or t
  misc_feature (721)..(722): n is a, c, g, or t
  misc_feature (724)..(724): n is a, c, g, or t
  misc_feature (726)..(728): n is a, c, g, or t
  misc_feature (730)..(730): n is a, c, g, or t
  misc_feature (733)..(738): n is a, c, g, or t
  misc_feature (740)..(742): n is a, c, g, or t
  misc_feature (744)..(747): n is a, c, g, or t
  misc_feature (749)..(758): n is a, c, g, or t
  misc_feature (760)..(768): n is a, c, g, or t
  misc_feature (771)..(782): n is a, c, g, or t
  misc_feature (784)..(786): n is a, c, g, or t
  misc_feature (788)..(794): n is a, c, g, or t
  misc_feature (799)..(826): n is a, c, g, or t
  misc_feature (828)..(836): n is a, c, g, or t
  misc_feature (838)..(857): n is a, c, g, or t
  misc_feature (859)..(877): n is a, c, g, or t
  misc_feature (880)..(880): n is a, c, g, or t
  misc_feature (882)..(882): n is a, c, g, or t
  misc_feature (886)..(887): n is a, c, g, or t
  misc_feature (889)..(890): n is a, c, g, or t
  misc_feature (896)..(896): n is a, c, g, or t
  misc_feature (904)..(904): n is a, c, g, or t
  misc_feature (907)..(907): n is a, c, g, or t
  misc_feature (910)..(910): n is a, c, g, or t
  misc_feature (913)..(913): n is a, c, g, or t
  misc_feature (915)..(915): n is a, c, g, or t
  misc_feature (919)..(919): n is a, c, g, or t
  misc_feature (922)..(922): n is a, c, g, or t
  misc_feature (925)..(925): n is a, c, g, or t
  misc_feature (928)..(928): n is a, c, g, or t
  misc_feature (932)..(932): n is a, c, g, or t
  misc_feature (949)..(950): n is a, c, g, or t
  misc_feature (952)..(954): n is a, c, g, or t
  misc_feature (958)..(958): n is a, c, g, or t
  misc_feature (1098)..(1098): n is a, c, g, or t
  misc_feature (1263)..(1263): n is a, c, g, or t
  misc_feature (1281)..(1281): n is a, c, g, or t
  misc_feature (1347)..(1347): n is a, c, g, or t
  misc_feature (1371)..(1371): n is a, c, g, or t
  misc_feature (1491)..(1491): n is a, c, g, or t
  misc_feature (1974)..(1974): n is a, c, g, or t
  misc_feature (1989)..(1989): n is a, c, g, or t
  misc_feature (2005)..(2005): n is a, c, g, or t
  misc_feature (2071)..(2071): n is a, c, g, or t
  misc_feature (2192)..(2192): n is a, c, g, or t
  misc_feature (2202)..(2202): n is a, c, g, or t
  misc_feature (2271)..(2271): n is a, c, g, or t
  misc_feature (2388)..(2388): n is a, c, g, or t
  misc_feature (2943)..(2943): n is a, c, g, or t
  misc_feature (3287)..(3287): n is a, c, g, or t
  misc_feature (3387)..(3387): n is a, c, g, or t
  misc_feature (3478)..(3478): n is a, c, g, or t
  misc_feature (3589)..(3589): n is a, c, g, or t
  misc_feature (3672)..(3672): n is a, c, g, or t
  misc_feature (3705)..(3705): n is a, c, g, or t
  misc_feature (3742)..(3742): n is a, c, g, or t
  misc_feature (3814)..(3814): n is a, c, g, or t
  misc_feature (3960)..(3960): n is a, c, g, or t
  misc_feature (3994)..(3994): n is a, c, g, or t
aannatgnnnntannancnnagtnncanngaannngnntnntacnantnntgangntnnnagnntnnnnacannnntnnagntnnnttnntnagnagannagntntnnnnncagatanngnnagannannanannnnnnnnatnnnnannnaannnnanattananttnaantnnttncnanngnnaanatnangnanntngnnnannanannnagnntnnnganatnnannaannannntttctannnnntcnnntncnanncaangagtantgngnnnnggaaatngnnnannanannnnanangnnannnctnntncnattnnngtntntattactncaanatnagannnnnnttcgntnncntancntnnnnanntnnnnnnnnnnnannnnatnnnnnnnannnngnnnnnannnntnnnnnnntnnnnnntnnnanannnnanngnntnnnnnnnannnannnnnnnnnnnnnnnnnnnnnnnannnnntnnntnnnnnnngnnnnnnngnnnnnnnnnnnnnnnnnncnnnnnnnnnnnnnnnnnnnnnntnnnnnnnnnnnnnnnnnnnnnnnnnnannnnnngnnnnnnnnnnnnnnnnnnnnnnnannnnnnnaantntnnnannnnnnttnnnnnannnngnggannannnnnntttnantnnnnnnnnnnntnntnnnnnnnnnnnnngnntnnnnnnnggnntngngnngnannngnaannnnnncnnntnnnngnnnnnnnnnntnnnnnnnnnggnnnnnnnnnnnncnnncnnnnnnnaaaannnnnnnnnnnnnnnnnnnnnnnnnnnngnnnnnnnnntnnnnnnnnnnnnnnnnnnnntnnnnnnnnnnnnnnnnnnnaananatgnncnnttggtnaaggggtnaanacnccncntttncanggnggnaacncgggttcgaatcccgtnngnnntatntttcgagtaacttaggttactctttttattttgtttcttttttttatatgttataatagcttataatactattttgaggtgaatttatgtctaaagtttttgtttttggtcatcaaaaccctgattctgatgcaatcggntcttcttatggatacgcttatttgaaacgtcaacttggtgttgatgctgaagctgttgctttgggtactcctaacgaggaaactgcttttgttcttgattattttggtgttgaagcaccacgagtggttgagtctgctcaatcagagggagttaatcaagttatncttacagaccataatgantttcaacaatctatttcagatattaaggacgttgaagttattgaggtagtcgaccatcaccgtgtngctaactttgaaactgctaatccnttaatgatgcgattggaacctgttggatctgcatcttcaattgtttttcgtatgtttaaagaaaacaatgttgaagttcctaaggaagttgctggtttgcttttgtcaggtttgatttcngatactcttcttcttaaatctccaactacacatgcttcagatcctgcagttgcagctgaacttgcagaaattgctggtgttaatctagaagaatatggtcttgctatgcttaaagctggtactaatctttcttcaaaatctgctgaagaactcattgacattgatgcaaaaacatttgaattgaatggtaatcaagttcgtgttgcacaagttaatacagttgatatttctgatgttctttctcgtcaagcggaaattgaagaagctattaataactcaattaaaaacaatggttactctgactttgtcttaatgattactgatattcttaattctaattcagaaattcttgcacttggttcaaatactgataaggttgaagctgcttttaattttgttttagaaaataatcatgctttccttgaaggagctgtttctcgtaagaaacaggtagttcctcagttgactgaaagctttaatgcntaaaattaggccatnaggcctttttttagtnctctgattaatggtataatacttcttatgataatacaatttaacccaaacaaactatgtaagcaanctttttttatggaaatagtgaattatctatatcttaatcagcctgtgaccctgagagcaataaaaaggcagtttccttttcaaaagaatatcgataaattaattgaggagtttgtaaaagnaggctatatngaacgattcgagaaacgttaccgtttattaattagtcttgtgtcggattcttctaaaattgatttagancagcatttttttattaatgatgattctacttgttatttagaactattaaatcgtagatttgttactgagataagtaattctactaatgaagttgttattattgaacaaacgagtatnacgagagacgatcttacgatttcaaattatttctataaattaagagaaaatctaccattatcggaagagcagaatagattatatgatatattaggggatgttaatcctgaatattttttgaaacatgttacgacttttcttttaaaatacgtaaggaaggaatatgcacttcaaaaaaggaggaatatttttgttgatgctttagaattattagggtatcttgttcaagtagaagaagggcgttatcttttgaatatggatttagattccgaagcattagtttttagtgcaaaaaaagactagtattattactagtcttttttatgacaactttaacgattccttagttcaagataacgtttgtaccagatgttaacataagattgtgaaaatggccccttaccattgttaatccaatctaccaagattttaacatgttcctttaagatatagtcaatatcaggagagtaatgcatttcttttttatgtgtttcatactcatctacatctagcaattttttttcaccatcagcgaagactttgacatctaggtcntagtcaatatattttagtgcttcttggtccaaaatatatggactagctaaattgcagtagtaggaaatgccgttatccctaatcatggctataatattaaaccagtattttttgtggaaataaacaatagcaggttcacgtgttacccatcgtcttccgtctgcttcagtaacgagggtgtggtcgttaacgccaataacagcattctcagttgtctttagtaccatagtatcgcgccaagtacggtgcaaactaccatcatgcttataactttgaattgtgataaagtcgccttcttttggtaatttcatggcgtcctctttctacaataagggttatccccnttattgtatcataattttgtgaaaagagggggaatacctataaatattctcttagagcggatgctatcgcatcaaagtcataaccttttcgggctaaagnttgtgtcaagcgttgcttaagctcataaccgtcgtattttttactaaatttttgatattgcttatcaatttctttataaaggagagcttgntcattttcttcatctgcttcaagttctagatgatcgattgctagtttactttcttggaatgaaaaacctttattgataaggctttgagttaatttatcttttagggctttngatggtagttttccctgatattttcgtaacagttttgaagctactttaatggctatttctgagaaatcaaattggcttaaaanatcgtcaatgatttgtttgttacaacctttttnaagccatttttgcttcagcacataggcccctttatcncctgaattcagattttgttgagctagactttctaggagtttgtaatcatcaatccaatgatctttttttagnttatcaataatttttggaattatatgagggtttatttcatgtttaaaaaggtaatcttttacctctttctcagtacgttgtttaaatgaaataaaatagagagctaagtttttaccatgcgagaactgagcaaaggatttaatatnctctagttgatctttgtccagtatcatttctttngtcaac

SEQ ID NO: 292 - DNA, 4000 bp, Escherichia coli
  misc_feature (1976)..(1976): n is a, c, g, or t
  misc_feature (1980)..(1980): n is a, c, g, or t
  misc_feature (1992)..(1992): n is a, c, g, or t
  misc_feature (2003)..(2003): n is a, c, g, or t
  misc_feature (2013)..(2013): n is a, c, g, or t
  misc_feature (2033)..(2034): n is a, c, g, or t
  misc_feature (2043)..(2043): n is a, c, g, or t
  misc_feature (2046)..(2046): n is a, c, g, or t
  misc_feature (2051)..(2051): n is a, c, g, or t
  misc_feature (2125)..(2125): n is a, c, g, or t
  misc_feature (2146)..(2146): n is a, c, g, or t
  misc_feature (2257)..(2257): n is a, c, g, or t
  misc_feature (2427)..(2427): n is a, c, g, or t
  misc_feature (2491)..(2491): n is a, c, g, or t
  misc_feature (2556)..(2556): n is a, c, g, or t
  misc_feature (2587)..(2587): n is a, c, g, or t
  misc_feature (2593)..(2593): n is a, c, g, or t
  misc_feature (2609)..(2609): n is a, c, g, or t
  misc_feature (2615)..(2615): n is a, c, g, or t
  misc_feature (2626)..(2626): n is a, c, g, or t
  misc_feature (2755)..(2755): n is a, c, g, or t
  misc_feature (2842)..(2842): n is a, c, g, or t
  misc_feature (2977)..(2977): n is a, c, g, or t
  misc_feature (2996)..(2996): n is a, c, g, or t
  misc_feature (3007)..(3007): n is a, c, g, or t
  misc_feature (3049)..(3049): n is a, c, g, or t
  misc_feature (3487)..(3487): n is a, c, g, or t
  misc_feature (3569)..(3569): n is a, c, g, or t
  misc_feature (3795)..(3795): n is a, c, g, or t
  misc_feature (3818)..(3818): n is a, c, g, or t
  misc_feature (3946)..(3946): n is a, c, g, or t
ttccagcctttactaatttaatatacagttccaacatcttaattacctcccgtctttgcttcatacagttccgctactgcgttcataataatgagctgattttcttctgttgcgagcagtttttcatagagttctgcctgtgctcccatgctgatcagaatgttctcgtttactttttcagtgttctcttcctgctggatcagattataatactcttcttcactcaggaaacgatactcgcatgtatagcccacttctttctcttcgctgccatccatactgtctcgttcgatacgattgatatttcttctctggatgtaagtattggcatttaccatttccaacgtttcaggcagtgaggagcaattctctgttttccatccttgcatttttatttgcctccttgtccattttagatatgatgcgtttgaccgccctcacgcttataagtggcttaatatacatcagataccactcataggtgtcagagtgtgttatccagcccatcagggaaataaaacccttgcagagccttaatggatatttcttcttttccatcttctttttattgagtttccttgctatcctcgcaatatgtatcagcgtatgctttcttatgattacccgatttcgatagaacagccagcccattgccgatacttccctgccggttctcctgccattctttttaatgtactcaaaccggaacacctgccagtcacctttcattttcagcctgatttttccaagccactgcttaatgaatataatcgccatgtgcagcttctttttattatcatctgccatcgtgaaattatccatataccggataaagtgtgctattttcagcttgcactttatcagaaaatccagctcctgcaggagaaagtttgccagccactgtgacaaataaaagcccagtggcagcttatctggaaaccatgtcaggcacacatctatcagatacataaataaagcatctttgatacgttttaacagttttggtcggataaacttatactttgcatggtcataaaaatgtcggatatcgcactgtgcaaaattccggatacctttcccagactgaatccatcttttcatcgctttcattccccgatgtgatccacgcttgggaaaagacgaatagctgtgatggtaactgctcccttgaataatcggctccagaattagcacaataacgtgctgtatccacaattcaaccattgtcggtacatatatgacccttgttttcccagcttcttttataataaccgggttatgctttggtggtttaaattccagttccggattttccaccttccatccggctggcttcgtattctggataattttctgtattttctcaacccatccatctaaatcttcctccaccatttgaatatcttttctgtcactttttccacgcttcatccgcttaaatgcccggaggataacacccttttggcaagccagcgtgtataaatatctgtaacttttctttttcttccaaggaatgccggtctctttttcaatgtcatatttgaacttatgcattttatcttctatctcctcgccgctttcgaacattgctcactacttgcagctcctgaccggaataatttccactcaccaaaacctataaaggcggatataacagtatttcaactgtcagcggtgtatatgactatcggtaacattttggacttatagtttcttgatagaatcaggacgccccgtagttccaccaggcgttagcagcgacattgttcagtgtgcgagcccagagcccgtcattagcaccgttgttgcaattgccgaaccgcagcgaaaccgccggagagggagttccgatagcccctcaagatctttaaaaaatcattcctatattttatacaaagcagttgggggaagacccccaaaccccctatctgcagcttacgctgcagcaggtgctggaagaagtttggacgccccgnagtnccaccaggcgtnagcagcgacancgtccagtgngcgagcccagagcccgtcannagcaccgtngtngcaancgccgaaccgcagcgaaaccgccggtatttctgcgttcacccaagtgtgatcgcagtatccagtagcagaactncatgcgatttcatcatttggnactgcaccaaaatcctttaccacctgagttgttgcataatatccgttttttgccaaattcactccagtatccagatatttagccccggttaagtcataggtataatccggngacacctttattcttccgttaatcaggagcatatacggatctctctgccacagcatataactccccataacgcagctatggaaaatcttattgaaggacttattatcattagaaccataaaactgtcctccgccaatgactgtattgattttcgttccgtaatgttgtgntttatcttcaacgtaggtagaacacatgcctgatccaaaagcagtctgagagtcggtgctcttnctcagcagaatacagatgtctgccaatgtattcgttaatgcaccgccaaagaaaagagctttgcnggatgctgcctgaattgctgtatactgctcngcagtnccgattgcttttccgnttgcantgtctgcagcngaaccggaggctgttaagcagctccactgccctgcaatacttctcatctttccattggaatcaatggagccatagaacatcgggatcagcatataatctctttcttttccaagtacattaaatcctacngcatggaaatcatcatccacttttctttcacagaaatatacatagcggtcatttccaaccttatattccttcttgtagattttcttnacgattgccatcgcatcaccggcataatcaatattagccgcatcagagttcgttccatccgctttcttcgtataatcgtccggatctaagaagtaatcaatacctccatcccaattacacataaccggtacattngctttcagccagtcccagncagcccatganccataattcatggcgtgcgtgctcatgttcatgctcataggngtaaagtccttgttcgcaccaaggtactccactcttgtggacggattcaggtcggaagcttcatggataaccattccataaatcggtgcatcatccggtaccagatttctcaccagcttttccacctgctcctgcacttcaagcagtgtttcctgctctgcaataaaaacctttttcgacattttctacctcgtttccagcataatataacactttacgttttatatttgcttattttgttagattataacgtaatacgttatttttacagttcctcataatataaatgaccgttttccatgcctaatcgcatcttcccaccgttcacgtcatcctcaaagatcttcgcatccctgcggttggcttttccgttgttgagaagctgggcatatcgctcattaaagtaatctgcatgtgccggtgtggtaggctccagancctccatctgttcgttgtaaaccggctcatcctgaatcgttaaattcttcgccatgtcctgcctccctaaaatgtatcgttnatatagaaagtcatgctgatatccgcatcctttccttttgcggtaaaacgcttgatggtaacgatatccccatccgcatcatagagtccgatttcgctaatcgcagcacccggaagctcactctcctttagctcacattcatacttgcacttcgtatcgctcaacatggtgtaagtatcgtatttctttctgagcaattcgttcttcagttctgattctgcctccngcggtgcgataacatttccatcngcatccacaccaccatcaccaaatacaaagcccacaatcttaggcagctggatttctccagctctggctctcagcatctttttccttcctgcaattgtaataatctgattctgtgtaaggttctctgncattttacaattcctcctctcgccttatggcatctaatatccttgttccattta

SEQ ID NO: 293 - DNA, 4000 bp, Escherichia coli
  misc_feature (85)..(85): n is a, c, g, or t
  misc_feature (1988)..(1988): n is a, c, g, or t
  misc_feature (2228)..(2228): n is a, c, g, or t
  misc_feature (2834)..(2834): n is a, c, g, or t
  misc_feature (3232)..(3232): n is a, c, g, or t
  misc_feature (3901)..(3901): n is a, c, g, or t
  misc_feature (3948)..(3948): n is a, c, g, or t
ttttcataccgccagcagctattgctgcttcacgctcagctatttcggcctcgcactctgcctgacgggctatagcggcatctangtctgcttgtatcaccgtaagtgagttttgtccatttacctctgtctgaccttttagtatttctacggcttcgtcgtagcttagtcgtgggaatggcttagcaacagtctctaacttagaaatgtctcttcccagcacttctagttcttcaggacattttgcgataacctcttgcactactgcacgcaagaaagcctcgatggtgtccatattctcaaatatgtcacaaaaggccatctctggctctatcatccaaaattctgataagtgacgtcgtgttttacttttttcggctctaaaggtggggccaaaggtgtatatcttacccatcgccatcgccattgcttctccgtataattgtccactctgcgtgaggtaagcaggcttaccatagtagtctgtttcaaataggtcggttgtgccttcggcagcatttccagtaaatataggggcatccatctgcacaaatccttctgcctgaaaaaagttgtgaatagcatatgtaattgcgtttcgtacacgcataatcgcccattgacgtctgcttcgtagccataagtgtcggttatctaccaaaaagtctaccccgtgttctttattcgaaatgggataatctttcgcattttggtacacttctaccgtggtagcgtgtatttcgtatccgcctatttgacgttcatcggctactacttttccagttacagcgatagaactttcttggccaagagatttagcaacagcaaataaatcttcgcctatttcctccacgcccagaatgcattgacagatccctcgaccatctcttaagttgatgaatactaccgttttactttctcgcttgttggctacccatccctttacggtaacctcttgtcctacatattggtctaattgtttggtatgcattttgctagtcgtggatttctccctaattttgaacagcaaaagtaagtgctatcacttatttttcaatgtgtatatgttaaaacaacatttaagtcaaaagctactacaaaagttaagtcctcagcagatacaatttataaaattgttgcagctcaatacactcaattttgaagagcgagtagaggaggaaatcctcgataatccagctctagaaagtggtaaagatgaggacgaagaatcgagttatgaggagtccgatgatttagatttcggctccaaggaggaagaatttgatgtctctgattatatgaatgacgacgatggaggaattcaaatgagcggggagtatcaaagtaccgatgaggaaaaagagtttatgccagtgatcaactacgcatcctttggcgaacggcttatggagcaagttacgggattgctcaaaaacgagacagaagaacagctcgtggagcaaattattgggacattagatgatgacggatacttacgaagacctctttccgcgattaaaaatgacctgctattcactcaaaatatacgcactaccgaagaggatttggaacgcatattgggctacatacacgagctagaccccgctggggttggtgctcgagatttgaaagagtgtctgttattgcaaataaaacgtaaacaagaggcaggggatactccagtttacaagttagcttatcgtatcttagatgagatgatggaggatttctccaagaaacactacccgcgtatcatcaaaaaattcgaaatatcagaagattacctgcgtgaaacattagctttcatcgctaagttgaatcctaagcctgcacaaagtggtgctgacggtgctactatgaaggattttattatccctgattttattgtaaaagaagagtatggtgagctgcaagtgtcgctcaatcagaagaatgctcctgagcttaaagtgagtagagcatatagcgaaacactcaaaagctacgangctagtaaagaaaaatcaaagtcccaaaaagatgcggtgcagtacatcaaacaaaaattggatggggccaagtggtttatagattctgtaaaacaacgccaaaatacacttttgcttaccatcagaaaaatagttgagatacaacacaactttttcataagtggcgacgagtctgatctcaagccgatgatactaaaggatatagccgaggagattaacatggatatatcgaccattagnagggtagctagtagtaagtatgtggagacggattttgggatattcttgctcaaagacttttttacagaaggtatcactatggaaagcggtgaagaggtgagtaatagagaggtgaaaaaaatcttaaaagaagcaatagacgcagaaaacaagcaaaaaccacttacagatgaggctttgaaaaacatcttacaggaaaaaggatataaaatagcccgccgtactattgctaagtatcgcgagcaactcaatctgccagtggctaggctccgtaaagaattatagatgaaaaaggtattacaagcactggctgtgcttacgcatcccatatttttaccgctttttagtttggtgatttatttgcctatcgtagctaaatacgcagagaatgcttttgtacttagtatggtatgggtaggttttgtttatctcatactgcccttagtctatttcaaatttgtacgcaaaatgaacttggcagaaccgagtttggaccaacgtagatcaatatatcgagcgtatacattggttaatgtaggctttgcactcgtaagtgtcttcattatgactgagtacattagtttctgtttggctgctgcattcttncacttatttatgttactcttagcttttttagaaatgaaagcaagttggcactcggcggtatggtcctttctcgtcgttgtaggtcttatggtacagtataactatacttttgtggggcaagggtctatgttgctactgcctatagtcatacttgttgcggtgctactcataaggcgattgtcaaaggctcatacgtggtttgaactcgggatgggagcagcggtgggagctattgctgcattccccgttttatttttttaaaaaattgattcatgaatttagaaacgataggatatacaaccaacaatgaaattgtaacgataaccctcaaaagacctgaacgttataatgcttttgatgagcaaatgcgtaaagaacttctgcaagcattgctagangcggagcgtgatgagcaatgtagagtggtagtgctcacaggagcaggtaaggctttttgctcaggacaagacttaaaagatatagaaggaaagaagattgatttttcagattttttaaaaaacggatataaccccattatcaaagcgatgcgagatatgtcaaagcctatcattgctcgggtaaatggggtggccgctggagcaggttgctccttggctctagcttgtgattatatcatagcagatgatagagcaagttttatagaagtatttgtgggtataggcttagttttagattctggttcgtcctacttcttgcctcgtatgataggcagtacgcgtgcttttgaactagccacgatgggtaataagttgagtgcttctaaagcggtagagtggggaatgataaataaagcggtagataccgaaaccttagataatgaggtgaataaggtagctgcgtattacgcatctgcacctacgctagcaatttcatccatgaaaaaaatgctcaatgcttctatgaccagtacgcttgatgagatgttggagatggaagctcattttcagcagatagcaggtagttctcaggactataaagaaggggttgtagcttttgtcgaaaagcgtaaacctaattttaaaggacattagcttcacctcaagaantaaggcgttctggtttggattccttattttcgaaggcttattgtcgntatgcgtaaaatcttaattgtaaccagcttatttatcctcctagttacaaag

SEQ ID NO: 294 - DNA, 4000 bp, Escherichia coli
  misc_feature (26)..(27): n is a, c, g, or t
  misc_feature (74)..(74): n is a, c, g, or t
  misc_feature (86)..(86): n is a, c, g, or t
  misc_feature (95)..(95): n is a, c, g, or t
  misc_feature (104)..(104): n is a, c, g, or t
  misc_feature (107)..(107): n is a, c, g, or t
  misc_feature (635)..(635): n is a, c, g, or t
  misc_feature (878)..(878): n is a, c, g, or t
  misc_feature (1307)..(1307): n is a, c, g, or t
  misc_feature (1925)..(1925): n is a, c, g, or t
  misc_feature (1988)..(1988): n is a, c, g, or t
  misc_feature (1990)..(1990): n is a, c, g, or t
  misc_feature (1995)..(1995): n is a, c, g, or t
  misc_feature (2023)..(2023): n is a, c, g, or t
  misc_feature (2051)..(2051): n is a, c, g, or t
  misc_feature (2053)..(2053): n is a, c, g, or t
  misc_feature (2152)..(2152): n is a, c, g, or t
  misc_feature (2253)..(2253): n is a, c, g, or t
  misc_feature (3055)..(3055): n is a, c, g, or t
  misc_feature (3301)..(3301): n is a, c, g, or t
  misc_feature (3319)..(3319): n is a, c, g, or t
  misc_feature (3397)..(3397): n is a, c, g, or t
  misc_feature (3457)..(3457): n is a, c, g, or t
  misc_feature (3544)..(3544): n is a, c, g, or t
  misc_feature (3556)..(3556): n is a, c, g, or t
  misc_feature (3559)..(3559): n is a, c, g, or t
  misc_feature (3787)..(3787): n is a, c, g, or t
  misc_feature (3795)..(3795): n is a, c, g, or t
  misc_feature (3826)..(3826): n is a, c, g, or t
  misc_feature (3843)..(3843): n is a, c, g, or t
  misc_feature (3850)..(3850): n is a, c, g, or t
  misc_feature (3918)..(3918): n is a, c, g, or t
  misc_feature (3993)..(3993): n is a, c, g, or t
  misc_feature (3998)..(3998): n is a, c, g, or t
cagcatgagtaatttcattactattnncaaggttttcactttcctctaaacgactaattacctcatgacctttntcctgaagagcncgcctaagnattgctgancgncccatattttcatcgactagaataattttaagggcagtctgattcattgtattttttttcataattctaagtttttataaccatcaataatatacctcattagcacaaaggttataaatggattaaagttttattattaggccctccactgcagaatatattctttagtggaggattttaagtttgagtttatatattaaaaatagttacttaacgacaaactctgggtatgcctcgagtccacattctgagatatccactccatcttcctcttcttccttggatacgcgaataccaattaatgctttaagagccagccaaagtaagaatgatgtcacaaaaacccaaataaatattgttgtagcaccaataatttgacctgaaaatggaacttcactatttgttaagggcactgctaaaagaccccaaagaccaacaacaccatgaactgaaattgcaccaactggatcatcgatcttgagtttacgatcaagcattacaattgaaatcactacaatcacaccaccnactgctccgattaaacttgcaactagagcacttggcgtatctggtccagcagtaatggcaactagacctgctagagctccattaagtgtcatcgttaaatctgctttaccaaaccatagtttcgcaaatataagtgctgcaataacacctcctgcagccgctgcattggtattaacaaaaaccattgccactgcatctgcactctccttacttgccattgctaacactgatccaccattaaanccaaaccatcctagccataagataaaagtacctaaagtcgccaaagggagatttgcacctagaattggctttgaattcccatccttatcatatttaccctttcttggaccaagaactattacgccagcaattgctgctgctgctccagccatatgcacaatgcctgatcctgcaaagtcatagaagccaaaatcacctaaattatatagaccaaaaacatcctttccaccccaagtccatgagccttccaatgggtaaatgatagtagtaaaaattattgcaaaagcaaaaaatgtaaatagcttcattctttctgctaccgcacccgaaacgattgacatcgctgtcgctacaaagactacctgaaagtaaaagtcagatgcatttgagtatgtttcgccttgtccactaattccagaaagaaaagcnccgccaccatacattaagtcatagccatagaccatatacatagtacatgcaattgcaaaaagaccaatatttttagttaatatttctgcggtatttttactcctcacaagaccagcttctagcattgaaaagccagctgccatccacatgacaagggcgcccattactaggaagtaaaaggtatcaattgcatattgtaattctaatatttgattttccattttcctctcctatagtgcttctggaccagactcattcgtacgaatacgaacgacctgttccagatttgtaacaaaaatctttccatcaccaattttgccgccgttaatcttacaagcagtgctaatggtctcaatgacctcctcaacctgctcatcagtaattgcaatctctaactttacttttggaagaaactcaaccacatactcagcaccgcgataaagttctgtatggcctttttgccttccaaaacccttaacttcggttactgaaaccccatttatatctatatctgagagaacttgtctcacactatccagtctttttggctgaatataagctgtaatcattttcatatcattgctccaatgtcaaaaacaaaaaagcccactaccttcnagaaagtagtgggcttctataccatttcagctcatctttaaactgacgaaaaaaaacgcttancnaggcnagtgcccaaataaacgtctatgtctttncttgataccaacattggcttcaagttgnantaattatatagaaaatatttttatatatttagtttttttagatattcagattctgaaaggatttcaacaccattatttttggccttattcatttttgantgacccacattttctccaataatgagaaaatcagtttttgagctgacagattttgatactttaatgcctaatgactttgcttgtttctcaagatcagatcnaggctgattcatagtgcctgtaaacacaatttttttgctataaaacggatttgagcttgtatcttcatcagcaatcaaaatggttttttctagatcaaaaccgccagatactaatacttcatattgggatttaatagacaacaacccatcaaaaataacctctgcagttagctctgcaaaaccatctatctctgcaatgctagctattgaaaggctaaagacttcatcaattgaataattttttaataaattttcacaattacccattccaagtctatgaacaccaaaagcggccaagaaacgccaatcttcaatactttcttgacgtgatctttgaagttgattaataaggttttgagaggttttttcaccaaaacccatagaaactaattcatctatattaagaagataaatatcacttacttggcgtattccttcatcatataatttttgaatcgttgcatgtccgaatccatcattgttgcccaagattcgaaaaaaatagatcatcttgccaaccacctgatctgggcaatcattttcattggaacacatcaaaaaatctgagtcccatattaatagagaattgcagctcggacagttcaaaggtatatcaacttctgcagttttaagaaccttatttattttaggaatgaccatcccacttcgagttaactcaataatacttccagcgcctagaccttgttctttgacaagcccgtagtgatgaccagttgccctataaatagtcgcgccgcttaattgagttggctccaactctgcaacaggggttatctttccngtccttcctacttgagccgtcactgaaataactttaacttgtgctttttccttattttctttgtaagcaatctgccagcgatggaacttacgatttgaacccataaattcttttaattcaggattgacaatttcaaagactaccccatcaatatcaaaatcaacaccctcctcaagcttaattactatatctaagaattgatttttgaactcatcaatattccccttccaaaatggaagttgcttnaaaggaacaaataaagcngcctttgcatcaattgcatctctagcaaacttatctaattctttttccttaatgagacttgcttgaaaatttcttggntactcaaaatcattacttaaatggtcttcaaagtaactcctcttaacaacaatctctccngggccttggcctctttcactatcatttaaaataccaagacctctttgaaacactctgctaatatcacttcccttattaccatcaccncgagtgtaaagnttntttccatcgtcataaccggcaaatccgtctaattttgcagtccctttaatttgaatttcagatagttgaacatttatttcttcagaaaattttgatattctttcaagccacttctcgatctctccccaagtataagccttgtcagttgagagcattttttctgggagcttaattttttcatctgaaaatccttcactttcagattcaaccttttgaagaaagggatgnttgggcantcttttttgaagctcaggaataaagatgaantcgtaattttcatcggnaactatngggcttccgcttcgataactatcattagctagaacacaaaactcaagtaaatctgaatcagaaaggtnatttgccaatgtagtttcattagcaatgttttgaatctgtttttttgtcagcatgatttactaaaatctagcttnatttnaa

SEQ ID NO: 295 - DNA, 4000 bp, Escherichia coli
  misc_feature (140)..(140): n is a, c, g, or t
  misc_feature (172)..(172): n is a, c, g, or t
  misc_feature (254)..(254): n is a, c, g, or t
  misc_feature (314)..(314): n is a, c, g, or t
  misc_feature (335)..(335): n is a, c, g, or t
  misc_feature (344)..(344): n is a, c, g, or t
  misc_feature (550)..(550): n is a, c, g, or t
  misc_feature (1403)..(1403): n is a, c, g, or t
  misc_feature (1424)..(1424): n is a, c, g, or t
  misc_feature (1991)..(1991): n is a, c, g, or t
  misc_feature (1994)..(1994): n is a, c, g, or t
  misc_feature (3660)..(3660): n is a, c, g, or t
  misc_feature (3725)..(3725): n is a, c, g, or t
  misc_feature (3845)..(3845): n is a, c, g, or t
cctcctcgctctccacgaacagccccaggccgctgaacgcgagcttggccgtgcccgcgatgtggtcggtgtcggcgttgaaggactgcttgacgaagcgcagcgccgtgggcgagagggcgaggatctcgtcggcccancggcggacctcggcgcgcagctcgtccggcgncacgacctggttgacgaggccccagcgctcggccgtggcggcgtcgtactggcggcacagcatccagacctcgcgggcgcgnttctcgccgatggcccgggccaggtaggcggtgccgaagccggcgtcgaacgagcccacncgcgggccggtctggccaaancgcgcagtntcggccgcgatggagagatcacagagcacgtggagcacgtggccgccgccgatggcgtagccgttgaccgccgcgatgacgggcttggggatgtcgcggatgagcgtgtgcaggcgctcgacctcgaacagccccgacgccgacgggccgtagtcgccggtctcggctcgctgcttctggtcgccgccggtgcagaaggcacggtngccggcgccggtcaggcagacgacgccgacgtcggagctcgcccacgcgcgcgtgaagcaggcgatgagctcgtccacggtgtgggcgcggaacgcgttcagccgctcgggccggtcgatcgtgatccaggccagcccgccctccacctcgtagcggacgtcggtcagctcctccatcgggcgctctccttcggtcgggtccacgtacgctagggccgcgatggccgagggcgagcgggtggcgctggtgaccgggggcggcggcgggatcggccgggcgatcgcgctggcgctcgcggccgctgcgcgagcggtcgcggtggccgacgtgcggatcgagggcgcggagcaaacggccgcggccgtggcggcacagggcgggcgcgcgctggcggtggaggtcgacgtcaccgacaccgggtcggtcgccgcgggcctcgcaggcgctgcggatgccctcggcccggtcgacgtcgtggtcaacaacgcgggctgggacgagttgcgcccgttcctcgacaccgacgaggcgttctgggagcgcatcgtcgccatcaacttcctcggcgctgtgcgggtgacccacgcggtcctgccggggatggtcgagcgggggttcggccgggtggtgaacatcggctcggacgcggggcgcgtcggctcgtcgggcgaggcggtctactcgggtgcgaagggcggcgtgatcgccttcacgaagaccgtggcacgcgaggtcgcgcgctcgggcgtgaccgcgaacaccgtgtgcccggggccgacgcgcacgccgatgctcgaggccatggcggccgaggacgcggccggcagcaagctcgtcgacgcgctgacgcgngcggtgccgatgcgccggctnggcgagcccgaggacgtcgccgccgcggtcgccttcttcgcctccgacgccgccggctacgtgaccggtcagacgctgtcggtcagcggcggcctcacgatggcctgagccgcgggcgacctagactggaggaagcccacccgcccccatggtgtagcggttagcacgcgggcctttcacgcccgtagcgggggttcgattccccctgggggtactgctcaggcggcggccagaaaggcgttgatctgcctggtgcaacgccatcggcgcgatcaccgccggggcctcggtagcctcgaacgcggtgcggcgacgagcgctttggatcctggtgggcgcggtggtgctgaccgcggtgggcgccgcggtcgtgtacgccgccacccggcccgaccgcaacgacggaacggtcacggtcaaccggctgcaggacgtgcagcgccgcgccgaggcgacccggatcgcgcaccggcgctggttcgcggcccgcaaggccgacctcttgcgccagatccacgccgccaaggcgcgcaacgaggccgcggcggccccgccgcagcccgcagngancggcagcgtgcccgagccgcagatcgtgcgccgcttcatccccttcggggccaagcgcaaggccgagacccgcgcctacgcccaccgccactacggcatctcgaccgacaagctcgtcgaccccaaggtcatcgtcgagcactacaccgagagcgccgacgcccagtcggccatcaacacgttcgcgacggaccagcccgactccgagctgcacgagctgccccagacctgcgcccacttcgtcatcgacagcgacggcaccatctaccagctcgtctcgctcaccgagatctgccgccacacggtcgggctcaactacaccgcgttcgggatcgagatggccggcttctccgaccagcagatcctcgaccgcaagccggaactcgatgcggccctgacgctcacccgttggctgcgctgccgcttcggcatcgacgtgcacaacgtcatcggccacaacgagagcctgagctcgccctaccaccgcgagcgcgtcgccagcctgcgcacgcagacgcacgacgactggaagcacgccgacatgaacgtgttccggcgcaagctcgccgccctcggcggctgctgacactcatacccacgtctttcgcaggcgcagttagtgtcgcgccatgcgaggtcgagcggcccttgcggccgtcgtgttgtgcggtggcgtcggtgtaggggtcgcggccggctgcggtagcagctcgagcgaccagcacgacgcctctgtggccagccaagccgtgcagcaggcgttggccaagcagcgccagcagcaggaggacgcggcgcagaaggccaagctgcgcaagctgcagcgcaagctcgcgcacgagaagggacaggacgcgcagaaggcggccagcgcggccgccgggggaagcggcggctcgggcggctcgggctcccagcagggcggcggcccgcacgactgcggctcgggcgtgaccgccaacaacggcggcacgacctgctcgttcgcgctcaacgtcgccgagcagtaccgcgccagcggcggcgccagcgcgatccaggtctacagccccgtgaccaagcagacctacacgatgtcctgcgtcggcgcctcgaccaccacctgcaccggcggcaacaacgcgtcggtgaccttcagctgacccgcgccctcgtcgcgctcgcggccgcggcgttggtcgcggcgggctgcggcggccagcacgagcagaagcgttcgacgccgggcagcagctggccagcacagtggcgcgctggctggccgaccacgccagtgcggtgacgggctcgggctcgccctgctgagcggtaccgatgagatttccgccgcagggcggtctcaaagccatgagcacaaatctgccccgcatcgcctcccacgaggagtggctggctgcccgcaaggagctgctggccaaggagaaggagctgacccgcgcccgcgacgcgctcagcgcgcagcggcgccgcctgcccatggtcgagatgaccaagccctacatcttcgagggacccgacgggacggtgggcctggccgacctgttcgagggccgcagtcagctcatcgtcggccatttcatgttcgaccccgattgggtcgacggctgcccgagctgcagcgccggcgctgaggagatgtcggccgggcacatcgcgcacctcaacncgcgcgacaccacgatggcctacgtctcgcgcgcgccgctcgagcgcatcgaggactacaagcgncgccggggctggaccttcccctggtactcgtcccacggcagcgacttcaactacgacttcgcggtcacgctcgacccggcgcacgcgccgcccgagtacaacttccgccccttcgcagtngaggagtcgaccgagatgcccggcctgagctgcttcctgcgcgacggcgaccgcgtcttccacacctactcgatgtacgcccgcggggccgagcagatcggcggctcgtactacctcctcgatctgaccgccctcggccgccaggaggactggga

SEQ ID NO: 296 - DNA, 4000 bp, Escherichia coli
actgaacagcaggtacagcgtgccgatgtccttgtggttggtggcaaaaacccagcgacgccagccatgggggtgatcgtgcgcatgatcgtcatggcccgcgtggccgtagtggtcgagtactgcactcatgagttttccttcaagacttgatgctggaattacttgcgggcggttttgatgtcagcgggctgcaccacctggcccgtctggttggcccaggcgttcttggtgtaggtgaccaccgctgcaatttccgtgtctgaaagctgcttccatgctggcatggaaccaccaccggcgccgttgagcaacacgctgatctgctgggagttgtcgtcagccaatacgatcttcgagcccaccagacccttgatggggccggcaccagcgccgtcagccttgtggcaggccgcgcaattggcgttgtagaccttttcgccgcgggccacgagttcggccagcttccattccttgttggggtcgtcagccttggctgcggccttcttcttttcgccatccacccacttgctgtagtcctcttgagagaccaccttcacatgaatgggcatgtaggcgtgttccttgccgcacagctcctgacactggccgtagtagtcgccgatcttttcagcgcggaaccaggtgtcgcgcacgaagccggggatggcatcttgttttacagcgaaggccggtacggcccaggcgtggatcacatcgttggcggtggtgatgatgcggatcttcttgtccaccggcaccaccacggcgttgtccaccttgagaagatagttatcgatggcctcgggcttgccgctgtcgctcatcatgcggtgcttggcgtctaaagtggccaggaagctgatgccttcaccctcgcccttgaggtagtcgtagccccacttccactggtaacccgtggccttgatggtgatgtcagcgttggtggtgtccttcatggccacgaccgatcgggtggccatggcgcccatgccaatcacgatgatgaagggaatgacggtccaggcgatctccaccgccacgctttcgtggaactgagcgggcttatggcccagcgacttgcgatgcttgaagatggaataaaacatcacaccgaagaccgccacgaagatcaccaggcagatcaccaacatggcgatgtgcaggctggagacatccgcggcaatgcgggttaccgccgggtgcaggttcagttggttgacggctgggccgcccggcaggtcgttcaccgtggatgccacggcagcggacatgcccgacagggcggccagtgcgagcgcggcacgacgtgcctgcgcagcaaaaaggtgatccatcttcatcatcgtcacttcagttcaaaccctcgccagaggccgcggttgcggtgtgcacgcgcagcgcctgacgcaattcccgcgccagcatctggcgccactcgggccgcagatagcgacccacgaatgtcttgcggcccgcgccagacaactccaacagcgagccctgaccttgtgccggctccacccgcagccaatcggcgcggaactcggagcgctccacccggttgccgcagtgatgttccaccgctaccgtcgagttcttcaacgtgatggtttcatggtcggccgcatggcgcgcgtacaccagcagcgccgcgcccaagagcagcaactccaggcccgcgaagtacagcactggcacggcgccgaaccaggcaaaaacgcaggcgatcgaaagcgacaccaggcataacgcgaaatatgccgccagcacctgacgcggagccaacgagcaattgcggcgcatcacccagcgcagcccgccgcccggactgtcgtccagcggggaggccctccagggggatccgagggccaagaagcccggcaggttcagagatgcggatgtcggtgtcatgtcgtactgcagaccgctcagcgatgtccgcgtcaagcacccttgcggatgcacacacagacccgctcggctctctagagtgtactccagtaaccgggagaaccctaataccctattgccaacctagagagggcggcgctgcgttctcaccatgtggcgcatatcgtccagcgacaccgtggtggtggcctgcatgcggctgcgcggtaccggcctgaaggcatgaccgtagatgatttcaaagctcagggccagccgcccatcggggcctgctgccgcgtgcagggccgcctccaggcgggcgcgccaacggggggtacggcagccggcgtggcggccgggatgggcgttacgacccatggtgcgcaactcggctagggctgcatcggcgctggcccaggtcagggtgaccgtttcctggtccatcacggggtcggcaaagccggcggctaccaggtcgtcaccccagtcgtgcatgtcgcgaaaaggctgtgccggcggaccccagccctcctgatcccacaggctgcgccactggcgcagggtgtcggggccgaaggtgctgaacatcaagaagccgttggccgccagcgctgcatgccagcgctgcaacacctcggccggatgtgcgtgggtgtgcaagccgaggttggaccacaacagctggccgtggccagccggcacctcggtgtccaagaaacccccaagcagcgcagccgtttcagacgacatgcccgccccggatggtgccgcaagccgtgcgagttgccgcccaatcggattaaaggtccgctgcgccagatccctcaggcccgccaacagcccggccttggccgtggcctgtgggccagactgtgggagcacgccggtgcaaccgcaggctctcgccaaggcggcgcggttcggtgccaccggcacccatcgggcgtgcgggtacgcggcttgtaatgcggcacgcgactgcccagccggggtatcccactccagcaccacctcgggctgcacccggatcaccgacagccgctcggccatgcgccgggcgacctcttggtgcagccaaggcagcgacgcccccgcggcccatcgctgccgggctcggccccacgcggctgcgtggacgggcagtgccggtgttggcgcctcgttcgtgctggcagccgcggctgtagaccctgcccccaaggggtgtggcaggggggagtcggggctgggagccatggatcggtcagtatattgagccgatgtcaacactcgaagctgaagggctggtgcgtgctgttggccaaggctgggcccggctcagagctggcccctggcccctgccccaacgatgcctgctgtgcagtgactgggcccatcaagccctgtgcgcgccgtgtctgggcctgtatgcaggccaacaggccgtgcacagccggccgcgctgcccggcgtgtggcctgcggctggccaccggcctgctgcgttgtgcaagctgcgagcgagcgtccacgtcccacggcatggtgcgggtggcggtggactatgcccacccttgggaccgtgtgctgatgcagttcaagttcggctcgcgccctgacttcgcagcggccatggccctggtgatgagctgtcacatcaaggctcagcacggtgctgctgcgctcgggcccacgcgcctggtgccagtgcccttgtcccgtgagcgcctcgcgcaacgcggctataaccaggcctgggaattggctcggcggctggcgcggcaggtggggctgcaagccagggccgatgccttgatgcgttgcgttcatctgcccgggcaagccgagcagggccgcgccgcccgcctcaagcggctgcagggggtgttccagctcagccctgccggccgggcctgggtggcgggccagcgcgtggccctggtcgacgatgtgtacaccaccggcgccacggccaccgaagcggcgcgcaccctgctggctgcgggtgcgctgcaggtgcaggtatgggcctttgcccgcaccccagcgcccgaggaggggccctcctagggcgggcttgcaccacaatccgcggccatgttcaacatcgttctggtgcaccccga

SEQ ID NO: 297 - DNA, 4000 bp, Escherichia coli
  misc_feature (2)..(2): n is a, c, g, or t
  misc_feature (4)..(7): n is a, c, g, or t
  misc_feature (9)..(9): n is a, c, g, or t
  misc_feature (12)..(12): n is a, c, g, or t
  misc_feature (14)..(20): n is a, c, g, or t
  misc_feature (23)..(34): n is a, c, g, or t
  misc_feature (37)..(39): n is a, c, g, or t
  misc_feature (41)..(41): n is a, c, g, or t
  misc_feature (44)..(48): n is a, c, g, or t
  misc_feature (52)..(52): n is a, c, g, or t
  misc_feature (55)..(57): n is a, c, g, or t
  misc_feature (62)..(64): n is a, c, g, or t
  misc_feature (66)..(67): n is a, c, g, or t
  misc_feature (69)..(69): n is a, c, g, or t
  misc_feature (72)..(72): n is a, c, g, or t
  misc_feature (75)..(76): n is a, c, g, or t
  misc_feature (78)..(78): n is a, c, g, or t
  misc_feature (86)..(88): n is a, c, g, or t
  misc_feature (90)..(92): n is a, c, g, or t
  misc_feature (95)..(95): n is a, c, g, or t
  misc_feature (97)..(103): n is a, c, g, or t
  misc_feature (107)..(109): n is a, c, g, or t
  misc_feature (111)..(113): n is a, c, g, or t
  misc_feature (115)..(115): n is a, c, g, or t
  misc_feature (119)..(119): n is a, c, g, or t
  misc_feature (122)..(123): n is a, c, g, or t
  misc_feature (125)..(128): n is a, c, g, or t
  misc_feature (131)..(132): n is a, c, g, or t
  misc_feature (134)..(136): n is a, c, g, or t
  misc_feature (140)..(140): n is a, c, g, or t
  misc_feature (142)..(145): n is a, c, g, or t
  misc_feature (147)..(147): n is a, c, g, or t
  misc_feature (149)..(150): n is a, c, g, or t
  misc_feature (152)..(154): n is a, c, g, or t
  misc_feature (156)..(157): n is a, c, g, or t
  misc_feature (159)..(159): n is a, c, g, or t
  misc_feature (163)..(163): n is a, c, g, or t
  misc_feature (167)..(167): n is a, c, g, or t
  misc_feature (169)..(171): n is a, c, g, or t
  misc_feature (173)..(173): n is a, c, g, or t
  misc_feature (175)..(176): n is a, c, g, or t
  misc_feature (178)..(178): n is a, c, g, or t
  misc_feature (180)..(180): n is a, c, g, or t
  misc_feature (182)..(183): n is a, c, g, or t
  misc_feature (185)..(186): n is a, c, g, or t
  misc_feature (189)..(189): n is a, c, g, or t
  misc_feature (191)..(192): n is a, c, g, or t
  misc_feature (194)..(194): n is a, c, g, or t
  misc_feature (197)..(200): n is a, c, g, or t
  misc_feature (204)..(204): n is a, c, g, or t
  misc_feature (207)..(207): n is a, c, g, or t
  misc_feature (210)..(210): n is a, c, g, or t
  misc_feature (212)..(213): n is a, c, g, or t
  misc_feature (215)..(219): n is a, c, g, or t
  misc_feature (222)..(224): n is a, c, g, or t
  misc_feature (228)..(230): n is a, c, g, or t
  misc_feature (236)..(237): n is a, c, g, or t
  misc_feature (239)..(249): n is a, c, g, or t
  misc_feature (252)..(252): n is a, c, g, or t
  misc_feature (255)..(255): n is a, c, g, or t
  misc_feature (257)..(257): n is a, c, g, or t
  misc_feature (259)..(266): n is a, c, g, or t
  misc_feature (268)..(269): n is a, c, g, or t
  misc_feature (272)..(273): n is a, c, g, or t
  misc_feature (275)..(275): n is a, c, g, or t
  misc_feature (277)..(278): n is a, c, g, or t
  misc_feature (280)..(281): n is a, c, g, or t
  misc_feature (284)..(290): n is a, c, g, or t
  misc_feature (293)..(293): n is a, c, g, or t
  misc_feature (296)..(297): n is a, c, g, or t
  misc_feature (299)..(300): n is a, c, g, or t
  misc_feature (303)..(303): n is a, c, g, or t
  misc_feature (305)..(312): n is a, c, g, or t
  misc_feature (314)..(315): n is a, c, g, or t
  misc_feature (317)..(317): n is a, c, g, or t
  misc_feature (319)..(323): n is a, c, g, or t
  misc_feature (325)..(326): n is a, c, g, or t
  misc_feature (328)..(337): n is a, c, g, or t
  misc_feature (339)..(339): n is a, c, g, or t
  misc_feature (341)..(341): n is a, c, g, or t
  misc_feature (343)..(344): n is a, c, g, or t
  misc_feature (348)..(349): n is a, c, g, or t
  misc_feature (351)..(351): n is a, c, g, or t
  misc_feature (355)..(358): n is a, c, g, or t
  misc_feature (360)..(370): n is a, c, g, or t
  misc_feature (373)..(375): n is a, c, g, or t
  misc_feature (377)..(377): n is a, c, g, or t
  misc_feature (380)..(382): n is a, c, g, or t
  misc_feature (384)..(388): n is a, c, g, or t
  misc_feature (391)..(391): n is a, c, g, or t
  misc_feature (393)..(393): n is a, c, g, or t
  misc_feature (395)..(395): n is a, c, g, or t
  misc_feature (398)..(403): n is a, c, g, or t
  misc_feature (405)..(405): n is a, c, g, or t
  misc_feature (407)..(407): n is a, c, g, or t
  misc_feature (409)..(410): n is a, c, g, or t
  misc_feature (412)..(417): n is a, c, g, or t
  misc_feature (422)..(422): n is a, c, g, or t
  misc_feature (424)..(425): n is a, c, g, or t
  misc_feature (427)..(430): n is a, c, g, or t
  misc_feature (433)..(435): n is a, c, g, or t
  misc_feature (437)..(437): n is a, c, g, or t
  misc_feature (439)..(439): n is a, c, g, or t
  misc_feature (443)..(443): n is a, c, g, or t
  misc_feature (445)..(446): n is a, c, g, or t
  misc_feature (448)..(451): n is a, c, g, or t
  misc_feature (453)..(453): n is a, c, g, or t
  misc_feature (455)..(456): n is a, c, g, or t
  misc_feature (460)..(469): n is a, c, g, or t
  misc_feature (471)..(471): n is a, c, g, or t
  misc_feature (474)..(478): n is a, c, g, or t
  misc_feature (480)..(483): n is a, c, g, or t
  misc_feature (487)..(491): n is a, c, g, or t
  misc_feature (493)..(494): n is a, c, g, or t
  misc_feature (496)..(497): n is a, c, g, or t
  misc_feature (500)..(504): n is a, c, g, or t
  misc_feature (506)..(507): n is a, c, g, or t
  misc_feature (509)..(510): n is a, c, g, or t
  misc_feature (512)..(515): n is a, c, g, or t
  misc_feature (517)..(517): n is a, c, g, or t
  misc_feature (519)..(522): n is a, c, g, or t
  misc_feature (524)..(536): n is a, c, g, or t
  misc_feature (538)..(541): n is a, c, g, or t
  misc_feature (543)..(545): n is a, c, g, or t
  misc_feature (548)..(548): n is a, c, g, or t
  misc_feature (553)..(554): n is a, c, g, or t
  misc_feature (556)..(562): n is a, c, g, or t
  misc_feature (565)..(565): n is a, c, g, or t
  misc_feature (567)..(575): n is a, c, g, or t
  misc_feature (577)..(581): n is a, c, g, or t
  misc_feature (583)..(583): n is a, c, g, or t
  misc_feature (585)..(586): n is a, c, g, or t
  misc_feature (589)..(591): n is a, c, g, or t
  misc_feature (593)..(593): n is a, c, g, or t
  misc_feature (596)..(598): n is a, c, g, or t
  misc_feature (600)..(600): n is a, c, g, or t
  misc_feature (602)..(606): n is a, c, g, or t
  misc_feature (612)..(614): n is a, c, g, or t
  misc_feature (616)..(618): n is a, c, g, or t
  misc_feature (620)..(620): n is a, c, g, or t
  misc_feature (625)..(630): n is a, c, g, or t
  misc_feature (634)..(635): n is a, c, g, or t
  misc_feature (637)..(637): n is a, c, g, or t
  misc_feature (640)..(641): n is a, c, g, or t
  misc_feature (643)..(644): n is a, c, g, or t
  misc_feature (646)..(646): n is a, c, g, or t
  misc_feature (650)..(651): n is a, c, g, or t
  misc_feature (654)..(656): n is a, c, g, or t
  misc_feature (661)..(662): n is a, c, g, or t
  misc_feature (666)..(666): n is a, c, g, or t
  misc_feature (669)..(669): n is a, c, g, or t
  misc_feature (671)..(671): n is a, c, g, or t
  misc_feature (674)..(675): n is a, c, g, or t
  misc_feature (677)..(682): n is a, c, g, or t
  misc_feature (686)..(686): n is a, c, g, or t
  misc_feature (691)..(692): n is a, c, g, or t
  misc_feature (695)..(696): n is a, c, g, or t
  misc_feature (698)..(704): n is a, c, g, or t
  misc_feature (706)..(709): n is a, c, g, or t
  misc_feature (711)..(711): n is a, c, g, or t
  misc_feature (715)..(718): n is a, c, g, or t
  misc_feature (720)..(721): n is a, c, g, or t
  misc_feature (723)..(724): n is a, c, g, or t
  misc_feature (726)..(726): n is a, c, g, or t
  misc_feature (731)..(731): n is a, c, g, or t
  misc_feature (733)..(733): n is a, c, g, or t
  misc_feature (744)..(745): n is a, c, g, or t
  misc_feature (747)..(747): n is a, c, g, or t
  misc_feature (749)..(753): n is a, c, g, or t
  misc_feature (755)..(755): n is a, c, g, or t
  misc_feature (758)..(758): n is a, c, g, or t
  misc_feature (761)..(761): n is a, c, g, or t
  misc_feature (763)..(764): n is a, c, g, or t
  misc_feature (766)..(776): n is a, c, g, or t
  misc_feature (778)..(779): n is a, c, g, or t
  misc_feature (781)..(782): n is a, c, g, or t
  misc_feature (790)..(791): n is a, c, g, or t
  misc_feature (794)..(794): n is a, c, g, or t
  misc_feature (796)..(797): n is a, c, g, or t
  misc_feature (799)..(801): n is a, c, g, or t
  misc_feature (803)..(814): n is a, c, g, or t
  misc_feature (817)..(822): n is a, c, g, or t
  misc_feature (825)..(826): n is a, c, g, or t
  misc_feature (828)..(835): n is a, c, g, or t
  misc_feature (838)..(838): n is a, c, g, or t
  misc_feature (841)..(844): n is a, c, g, or t
  misc_feature (848)..(851): n is a, c, g, or t
  misc_feature (853)..(853): n is a, c, g, or t
  misc_feature (856)..(858): n is a, c, g, or t
  misc_feature (860)..(861): n is a, c, g, or t
  misc_feature (863)..(866): n is a, c, g, or t
  misc_feature (870)..(874): n is a, c, g, or t
  misc_feature (876)..(877): n is a, c, g, or t
  misc_feature (879)..(879): n is a, c, g, or t
  misc_feature (881)..(881): n is a, c, g, or t
  misc_feature (884)..(889): n is a, c, g, or t
  misc_feature (892)..(892): n is a, c, g, or t
  misc_feature (895)..(895): n is a, c, g, or t
  misc_feature (899)..(899): n is a, c, g, or t
  misc_feature (904)..(908): n is a, c, g, or t
  misc_feature (911)..(911): n is a, c, g, or t
  misc_feature (913)..(918): n is a, c, g, or t
  misc_feature (921)..(926): n is a, c, g, or t
  misc_feature (928)..(928): n is a, c, g, or t
  misc_feature (930)..(932): n is a, c, g, or t
  misc_feature (935)..(939): n is a, c, g, or t
  misc_feature (941)..(941): n is a, c, g, or t
  misc_feature (943)..(944): n is a, c, g, or t
  misc_feature (946)..(946): n is a, c, g, or t
  misc_feature (948)..(948): n is a, c, g, or t
  misc_feature (950)..(950): n is a, c, g, or t
  misc_feature (952)..(952): n is a, c, g, or t
  misc_feature (954)..(957): n is a, c, g, or t
  misc_feature (960)..(960): n is a, c, g, or t
  misc_feature (962)..(964): n is a, c, g, or t
  misc_feature (966)..(967): n is a, c, g, or t
  misc_feature (972)..(973): n is a, c, g, or t
  misc_feature (975)..(978): n is a, c, g, or t
  misc_feature (980)..(983): n is a, c, g, or t
  misc_feature (985)..(985): n is a, c, g, or t
  misc_feature (987)..(988): n is a, c, g, or t
  misc_feature (991)..(1000): n is a, c, g, or t
  misc_feature (1002)..(1005): n is a, c, g, or t
  misc_feature (1008)..(1014): n is a, c, g, or t
  misc_feature (1016)..(1016): n is a, c, g, or t
  misc_feature (1018)..(1018): n is a, c, g, or t
  misc_feature (1020)..(1020): n is a, c, g, or t
  misc_feature (1025)..(1027): n is a, c, g, or t
  misc_feature (1031)..(1033): n is a, c, g, or t
  misc_feature (1035)..(1043): n is a, c, g, or t
  misc_feature (1046)..(1048): n is a, c, g, or t
  misc_feature (1051)..(1051): n is a, c, g, or t
  misc_feature (1053)..(1056): n is a, c, g, or t
  misc_feature (1058)..(1058): n is a, c, g, or t
  misc_feature (1061)..(1062): n is a, c, g, or t
  misc_feature (1064)..(1066): n is a, c, g, or t
  misc_feature (1068)..(1068): n is a, c, g, or t
  misc_feature (1070)..(1071): n is a, c, g, or t
  misc_feature (1075)..(1080): n is a, c, g, or t
  misc_feature (1083)..(1085): n is a, c, g, or t
  misc_feature (1088)..(1090): n is a, c, g, or t
  misc_feature (1093)..(1093): n is a, c, g, or t
  misc_feature (1097)..(1097): n is a, c, g, or t
  misc_feature (1099)..(1099): n is a, c, g, or t
  misc_feature (1102)..(1103): n is a, c, g, or t
  misc_feature (1105)..(1105): n is a, c, g, or t
  misc_feature (1108)..(1108): n is a, c, g, or t
  misc_feature (1111)..(1113): n is a, c, g, or t
  misc_feature (1117)..(1120): n is a, c, g, or t
  misc_feature (1122)..(1122): n is a, c, g, or t
  misc_feature (1125)..(1125): n is a, c, g, or t
  misc_feature (1127)..(1127): n is a, c, g, or t
  misc_feature (1132)..(1132): n is a, c, g, or t
  misc_feature (1137)..(1137): n is a, c, g, or t
  misc_feature (1139)..(1139): n is a, c, g, or t
  misc_feature (1141)..(1141): n is a, c, g, or t
  misc_feature (1144)..(1144): n is a, c, g, or t
  misc_feature (1149)..(1150): n is a, c, g, or t
  misc_feature (1153)..(1154): n is a, c, g, or t
  misc_feature (1156)..(1156): n is a, c, g, or t
  misc_feature (1159)..(1159): n is a, c, g, or t
  misc_feature (1161)..(1164): n is a, c, g, or t
  misc_feature (1167)..(1169): n is a, c, g, or t
  misc_feature (1173)..(1173): n is a, c, g, or t
  misc_feature (1175)..(1177): n is a, c, g, or t
  misc_feature (1179)..(1179): n is a, c, g, or t
  misc_feature (1181)..(1181): n is a, c, g, or t
  misc_feature (1183)..(1183): n is a, c, g, or t
  misc_feature (1187)..(1187): n is a, c, g, or t
  misc_feature (1189)..(1189): n is a, c, g, or t
  misc_feature (1191)..(1193): n is a, c, g, or t
  misc_feature (1201)..(1201): n is a, c, g, or t
  misc_feature (1206)..(1207): n is a, c, g, or t
  misc_feature (1210)..(1210): n is a, c, g, or t
  misc_feature (1212)..(1214): n is a, c, g, or t
  misc_feature (1244)..(1244): n is a, c, g, or t
  misc_feature (1455)..(1455): n is a, c, g, or t
  misc_feature (1989)..(1989): n is a, c, g, or t
  misc_feature (1993)..(1993): n is a, c, g, or t
cngnnnntnggncnnnnnnntgnnnnnnnnnnnnagnnntncgnnnnntgcnaannngaatnnnanngnganccnnantttgcccnnnannntgncnnnnnnnatgnnnannncnatgnccnncnnnnttnncnnncggntnnnnangnntnnnannangggntttngnnngntnngntntnngnnggngnntnggnnnncgcnaangancnngnnnnngannnggannncaaaanngnnnnnnnnnnnccngangntnnnnnnnntnntgnngntnntnntgnnnnnnntgnttnnanntcngnnnnnnnntnngncnnnnngnngnnnnnnnnnncntngnnttcnncntttnnnncnnnnnnnnnnncannnanggnnncnnnnnaantnanggnnnnnngnangnncnnnnnnttggncnngnnnntgnnnangntggngnncnnnntngnnaccnnnnnnnnnncnggnnnnncnnnncccnnnnnannannccnnnnntnnanngnnnncnannnngnnnnnnnnnnnnngnnnntnnnttnggggnngnnnnnnnggnannnnnnnnngnnnnngncnncgnnnanttnnncnannnnnttgtcnnncnnntnggggnnnnnntcgnngnganngnngntgannacnnnggggnnaacnaangngcnnannnnnntttncagcnngtnntnnnnnnngnnnncngggnnnncnncnngncgcangncggggggcagnncngnnnnnancancgncnngnnnnnnnnnnngnnanngttggagnnatngnncnnntnnnnnnnnnnnngtnnnnnnccnngnnnnnnnnccngcnnnncggnnnncncgnnngnnannnngcgnnnnnanngncngannnnnnggncgncganggggnnnnngangnnnnnnaannnnnncntnnnaannnnntnannanangnangnnnntangnnngnntttanncnnnncnnnnantnnttnnnnnnnnnntnnnnttnnnnnnngncntngtcgnnnaaannntnnnnnnnnnggnnntcntnnnngncgnngnnnangnncctnnnnnnggnnntcnnnaangcgntnttnnanaangtnnnccannnngnggntnagcangaggntncnaangcccnnganncnttngnnnnaannngggncnnngntngngagntngnnngagaggcnaagcnnccngnnngccacgagcactgctgcgccgttaaagaanatgatgagggcgttgtctgattttgtgttggtcatcgtttttactccgattgaatagttattttgtggatttgatgcggtcgaggacggattgggcggtgacgcgggtggcgtcaccgtagcccgcgtcggccatacggtctgcgattgagccatggtttaggtccttattgatgtccgacagaatttcgctgtgctcaaaaggatcatcncggccaagcacgcggccaatgagttcttcggcctcttcgacgctgcttgaattactgtgcattggtcccatccgcatttggatatcttgttcgcggcggacagcgcgggcttggatagcaccttgtttcaggtcgataatgcggcggtggcctgcctcgatactagagcggaggcgcaggaccttttgctctagacggcgcagtgtctcggtgcggatcgtcagttcgttttccatttgtgcgatggcatttgcagcctcaatcgccatgtcttcgttacccgcatcgagtgctactttggcgcgtttggtcaggtcgttgaccctgttttgcaggccgctgcgttgctgttcttcagagcgttgacgctggatcaggcttgcgagggtggccttggcggccttgaggttgccctcggcttcgcggattttctggtcgatcaattcgatcgcaaaggcgtcgcggaccctgtcttctgtacgggcattcgcgccgaggatgagtgtactaagtgtcttgaacatctgtctctcnattngtgaacgttgttcatgaacttgttatagaaagaccagccctgtcccgcaagtaaaaaattgaacaacgttcatatttttacgaagaacgcgccaattgccttaaaataagggcgatcatggtatcgatattgtcggtttgcacgcccgcattggcctcatccagccccaaaagcacgatcccatgcacggatgagaatagtcctttggtcaaaagtagccgctgattctggtccatcgcggggaaaatcgccataagcgggtcgtggatataggtgaagagctggctgagctcggtcacataccattcgggggccgcttcccctttgggcctgtcgagatcaaagagcgcccgccacaggttatgatgctcggccgcaaaggcgtggtaggcctgcgccatgacaacgagttgctcgacgggggcttgcggggcagttgccagcgaggccgcaacttcggcacccaacgcatgaaacgttcgcgcattcacggccagaaccaaatcgttcagatcgccaaagacgttatagattgcccccagcgcacagcccgcctcggtcgccaaatcgcgggccttgaggcctgaaagcccttcgcgggcaatcgtcgcctctgcgatattgatcaaatcttcccgcagcgccttacgccgttctgcgaccttacctgccattgcgtgtctcccgttgaacgtggttcactatagaccagcaatggcaaacaagaaagtcaggctttcacaggggcgccgcctgcgaagttgttgacctcgtggtagctgataggctcgttttgcatttgcaggtgcaacccgtcgccatcatagggatgcgcgcgcgcgaggtcttcgtccacatcaatgcccagtcctgcggcagtggggacggggatatagccgccctcaacgcttaggctgttcttgatcagggcaaagtggaagtcggtttcaatggtttcggccatcaggatgttcgggattgatgctgccagttgaatgttggccgcccattcaatcgggcctgcataaagatgcggcgccatctgcgcgttataggtttcggcgatgacagcgattttcttggcttcccagatgcctcctgcgcgcccaagggcgggctgcaagatttgcacgccagctttgagggctgcgacgaattcggatttggtcgtcagtcgctcgcccgttgccacagggacacggacagcgctggtcacagccgacatatcggcatcgggcggcgtgggttcttcataccagagcggcgagaagggctccaaagcttggccgatgcggatcgcgcctgcggtgctgaactgcccgtgggtgccaaaaagtaggtccgcctgattgccaactgcttctcggatcgttctgcaaaaggtgaccgaagtgtcgatgtcgtgcatcgacggcatatgtccgccacggatcgtataggggccagcggggtcgaatttgacggctgtatagccttgcttgaccagcgccacggcactttcggccgccatatccgcatcggcccaaaaggcaggcagcgggtggtgtttgagcggatagaggtaggtgtaggcgcggatgcggtcgttcacgcgtccgccaatcattgcatgcacagggcggttgcggtccttgccgaccatatcccagcaggccatctccaagccagaccacgtgcccatgaccgtcaggtcagggcgttgggtgaagcctgtcgaatagacgcggcggaacatcagttcgatattctcgggattttcgccagccatatgccgcgcaaagacatcggtgataacggctttcattgcctctggcccgacggaggaggcgtagcactcgccccagcctacgatgcctgtatcagaggtgactttcaccaagatccaataacggccaccccaaccgggtgcaggtggggcggtgatgatgatgtcgagatcgctgagtttcatggcggtggtcctgcgtggttattgccctcacagtgccaccgcatgaaatggatgca

SEQ ID NO: 298 - DNA, 4000 bp, Escherichia coli
  misc_feature (1921)..(1921): n is a, c, g, or t
  misc_feature (1923)..(1924): n is a, c, g, or t
  misc_feature (1929)..(1930): n is a, c, g, or t
  misc_feature (1935)..(1936): n is a, c, g, or t
  misc_feature (1944)..(1944): n is a, c, g, or t
  misc_feature (1948)..(1948): n is a, c, g, or t
  misc_feature (1950)..(1951): n is a, c, g, or t
  misc_feature (1956)..(1957): n is a, c, g, or t
  misc_feature (1962)..(1962): n is a, c, g, or t
  misc_feature (1977)..(1978): n is a, c, g, or t
  misc_feature (1986)..(1987): n is a, c, g, or t
  misc_feature (1990)..(1990): n is a, c, g, or t
  misc_feature (1995)..(1996): n is a, c, g, or t
gtcttcacattcgtttcaaagtccaccactgttatagggacattgagaatatccatcaatcttgtctcttttacatcgaagaacttctttccgtcctttgttctaccactctgtttgatacctttatctgcaaaactcatatcattatttgttattgttctccataaattcttacaatctccccacttacaccagccccagtatgaagctcgtatctcgcggttacgtttccggctttttattcgtttcacctttcgggcaaagttctttttcatatttttacgcatccgaacattatctttcgtgaagcaatagcccaaaaagttaatccttcttcctcttactacgttttcgctttctatgctttttgttcccattttttgtttctgttcctatcggagcaatacaactgtttgctttaactaccaacccaacttttgcactttcccgttcatacgcacgaataagaaacaacgcttcggccttagaacgagccagcataacattatcatcgcaatatctatgcaggcatttgacacgatatttctccttcattgtatgatctatccggcttgccgcaaaattcccgataggttggcttgtaaatgctccaatcggaacacctcttcttccgttcaacttcattctccaatacgtcaactaactctgttccgctgtcatacgataaaacagctatctcgatcaatttaataaatcgttcatctttgaatttccttctcaatgcagcaacaataagctcatgaagaatactttgatagaactttttgaaatcagtctttacgaaccatttgtattccgggtaccggtgaagaaaacgtttcattctccttactccaaaatgtaatccctttcccttgatacacgcacttgtatcataaatcaaatttctataaacatcttcttcaatcaccctcataattgcatggtgcaatatacgccacgggaaatatttctgtttgacaatatctcgaacctttcctgcatcactttttactctcattacgctataatccggtgccggaaaatccaatgtcaggatcatcaactgcaaagctcggaggtcttcttccgggtgtagattatgccgcctgataaagcggtttttcttaaccttcccatcttgtgcttctttgtccgcttcacgtaaattatttatctctgctatacgttcaagaatatacccggctcttttagatttctttccaccgtttgcttctatccgtttattgtcagcctctatcctttccgctataattctatcaatttcattatgcgatagactcttccaatcaatatcacttcttccaatattcactgctgctttgttttaaaatttacaccatacttccaattttgtcttgttcagactattttaattattccgataactgcaagctgtttttacttgcttgaataattcgcccggagctttcgagaaccaacctactaacaccgcttgttgcctttcgcaaattgggcaacctttccgcattcttgattttctgacatcgtaaccaattgattactacgttgcaacgatataaatcctgcaaggtcatggctcggagaactcgcagattactctacgataaataagtatggcgagagccgatattcgcattcgagttcgaccaatcgttattcgagttcgcataagcgaggccgcaattcgcaccgttattcgcattaccgccccaaagaaccagctcttgttcccctctgccaaccgtccacgcctttcggctttcgtcccgttatccgttgccgtaaaacgagaaggtggacgggttttaattaattgaaattcaaagaactaatatttcaaaatctattatgcagccatcaaagatgcaccgctaacaaatgttaaattcccaaaatacgcaaggcgagagccgananncgcanncgagnncgaccaancgtnanncgagnncgcanaagcgaggccgcaanncgcaccgnnatncgcannaccgccccaaagaaccagctgcccagtagtgtttgcccatgaataatcagcccaataagaagtgctgtttccaccaatctttttcgggaaaatatcaaaatgctccccaagaattatttcctgcacttgaccggaagctgtctgacgggtagcttgtctgtattcaccatttggatgcgcagctaattcagcagtagtcggtaaacggtttcctttgtaaatgaaaatttccgttccactttgagcactattgttggaactaccgcaaaatactccttgcagaaattcccactgccacccataaggatcttctatacccatcatgttcacccgtgaacaatccactccagtattacttccattcaccacagaaatagctattttgccccaattgtcaccgagactctttgttgcgccagtttgcaatgctgccgcagcagcccacaagtctttactggagctaccacccacaccataaccaagtttggcttgaatattggtatctccgtactgggacagccccaacatcataataagctttctctgatcgtaatcggtcagtccccattccttaccgttcacttgtgcagcattccaaaatgcgttgattgtcttgctgcctgccggtgcaactcctgaacgtgaaacaagtgcgctacctgacatggagcctttgtatgcaccgatacagttatacattccaccatttgccccaccaataaactcaccgccaataggtagcatcgagagccataagactggtacaccacttacactgtcagtctgtacacgataatacaaacgtggccctatccacatcacatgccctttggtttcatccaccgcagtaccatcagcaaacaccgcactattggtaggggacattttagcagcccttccatcattcgttacgagataacggccacaatacaacttgtattctgtccatgcggctgtattacctatcacaccatagttcgtgctactttgggttgattgtttgattggaatcccccaagccacctgcctcaacatttgttcgtcaccattattaatagcattcatgaagttttccacggtaatgcgtctgacactaccaccaacttccaccaatactgtattggaacgcagaatggaggtcaccaatgtttcatttcctaatcctttagttgccataatattattttgtttttatgttaattaaaatgacattctgccaaaacatcaacatcatattgagtcccgtttctgtcagtttccgttgttgttacagatatagaatttgttgtagaatgtttcaaactcttccagttttccttatccatcacatccatagtccacgatgcggaagtaggagtataagttgaccccgtagtcatatttacaatcttggcacttactgtaacgggttgtccggtatcaacctctttgttggaagaagttatataacatacaatttgaaattcatctgccgtatcaatgatacgtaccccggcacgtgctatcggttgtgaagcacttgaagactgataaacttctgctatgaataactgggtaccgtccacatcaccacgggtaacagttacacttttctgtccgttcttatcagtccaagccgccgtgtccttataccattttatatagtaatcggtaatggcattggcaccggcatacagcttggtagtcagagtacaacttgttactttgcttgttaactgttcggtacttgcaagaatagcaagatagtaagagctggctcccatattctgaatggcaataggcagttccccggtcaaattatactcaacacctgccgtagaagcgacacatgaataagtcaatgtatctcctgcaatattcgttttgcttgccaagtttccgacaattttaatggcaccggtactggtattcaaagagaatttgcccgtactgtcttttttccaacctccactttccgcaccgttaaaatttaaagccactccattgtaagcccaactatgacca

SEQ ID NO: 299 - DNA, 4000 bp, Escherichia coli
  misc_feature (302)..(302): n is a, c, g, or t
  misc_feature (380)..(380): n is a, c, g, or t
  misc_feature (614)..(614): n is a, c, g, or t
  misc_feature (650)..(650): n is a, c, g, or t
  misc_feature (877)..(877): n is a, c, g, or t
  misc_feature (1097)..(1097): n is a, c, g, or t
  misc_feature (1253)..(1253): n is a, c, g, or t
  misc_feature (1364)..(1364): n is a, c, g, or t
  misc_feature (1394)..(1394): n is a, c, g, or t
  misc_feature (1400)..(1400): n is a, c, g, or t
  misc_feature (1424)..(1424): n is a, c, g, or t
  misc_feature (1467)..(1467): n is a, c, g, or t
  misc_feature (1640)..(1640): n is a, c, g, or t
  misc_feature (1646)..(1646): n is a, c, g, or t
  misc_feature (1658)..(1658): n is a, c, g, or t
  misc_feature (1862)..(1862): n is a, c, g, or t
  misc_feature (1883)..(1883): n is a, c, g, or t
  misc_feature (1946)..(1946): n is a, c, g, or t
  misc_feature (1991)..(1991): n is a, c, g, or t
  misc_feature (2201)..(2201): n is a, c, g, or t
  misc_feature (2213)..(2213): n is a, c, g, or t
  misc_feature (2465)..(2465): n is a, c, g, or t
  misc_feature (3101)..(3101): n is a, c, g, or t
  misc_feature (3158)..(3158): n is a, c, g, or t
  misc_feature (3440)..(3440): n is a, c, g, or t
attcgactatggctacaattcatgtcgatggcaaatcgtacgaagtcaatggctcagagaacttgctgcaagcatgtttgtctttgggtattgatatcccgtacttttgttggcatccatccttaggttctgtcggttcttgccgtcaatgtgccgtgactcaatacgcgaatcctgaagatacgcgtggtcgtttagtcatgtcatgtatgacgcctgcatctgacaatacctacatctcgattgaagacaaagaagcgaaagacttccgtgcgtcaattgttgagttcttgatgacgaancacccacacgactgtccagtctgtgaagaaggtgggcactgtcatttacaagatatgaccgtgatgactcaacacgancgtcgtcgttaccgtttcactaaacgtacacactacaaccaagagctgggctcattcatttcacacgaaatgaaccgttgtatcgcatgttaccgttgtgttcgttactacaacgactatgcgggtggtactgactttggtgtgtatgcaagcgcgtcacgtgtttactttggtcgtcctgagtcaggcactttagagtctgaattctcgggtaacttgactgaagtatgtccnacaggtgtattcaccgacaaaactcactcagaacgntataaccgtaagtgggacatgcagtatgcgccaagcgtatgccaaggctgttcttcgggttgtaatatttctccgggtgagcgttatggcgaacttcgtcgtgtcgaaaaccgtttcaacggtgaagtgaaccaatacttcctttgtgataaaggtcgttttggtacaggttatgtgaaccgtgcagatcgtccacgtcaaccgcagttccgtgatggtgctgaagnaactacagtttctgtagatcaggcattagataccgtgattgcaaatatccaaggcaaaaaagttttgggtattggttctccacgtgcatcacttgagtcgaacttcgcgcttcgcgaattagttggtcaagagaactattcaacaggtatgtctcaaaaagagcaaaacttggttgaattggctgcatcgattatgcaaaccgaaggtgtatataacccnggtatgcgtgaaatcgaaagctatgatgctgtgcttattttgggtgaagacttaacgcaaactgcgccacgtatggcgttgtctgttcgtcaagcggcgaaaaacaaagccaaagaaatggctgcggaacgtcgtactcaagactggttagcaganccgctacaacgtattgctcaagatgcgaaatcaccgattttcatcctcgctgcaacgcaaacacgcttagctgatgttgctgcaggtgaagtggttgcttctccaaacganatcgctcgtttaggttttgccgttgctgcngctgtnaaaggtgatgcaattcttggtctngcggatgatgcgaaagcatttgctcagaacattgcagatacantgaaagcggcgaagaaaccactgatcatttcaggtacaagtttacaagacgcatcaatcatggaagctgctgcacaagttgcgcaaaaccttggtggaaatgctggcttaagcttgacggttcctgaagtgaactctatgggcttagcaatcttcggtggacaaagcttagancaagcntttgcacaagantatgacacggttgtgatcgttgaaaatgatctattccgtcgtttgccagcggtacaagttgaagcagcactttctggtaaagacgtgattgttttagatcactctgaaactgaaactgtgaagaaagcggatatcgtactttctgctgcgtcatttgctgaaggtgatggtacggttgtctctcaagaaggccgtgcacaacgnttctaccaagtgtatgacccnagctactacaaacctgaactggcgatcaaagaatcttggcgctggttacatgccattgaaacnggcgtgaagggcaaagcgatttcttggaccttgcttgatgatgtnatcgagtcagttgcgaaaaacgtacctgcacttgctgcgattcaagatgtggctccagatgcgggcttccgtgtccatggtttgaaagttgcgcgtgaaccgcgtcgttactctggtcgtacctctatgcgtgcaccattgaacgtgcatgaaccgaaacaaccgacagatatcgactcggcattaacattctctatggaaggttatgtngggaaccagacnccgtctccactggtaccatttgcatggtcagcaggttggaactcaccgcaagcttggaataaattccaagataacgtgggtggtcacttaaaaggtggtgattcgggtgtgcgtttattcgatcgtttagcgaagcgcccagcacgtactttcgttgctccagcggttgtggttgcaaaccctgaaagcttccgtttagtgccgatgcatcacatttttgcttctggtgaatttactgtgaaaacacctgcnatggaatcgcgtattcctgaagcggtctttgcagtgggtgagcaagatgcaactcgtttgaatgttcaagatggtcaaaaaatcactgtgaaagcaggtgagacttcgatcgtacttccagttcaagtgattgattatttacctacaggttatattggttatccagttggtcttgcacctacggtttcacttgctgagcctgtatcagtcgcggtaggagcgtaattcatgcaacaagaattaatccgtcaaacgccgctttgggctgagaactggccaattgcctactcagtcattcaagcgattgtgattttactcgttgtagtactcatcgctgcgttgatgtcttttattgagcgtcgtttactgggcttatggcaagaccgttatggtccgaaccgtgtaggtcctggggggatgttccagatcgttgccgacatgttgaaaatcatgttcaaagaagactggacaccaaagtttgctgacaaattgactttccgtttagctcctgctgttgccatggcaacagcggtgatgtcgttcatggttattcctgtatcaccatacttaggtgttgcagacatgagcatcggtctattgttctttatggcaatggcaggtattgcagtctatgcngtattgtttggtggttggtcatcaaacaacaaatatgcattgcttggtggtctacgntctgcagctcaaaccatttcgtatgaagtgttcttgggtatttcattgatgggtgtggttgcaattgcaggctcattcaacatgcgtgaaattgtagaagcacaaaaagatgtatggtttgtcatcccacagttcttaggtttcttaatcttcgtggttgcaggtgttgcggtaactcaccgtcacccatttgaccaaccagaagcagaacaagaattggcggaaggttaccacgtcgagtacggcggtatgaaatgggggatgttcttcgttgcggaatangtcaacgtagttctgatctctgcattgatcgtcacgctattcttcggtggttggttagcgccatttaacatcgatattccgttcattccaccagtattctggttcattatcaaaacagcattctttgtgatgatgtttgtcttggctcgtggttcacttatgcgtccgcgttatgaccaagtgatgaactttggttggaagatttgcttaccattagcgttagttaacttattagttactggcgcagtgattctgtggtaagggcagggagaataaaatgtataaaattctagctgggttcgggtcaatcgtacgttcactgtggatggttttctcacacgtgacacgtaaacgtgacaccattctttacccagaagtgccagccgaacaaattgttccaccacgtttccgtggtcgtatcgtgttaacacgtgacccagatggtgaagaacgttgtgttgcgtgtaacttatgtgcagttgcatgtcctgttggctgtatttcactacaaaaagcagaaaaagaagatggtcgttggtatccggagtttttccgtatca

SEQ ID NO: 300 - DNA, 4000 bp, Escherichia coli
  misc_feature (1443)..(1443): n is a, c, g, or t
  misc_feature (2517)..(2517): n is a, c, g, or t
  misc_feature (2634)..(2634): n is a, c, g, or t
  misc_feature (2658)..(2658): n is a, c, g, or t
  misc_feature (2693)..(2693): n is a, c, g, or t
  misc_feature (2727)..(2727): n is a, c, g, or t
  misc_feature (2745)..(2745): n is a, c, g, or t
  misc_feature (2757)..(2757): n is a, c, g, or t
  misc_feature (2778)..(2778): n is a, c, g, or t
  misc_feature (2808)..(2808): n is a, c, g, or t
  misc_feature (3075)..(3075): n is a, c, g, or t
  misc_feature (3102)..(3102): n is a, c, g, or t
  misc_feature (3129)..(3129): n is a, c, g, or t
  misc_feature (3246)..(3246): n is a, c, g, or t
  misc_feature (3291)..(3291): n is a, c, g, or t
  misc_feature (3313)..(3313): n is a, c, g, or t
  misc_feature (3403)..(3403): n is a, c, g, or t
  misc_feature (3780)..(3780): n is a, c, g, or t
  misc_feature (3867)..(3867): n is a, c, g, or t
  misc_feature (3990)..(3990): n is a, c, g, or t
agatgtgaccacacgatcccctgcccgaacaagatcggggttttcaatgaaatcaaccggcggcgcggcagtattgtcgcccacaacaaaagcacgctgtccagagggttgaacgattgcaggaatttggctgtacgggtccgtcaacaaaataacacggctggtgcgttgacccacacccgaaatgcggcccaccaaacccaagccatccatggcggcccacccgtcacgaatgccgtcttgggcaccgatgttcaacaacaccgattgccgaaagggcgatccgctgtcggccatcacgatgccagaaatatgggtgaattttggatccaatcgcagattgttcaaatccaaaagacgcgcgttttcttgttctaactgcagcgccgcctcgcgccagcttttcatttgttgcagttcgcggcgcagctcttggttttgctcatagagcgacgcataactttggaaatcccgaataaggttgatcgtacccgtcaccggcgccatggcccatgcgaaactggggacatattgatcaatcacatgcgcacggaaccgttcgacgcgcgggctgtcgatgcgccaaatcacaaagatcgcaaacataaccaacaccaacaccaccgtaatcaaacggcggagcggtgttacataatcatcttgctttccacgatgttgggccaagcctacctcttagtcagagagcacttgccttagctgtcgtagtctatggcgtggcgcagttgtttttcatattctagcgctttgccagtccctatggcaacgcaattcaagctttcgtccgcgatggaaacagccaaacctgtctgttcgcgcagcgcaagatcaagatcacccaacaatgcgccaccacctgtcaacatgacgccacgatcaacaatatccgcagccaaatcaggcggcgtgacttctaatgcggtcatgaccgcttcgcaaatctgctggactggctctgacagtgcttcggcaatttgggcttgggttatttcgatttccttgggcacgccattcaacagatcgcgcccacggatcatcatggatgcaccacggccatcgttgggcatacgcgccgtcccgatcgaggttttgatgcgctctgcagtgctttcgccaaccaataggttttgctggcgacgcagatagttgatgatcgcctcgtccatacggtcaccgcccacacgaacagagcgggcgtaaacaatgtcacccaatgacaaaaccgcaacttcggttgtaccaccgccgatgtcgacaaccatgttgcctgtcggatcggtgatcggcatgccggcaccaattgcagcagcaatgggttcggcaatcaatcccgccttgcgcgcacctgcggacaaaaccgattgacgaatcgcgcgtttttcaacgggtgtcgcaccatgtggtacacatacaatgattttcggntttgagaatgtggaccgtttgtgcaccttgcgaatgaaatgtttgatcatttcttcggctacgtcaaaatcggcaatgacaccgtcgcgcatcgggcggatcgcttcgatcgaaccgggcgtgcggcccaacatcagtttcgcatcttcgccaacggccaagacctttttaacaccatccttgacatgatacgcaaccactgacggctcggacagaatgataccgcggccttttacgtaaaccaaagtattcgcggtccctaggtcaatcgccatgtcctgcgaaaacagtcccgtcaaagatgaaagcccaaacatatgctgattatatccccaaatttatggtacgatgcgactcgtcccgtcgaccccaataagttgccaatcttataggtcccaattttgcaacatgaaagaggcgaagtccattttcgacagtgattcaagaattattttgcctttaggcttaagttcgccgacacccaaaaggcccgcataaacacgtgtcgatttacgacgtcacagcggtcaaattgcgcccgcatccccgcaagaggatcgttttttccatcaagaaatagggcataaagtcgtgttttcggaaataagtcgcaaaattgcgataggtagtcggctgaggtctgttaaaatttgcaatcctgctaaacatcatcccaattcaatattggagtcgtctatgaaaacgcacgtaaaagcgctggtcgttggtggtggcgcggttgggtcttccatcgcataccatttggcaaaagctgggtggaaagatgtcatgttgctggaacgcgacgaattgacatcaggatcaacatggcacgcagcaggtttgttgccactgttcaacatgtcctatgcgaccacgcatatccacaaatactcggtcgatttctacaaaacgctagaagaagaaaccggtttgaatgcgggtttctcgatcgtgggtaacctgcgtatggcacaaacccaagaccgcatggacgaatacctgctgtattcatcagttgcggaaacagcgggggtgtatcacgaattcctgacaccaaaagagatcaaagancgctggcctttggttcggaccgaagacctaaagggtgcgttgttccacccccaagacggctatatcaaccctgcggatgtcaccatggcgatggccaagggcgcgcgccaacgtggngttttgatcgaacgcaaatggcangtcgacggttacgaatggacagggtccgaatgganagtcacctgtaccaagatggtggaaaagggcggnaaccttgttcagtctgangaacaaattgtnatcactgccgaacatgttgtnaccgcgacaggcaaccacgcacagcggacngcgaaactgttgggcatcaagatccccgcgatcccagttgagcaccaattcattgtgaccgaacccgatcccatgttgcaagaataccgtgcaaacggtggcgcagaacaccccgttttacgtgatgccgatgcaaaatggtacgtccgcgaagaacgtggcggctggattttgggcccatacgaacgcaatgcacctgcgcgtttcgaatacggcgtgcctgacagcttccgcgcggatctgttcccgcttgatctagagcgcatngaagaagaatacatgtccatgatccancgtcttccgtcatcggaaactgtgggnttgaaagacgactttaacggtccgatctgttacacacccgatggcaaccccttggttggcccagcgcccggtttgcgcaatatgtggttggccgaaggctttagctttggcatcacngcggctggtggtacaggctattaccttgcccagttgatggtcaanggcgaagccgaaatcgacatgncgtcacttgatccaaaacgctatggcagctggatgaccaccgaatatgcagcacgcaagaacgaagaatgctatgagcacgtctttatcntgcatcaccccgacgaagaacgcgaagcctgccgccccttgcgcacagcacccgcgtacgagcgtcaaaaagcccgtggcgcacagtttggccaagtgaacggttgggaacgccccaactatttcgggccgcttgatgcctctgacagctttgatcacgatagccgcagcttccgccgtggcgcgtggtggcaacatgctgtggacgaagcaaaagcgatccgtgaaactgcaggtttgatcgatgcaacagcatttaccaaacatatggtcaaaggcccaggcgcgaccgcattcttggattggttcacctgtaacaagctgccatcggttggtcgcatcaacttgacctatgcgctgacacctgcgggcaccacncgcaccgaatacaccatcgtgcgcacaggcgaaaacgaatactatttggtatctgcaggggcgtggacagattacgatgcggattanctgcgcaaatgcgcagaggataaggccgaagaattcggatatatcgaaatccaaaacgtcacaacgcaatatggtgttttcgccatcgcaggaccaaaatcacgcgatgtcctgaaagaaatnatcaaagacg

SEQ ID NO: 301 - DNA, 4000 bp, Escherichia coli
  misc_feature (29)..(29): n is a, c, g, or t
  misc_feature (32)..(32): n is a, c, g, or t
  misc_feature (38)..(38): n is a, c, g, or t
  misc_feature (478)..(478): n is a, c, g, or t
  misc_feature (484)..(484): n is a, c, g, or t
  misc_feature (488)..(488): n is a, c, g, or t
  misc_feature (841)..(841): n is a, c, g, or t
  misc_feature (1684)..(1684): n is a, c, g, or t
  misc_feature (1992)..(1992): n is a, c, g, or t
tggcactggcgttgccgtcatgcccggcntcnttcagncaggcattcgataactgtgaagggcgttaccagtacgacaacggtgatgcgtactctggcgagtggcgggccggtaagaaacacggccaggggacttatgtgtgggctaatggtcagcgttacgaaggccaatgggtagacggtcgtaaagaggggtttgggagatacttttggcctaatggcgacctctttgagggccagtttctaaacggcatctatcatggcgaaggcaccttaacctatgtgtcgggaaggaaagtggtcggcgagtgggtcgacgggaagcctttcaaggcaacctcttttgatgcgaacggcaaggccgcatacgcctataccgacggtgtgccgcagtgcctcaaggcacagggctgatcgcttgaaaaacccagcgcctcgactgattcgttttttctgtcttgtactcggcctcagtgcgnctattnctgncggagcacatgcagatacggtgccagagactctgatcggcaaggtggtctttatgcgtcatgcgctggctccaggcaatggtgatcccaataactttgacattaatgattgcacgacccagcgtaacctgaatgaggacggtcggcagcaggcccgcttaacgggtcaaaagcttaaagcacttggtattgcctttgaaaccatttacaccagcgagtggtgccgttgccgggagacagcaaagatgctggcagtgggcgaggcggtcccgttacgggcgctcaattcgttttacgatcattatttctcccgcgatgaactgttaccgctgctggaagaaaaattatcgcagntaaggccgagtgatcctcccattctgatggtcacgcattttgtgacgattatgggtattaccggaaaatccgtgagctcgggggatctggtggtttacgatccggccacgggtgagtccgagatgcttcggctctgacgcctatcatgtctgcctcgcctgaccgctagataccaaagcgcgaacgaacgtgggacgtctttatctcattcgacacgcccagtcgcgcaataaccagaactggaccggcagcgattttcatcccgatcgggagccggacccggatatcacggatctgggtcacgcccaggctcgagcacttgctggccatctttcggatcctcaggcagagcctcgtcagcacccttttgcgccctcgggcgaagcgggataccggctcacgcatgttttttgcagcctgatgagccgctctatcctgaccgcgcaatacgttgccaaggcctgcggtctggatttgtcggcccagcctgaggtattcgaaaagtacggtatttatgagtttgacgacgcgcagaatcggatcggactacctgggccgggacgccgttattttgaagaccgtttccccgcgttgcgactgcccgagtcagtggaagagggtggctggtggaatcgacccgtggaggacgaagaggcattcattgagcgaatgcgcgcagtggtcagtcaattcagaaatacgcttaatgcgcgagaggatcatgtggcgctaatcgctcatggggattttattgaccagtttattaatgagcttatgggagtgccccgccacgtgggcaattatcaaacgcattgggtagccaactgggcgtttcataacacntccatatcaagagtggactttgtgagtggggcgcagcacgtggtttatctcaaccgggtggatcacctatctcccgagcttataacctggtgactcagctagggactcggccgcgattacctgcctaagaaaagaaccgcaaacaacacgagcgaaatcaagaacatgacccaactgcgcttgtactgtttctggtaaagcagtatctgccgcttaagctgatcattttcggctttcagggaggcgagttcgtcgtttgttttggtgtgatccatatcgatggtgatggtggattgttcttctagcanaccaccgagccccggtgccatcctcaacgcggcccggatctatcaggcagtcgaaaaatgcgattttgaatacctgcagataaacgtcgcaacggcgcaagtttgcttctcttgcgttgggccgatagccctgtttgccagtatagtcacgtgaaaatttcgagctcaagcctatcctgagcaggagcgctgcttgtttcatcgccggccgctgatcatcaaccaacttcgcggggctaatttcaccaccctggggttgatgtcggggcttgaaggtttcgcgcggggggtcatcgttggccttgttccgttgatcgcgcttgatgtctttggcaccaaagccatggtgtctgtcgtttactttttggcctcaacctttgttgttctcatcactttaaatttggctcggatcgagcggctcattcatcgacgctggctcatcaccatgggctttggttttctcatgattggcgcgacgctgctgtggtcgcatacggaggcagggattgcgctgggaatcggtttacgagcctcggcggcctcgattttttccgtttgtctcgcgctttacatcatggattacatcagcaagcagcagttccgaattatggagtcacgcaggatggtgtttcaggcggtcgcttggatatcggcgccttcgattggaacgtacttatgggatcatgggcaccttacggcaccctttctgatcaccgggctcgcgtcagctggactcattgtgtacttctggacgctgcgcctcggcagtaatccagtcattaagaaaagcgattcaaaaattatcagtccgctcaaagcggtaccgcatttcttttcgcaaaaacgtctccgaattgcctacacgatctgtatttcgagatcggcgttctgggttacgatctttatctacgggccgatctacgttatcgaggcggggctgcccatctggatgagtggcggattgctgtcagccgcgagtggtttgctcttcatcagtccgatggtgagtggtttggccggcaggtacggcgctcgcgccctgatccttaccgggcttggcattagcgttgtttcgctagtaggcctggctttggttggctcacccaagccggcggggttggtgttctggatgctgggctcggtgggggcaaccattctcgatgtcctggggaatatcccttttatgcgatcggtccgccctcgcgagaggcctgcgatgactgtggtgtttactacatggagggagggctcggaattgctgactccagcaatcgccgcactagtcctgtttttcgcaccattttgggttttctacctcgtccttgctgtggttttaagctttgccgctacactcgccgcgcgactaccgaggcggttctgaagcttttggagcggagaccgacgattctggagtttgcttaagcggtcatgacgcggtaaaactggcactcaggggagacgtgttcaggtcctgagccacaaccgtaacctctgctacgacgccaaaaaccagcaggcccatgtattcaatatcaagcactggagcatcacgtcgcgtccttcgcctcgcggtgggcggtcttgtgttaggcgtatttgcggggaccggtaaccccgcgagcgcggacagtgagcacggcattaacttcaatcggagtgccgccaatttttatcttcatgacttttgtgagggcagaaacccgagcgattcctgcgcactggcggtagccgaagatggtttttatggaattgccaacggtccgatactggtcggagtaaaaaaggaagccttgtccgtttgcaagcgcgtttcgactcagccagagacctgtacgatcgtcgatcagaacggaacgtcatcctttatcgcaagcgtttctgcgaccgtcgatgattcaagcccggccagtgactcagattttgacgccaaattaaaggcagcgctcgccgatgcggtcgactccgtaacgagctccgtcgaggccctcaccaccgaaacggcagacga

SEQ ID NO: 302 - DNA, 4000 bp, Escherichia coli
  misc_feature (1952)..(1953): n is a, c, g, or t
  misc_feature (1958)..(1959): n is a, c, g, or t
  misc_feature (1965)..(1965): n is a, c, g, or t
  misc_feature (1977)..(1977): n is a, c, g, or t
  misc_feature (1979)..(1980): n is a, c, g, or t
  misc_feature (1985)..(1986): n is a, c, g, or t
  misc_feature (1991)..(1991): n is a, c, g, or t
aagtttttgcaataccgatttatgcgcgttgttcgtagggttcaagttcgataacccgccgtactgaaatatgataaattcgggtaaaaacgctttgcttccgttattgaagaaatggattcttccggcaaaggctttttcgaagtcctctaaatcgtacgtttcgccgcaataaagcccggctacctctaagtctacttcccatattccggcgttgtcgcactcgcaaaaaaggtacacccaaagcaatttataagcgggcggtaagtcccttataaatcgtttcttaaataggtcggtatctataaatctttttgccattttgttacttttgaaaagctaccccggcccggaaaccggggtagctgggttaatactgctattgctcgataatcgcaatttcggggcttagttcccgaatgcgggctacctgcacgtctataattcggtcgcgcaggtcttccaaaagctggcacgctccggggcttacaagttgtagggttacgtcgcggccgtttaccgaagcgtaaaattccacttcgatagtttccgccggcatacctttgaaaatcggaatttgaagggtaaaggcttccggcaggttactcataaccacgccgctataattgtctttgaagtcgcccttttcgctcttttgcttctctaccttggaatttacggtagcttcgaagtttttaagttcggttacgagcttcatattcgcggttttgtccgggaaaaatgcgcggttcattttgaagaactgccccaactcgttaggttcccaacctttgccggcgttaatcccaaattcggaaaatttggggtgcgtagtcagttttccaacgattcgcccgcgtctatattcgtcgtcttcgttcgtgataagggtaatacttacctgttcacggtctactaagacgtggcagcgcaacgggttaatttgttcggaatcgtaccgccgtaattccaaaaattcaaccggcgcaccgataacaccggaaaggtcgatttttaccgggggcttgggggcaagaactgcgggggcctcgccctcacgtacgataatttccgcctgcgtagttccttcgggaaggtttactactacttttttgttttcgtccatacttttttacttgttgattgtgaaacttttacttggtttgaagtgggctacttcgtgcgccggtacgataatcgtagtaccggcggtaatgttacgggctttcttttcggcccgtttcttcggctggaaggttccgaagccacgaaggtaaacgggttccttgcgctgtacgcattccttaattgcgtctaatgtggcttcgataatcggccttacgtggctatcgttttgcccggtcttactgccaacgactgtaattaaatcttgcttcgtcattgctttgctttttagttgttagtacctgtttttcttccgatttggaaaagtgttgtttgtaattcttcgctgtacgccggccggctctcgataaggtcgccgttctcgttgtagtagccgacttcgcgggcttcttggtcgatgaacttaaagcacctttcggtaacaaattcggctttcttcttcaaaccgtccaaggtcttttttcgctccgtcgtaaggggttccaaacgggccttaaagtccttcatcgcggccgtcttttcttcctcgatgtcgttaatttcgatgtccgtttccgaaaggctttctttcatgcgggccaattcttccggggtaaaaggcttcatataccccttttcttccaccgcgtcgcagttatccataaggaaggctacgcgcttcttgccttgttcaaggtctttccctaattctctttccatgttgcattattttttgattaaaagaaaatcgttataaagaccttcgaactgacggcccgcgtacgtggcgagttcacgggttttatagcaaagccgggagccgacanncgcanncgtatncgaagccgcgtnanncgtanncgcgnacgaaaagccggcagacgcgggattatacacgaaccaaggccaatatttgtactcgttgctattggcccaatccggccgccaaccttcgttaagggcttcggcaatggtctttaacttgcggtaggctatttcgtccttggtaaagcctaacttcgctaatacggtttcgttcatcggctcaatgccaagcacagcgcaagcgtccgcgtaggtctttacgcgcttggtaatgtccttcggggcaaccatttttacggcctgtaatacggtcgtattaacccctaacttctcggccaatcgttcggcttccttgctggcagcctgttcgttctcgtgtttgtacgtcggtgcgccttggccttcggcgtaaaccataaaaaactgcttttccattttgttatttgttaaaaagtgaactttgtttttcttccctcttttgctcgtaaagtattcgcctttgtcgcgcaatactcaaccggacggccctaatagcgtcttcacgcccttttaggctttcttcgtactccaatagttccgcttcgctttgggcgataaaatacccttcggaagtggctattaagcccggtataaggtcgtttgtccttatgtggtttataatcttccttacccgtgcgtcgtttagtttataggaacctttaagggtatttacgatatgcttgtttgtaacggcattttcgcgccctattttcgtcctaagcccccgtacgagaagcggaagaagtacgcccatttcgtaatcgtttaagggctgcgtttcttggtcaaatcctttaatcatatcaaaagggggttttgtcgaaattgattattagccccgcttcggctatatgtacggtcttaccggttgcggctcgcactccggcccggaattgttcggcgttgctgttaccgtcggaaaggtggataagaacaatattatttaccccctttatatcgttggcttgtaacgcctgtacgcaatggtcgtagcttaaatgcgattttagcgtacggttccgaacaacggcgggaatgcgcccggccgctatattcgcgtccaataggtctaagcggtaattacattctatcaatacgttattaagtcctgcaaacttgcaaggcaagtaataggtatcggtagcgaataggatattacccgtttcttcgtgattgatgaagaaccccaaaggctcggcggaatcgtgcttagtcccgaaaggaataattcggaaaccgccgagggtaaaaagggttccggctttgcaaacattcgcgcggcgcgggccttctattggggtgttctcaattgtaccggccgaagcgtagacgggtacggtagctttcaatacttcgttaatgtagcctgcgtggtctttgtgttcgtgggtaattaggcagcctacaaccttcgttatattgtagtctaacgcttgcttcacgctggcgaaccttacgcccgcttccaataacaaggcttcgcggtcgttctccaatatgtagctatttccgtggctgctactgcctaatacttttagaaccattgtaactacgcttctacgattttgcgaaatgctttacgcttcctttttagcggaaggttccggccgatgaagtccatagccgtagcgaatttgcccgaaaatcgaataagggctttgtcttgctgggctacgctctgttcgttctccttcgccatgtccgccgctttgttaatccgggcgttcattgcgtcgatgtcctttgccgtcagaatggcaataccaaaaattactttcatattagaatccaggtgttttaagtggctgtttggttccgttcgtttctgcttggccgaaatcaagtgttccgccggtattggcgttattctgtatttcggtttctacctcgtgggtaacgtccttatattccacgtcttcaacggggccgctttgttcatcagcgtcgccgaagtcgcaaccggttatatactcgtaaagggcttttttggcgcgtcgttcggctttacccc

SEQ ID NO: 303 - DNA, 4000 bp, Escherichia coli
  misc_feature (1990)..(1991): n is a, c, g, or t
  misc_feature (2002)..(2002): n is a, c, g, or t
  misc_feature (2662)..(2662): n is a, c, g, or t
  misc_feature (2699)..(2703): n is a, c, g, or t
  misc_feature (2706)..(2712): n is a, c, g, or t
  misc_feature (2717)..(2721): n is a, c, g, or t
  misc_feature (2730)..(2730): n is a, c, g, or t
  misc_feature (2740)..(2742): n is a, c, g, or t
  misc_feature (2744)..(2744): n is a, c, g, or t
  misc_feature (2746)..(2746): n is a, c, g, or t
  misc_feature (2749)..(2752): n is a, c, g, or t
  misc_feature (2759)..(2765): n is a, c, g, or t
  misc_feature (2781)..(2781): n is a, c, g, or t
  misc_feature (2784)..(2785): n is a, c, g, or t
  misc_feature (2789)..(2789): n is a, c, g, or t
  misc_feature (2791)..(2793): n is a, c, g, or t
  misc_feature (2795)..(2797): n is a, c, g, or t
  misc_feature (2799)..(2800): n is a, c, g, or t
  misc_feature (2802)..(2803): n is a, c, g, or t
  misc_feature (2805)..(2807): n is a, c, g, or t
  misc_feature (2810)..(2812): n is a, c, g, or t
  misc_feature (2814)..(2815): n is a, c, g, or t
  misc_feature (2817)..(2818): n is a, c, g, or t
  misc_feature (2820)..(2821): n is a, c, g, or t
  misc_feature (2823)..(2823): n is a, c, g, or t
  misc_feature (2827)..(2829): n is a, c, g, or t
  misc_feature (2831)..(2831): n is a, c, g, or t
  misc_feature (2835)..(2835): n is a, c, g, or t
  misc_feature (2838)..(2838): n is a, c, g, or t
  misc_feature (2841)..(2841): n is a, c, g, or t
  misc_feature (2843)..(2844): n is a, c, g, or t
  misc_feature (2846)..(2847): n is a, c, g, or t
  misc_feature (2851)..(2851): n is a, c, g, or t
  misc_feature (2857)..(2858): n is a, c, g, or t
  misc_feature (2862)..(2862): n is a, c, g, or t
  misc_feature (2868)..(2868): n is a, c, g, or t
  misc_feature (2873)..(2873): n is a, c, g, or t
  misc_feature (2878)..(2878): n is a, c, g, or t
  misc_feature (2881)..(2881): n is a, c, g, or t
  misc_feature (2886)..(2886): n is a, c, g, or t
  misc_feature (2917)..(2917): n is a, c, g, or t
  misc_feature (2919)..(2919): n is a, c, g, or t
  misc_feature (2940)..(2940): n is a, c, g, or t
  misc_feature (2943)..(2943): n is a, c, g, or t
  misc_feature (2946)..(2946): n is a, c, g, or t
  misc_feature (2954)..(2954): n is a, c, g, or t
  misc_feature (2956)..(2956): n is a, c, g, or t
  misc_feature (2961)..(2961): n is a, c, g, or t
  misc_feature (2967)..(2969): n is a, c, g, or t
  misc_feature (2971)..(2971): n is a, c, g, or t
  misc_feature (2975)..(2977): n is a, c, g, or t
  misc_feature (2979)..(2979): n is a, c, g, or t
  misc_feature (2982)..(2982): n is a, c, g, or t
  misc_feature (2984)..(2984): n is a, c, g, or t
  misc_feature (2987)..(2987): n is a, c, g, or t
  misc_feature (2990)..(2990): n is a, c, g, or t
  misc_feature (2998)..(2998): n is a, c, g, or t
  misc_feature (3016)..(3016): n is a, c, g, or t
  misc_feature (3018)..(3018): n is a, c, g, or t
  misc_feature (3025)..(3025): n is a, c, g, or t
  misc_feature (3035)..(3035): n is a, c, g, or t
  misc_feature (3048)..(3048): n is a, c, g, or t
  misc_feature (3052)..(3052): n is a, c, g, or t
  misc_feature (3062)..(3063): n is a, c, g, or t
  misc_feature (3076)..(3077): n is a, c, g, or t
  misc_feature (3080)..(3080): n is a, c, g, or t
  misc_feature (3090)..(3090): n is a, c, g, or t
  misc_feature (3092)..(3092): n is a, c, g, or t
  misc_feature (3094)..(3094): n is a, c, g, or t
  misc_feature (3096)..(3096): n is a, c, g, or t
  misc_feature (3099)..(3099): n is a, c, g, or t
  misc_feature (3102)..(3102): n is a, c, g, or t
  misc_feature (3104)..(3104): n is a, c, g, or t
  misc_feature (3106)..(3106): n is a, c, g, or t
  misc_feature (3110)..(3110): n is a, c, g, or t
  misc_feature (3112)..(3113): n is a, c, g, or t
  misc_feature (3180)..(3180): n is a, c, g, or t
  misc_feature (3183)..(3183): n is a, c, g, or t
  misc_feature (3191)..(3191): n is a, c, g, or t
  misc_feature (3201)..(3201): n is a, c, g, or t
  misc_feature (3214)..(3215): n is a, c, g, or t
  misc_feature (3221)..(3221): n is a, c, g, or t
  misc_feature (3225)..(3225): n is a, c, g, or t
  misc_feature (3228)..(3228): n is a, c, g, or t
  misc_feature (3231)..(3231): n is a, c, g, or t
  misc_feature (3238)..(3238): n is a, c, g, or t
  misc_feature (3271)..(3274): n is a, c, g, or t
  misc_feature (3314)..(4000): n is a, c, g, or t
ataattaagaaagaagaaacaataacaataagggaaacaacaataaaaaggtatatcaattatattaataaattcaatttagataatgaatataactttgacttaaattataatgaattatgaactattattgaagatagtcctaacaccaaaaataatcaatattcaaataataataatggcaaaatgtttactttattcattaatcgttataaaaattttgttattgaaaaatatttacacctcaataatattgagtaagaaactaataaagaatctaatacaaatttaatcaataatgaaaaatctatatgattatatgattctggagccggagaacatataacatgcaataaatcacacctgaaaaattatacaaaagaaaacatcaatttaatgtgtgcgaataataccgaatgtaaatttgaaggatatggaatatggagaatttgaattcagcataaagaatcatacttttatattaaaacatgtactatattctccaggtgtgattaaaaatattattagtggagtagaatgggcaaaagaggacgtaaatgctttgatcaacagtaataacaataatgtatatttaaacttattagacaaagattataataaaattgcctcttttcaggaaaatagaaacaatgaattacatatcacggctacgcacaaaaataacatcattaacaataaacttccaatattttcaataaacaagaataataatgaatttgaattattgtggcatagaagatttggtcacttttataataaagacttttattcgtatttaaaaaacacacggaatagctcatctcaaaataaaaaaaaaaaaaatattaaaaataacaaaagggtacagattttttatcttttagctttaatttttcaaattaaagtcctgctgacaatgtaaatattgaatttgataaaaacgaaatcaatcaaaacttaataaatgaaaattctaaaaaccgatctgaaaataataaaatttcatctaaaacaattgaaaattttaatcaacaattacttggaaagtagagactgcccatggactagaactgcagcttgagttttaaatagtgccggtattgctgcttgtcttggctacagtttaggactattaggaggtggtgctgatagagtttgtgttactaaattaggttcagaaggcgttgaatgctttaacgacttctggtaaaacaaataatcaatgttacgtccaaaaaatagcataaataaggatagttatcgaaataatttttttttttcattctattttcaatcattaattttaaaatagacaatcggttaataaagatttttccaattacttcttggaagtaatctgtttttcttattccaatgtttaatatggacagaatatcattcgaaaaattttcaaaggtttttcatttaatcctttcctagataaaagattagttaagattagaaattcatttcatatttaaccttatttttataaaaagaataaataagtgtttttataacaaatataacaaacataacaattataatataataataacaatgataaatttaataataaaacttttttatttaataaaaaatttttttaataaaccaaattttataaataaaaaagctttctttcgtaattttagtattttgtttattataatttattataataaactccaaatattagataagaaccattggtaagtattattttctaactcttaatattagtaattagagaagatctgttgaccaaacctattactataaaaaattataaaatatttactgattatatttataattacaataaaaatattatcaaataaaaaataaaataaatttctacttacgtcataatgtagtaggaatgttaaattatatagtaaagatagttatatacattatactttaatatttcattttttataaaataatgtaatgaaataatttgaaaaaaaaaaaaaaaaaaaaaaannttttaaaaaantttttttttcaaattatttaaagtccaatgtctcatgctctaatagaccaaatgtatttagataatatctgttataaatctcaagcattgctttctaatgaatataatttatcaggaaacttttttcattatttgtagagttatcgtctttttttctttgatttatttttattaatttcttatggcttaaattaaattgaatttattaaaaaagtccaaagccttctatttctaaatattaaacatacctagtatttatttttatagtaaaaattgaattttaaatgaaattgtcaataacgaaatctaatttcatttgatctattagtgaatttcattttcaaattcattaatattcaggatagctttgtagaacttattacttcataattttttaaatagaaaacttaatttttagaatttaatagctttaaataaatgattatcaataacaaaacaatggtaaataagcaattgtaccaaaaaaacattcatagcataatattttttattttttattttttatttttttttttttattatttattaaaaaaaattttttattataagtatgatattaaataatgaaataaataatgaaatatatatattataaatatttttaatttttatttattttttttattttatcttattttnatttaatttattttttttttttttttttttttttttnnnnnttnnnnnnnttttnnnnnttttttttnttttcctttnnntncnttnnnnttttttnnnnnnnaaaaaaaaaaaaaaanaannaaanannntnnnanntnntnnnaannntnnannannantttnnntnattnttnttnannannaatnatatanntatntttatnataanttttnatnataanaattttttttaaattattttatttttttttntnttttttttttttatttttttnttnaanattataanantgttntttaannntnttannntnatnanccnttntttatatntatataaatttttataantnattattntagaataatnttttataaaaaanaaanaaaaaaaaannatttttttttttnntcntttttattcnangntncanctncnancatnanntaaaaaaaataaaaaaataatattatattatataataattattattttataattttttaataatatnatnaaaataantaaataaatnattaaaaaaaatnnattaanaaanatnatnatcaatnatttttttttttttttttttttttttttttttnnnntttttttttttttttttttttttttttttttttttttttnnnnnnnnnnnnnnnnnnnnnnnnnnnnnnnnnnnnnnnnnnnnnnnnnnnnnnnnnnnnnnnnnnnnnnnnnnnnnnnnnnnnnnnnnnnnnnnnnnnnnnnnnnnnnnnnnnnnnnnnnnnnnnnnnnnnnnnnnnnnnnnnnnnnnnnnnnnnnnnnnnnnnnnnnnnnnnnnnnnnnnnnnnnnnnnnnnnnnnnnnnnnnnnnnnnnnnnnnnnnnnnnnnnnnnnnnnnnnnnnnnnnnnnnnnnnnnnnnnnnnnnnnnnnnnnnnnnnnnnnnnnnnnnnnnnnnnnnnnnnnnnnnnnnnnnnnnnnnnnnnnnnnnnnnnnnnnnnnnnnnnnnnnnnnnnnnnnnnnnnnnnnnnnnnnnnnnnnnnnnnnnnnnnnnnnnnnnnnnnnnnnnnnnnnnnnnnnnnnnnnnnnnnnnnnnnnnnnnnnnnnnnnnnnnnnnnnnnnnnnnnnnnnnnnnnnnnnnnnnnnnnnnnnnnnnnnnnnnnnnnnnnnnnnnnnnnnnnnnnnnnnnnnnnnnnnnnnnnnnnnnnnnnnnnnnnnnnnnnnnnnnnnnnnnnnnnnnnnnnnnnnnnnnnnnnnnnnnnnnnnnnnnnnnnnnnnnnnnnnnnnnnnnnnnnnnnnnnnnnnnnnnnnnnnnnnnnnnnnnnnnnnnnnnnnnnnnnnnnnnnnnnnnn

SEQ ID NO: 304 - DNA, 4000 bp, Escherichia coli
  misc_feature (1990)..(1991): n is a, c, g, or t
ccacatttgttatcagtatttttacacaaatttttgttggattgggcgccttgattgggatgattccattgattggacctttgattattaaagccatctctatccctgttttttggtttcttaatgccatggggtatgtggtctcaggcgtagctataaaaaaagggtatgccaccgaattagcaaaaagcaggattgttactctggggcttctgataggaattatcattgggtatattttaggccatttaattcccttaagatgaatattttaattttacaaggcccaaaccttaatttgcttggactgaagtcttctgaatccaataaaagcctcacgcttgataaactcaataaagcaattcggaaacacgtccatcaaaaagatgtaaccctgaaattcttgcaaactcataaacaatttcaagcaattaattttcttcaacgaaacagatcttgggcagacgggttaatgattattcctacatcttgggcgaaatatgattggtctatcgcagaatctatccaattaataaacctaccaacggctgtgatttattttgcaccatccttttcatttggcacacaaaaatctgattcaattattaatggagaaaatgtacaatctttcaatgggctcccgatcgaaacttgcctttccggtctggaccatttgataaactgaataaaatgaaattatatattccgtttttattttgcggcttgagtctttctgcccagtccggcgaatcacctaagaattctcatctttccattttatcatccattcaagattcagttgcacttgaaacaacaatacataagacgtttaatccgatttgggttgattccttaaaaattctattaccttgtagtggagtctctgttccaaaaaggaccatgcgcttaccaaatgccccacgtgattatagaagtggcatacaccgtggaattgatttttttgccaattggggcagtcctattatgtcagtcgctgatggtattgttatccgggcagaccatgggtatgtagaggttcccgcagaatttagagtcaatatgctagacgctagtgcaaaagtaggacatacgccttctgacatttttaataacgtcttattaggacaagctatttttttagatcatggctttgatcttattccaggattcagaacaatttccatctatgcacatttatctcacatcaatgaaaatatcaagccgggtacaaaaattaaaatgggagacgttatgggaaaaaccggtaattcaggaatacgagaaagcactttgggctcaagagccggtgctcatcttcattgggaaatgatactacaaaaagatgaacaggaaatttatttagggaaagatgtttcaaacccagacctatatgaaatgttgaaccgaattttttattaatcaattcaataaatttttgacaaaaaaaagggcaggtgaaaacctgcccttttttagtttataatcaagattgatctatttcagcaacatcattttctttgttgaaaagaaatcacctgctttaatggtatagaaatataaaccactacttacgggttttcctgcattatcaatgcctctccattttatatgatgcgtacccggattcatcgtattcaaatcgaatgagttaacctgtttacccaacacgttgtagaccgtgatattaacgtcggaaatttccggaacgtcaaatctgatggtcgtaacggggttaaacgggttcggatagttctcataaagtgcaaactcagttggcaaattcaactcatcttcattagatactgttgatgcagaccatgccaagaaattgcccatgacagcctgttgcgaagaattcggcatcattgacagattgaaggccatgaaaacaacattcccattttgcgttgagacgtcgtatgcgccaccagtccaacctgggagcattgaatcatgactctggaatggactaggtagttggtctggaganncccagccaagtggatcaactatatcggccatactgccagtagcagtcataaatgacggatccaatgtaatctcacttgtattcatctcagcagttaccgccaagtcatctttgacatttacggagtcgtaattaacatcgttcatcacccattctacgcctaagacgtcatgggcaaaatgcccttctggaagtgagatgtcatcccaaccagtgtaggtcccgagtgcctcttcagatgagaaaagaagatatcctccattcgctacaaactcacctaagggatgcacatctgtttcttctgggttctctatccagtcaagaacagcagaataaatgaccgcatcatagtgcgacaatacagaaccgaagtctggttgataattgtcatagacgctccatgtatcatactgttgacccagagcagtcaaattcgaattaacaatagaatccgcaacgcctgcaccataaccccaatacggaacatagatatcgctcattaagagaatatctgcagttgggacaagggtagtaccccaaaatgaaccaatacctgttattgatgttaaaccatcattgtctgtagcagacaactgatagttacagaggcttgtgtctgtccaagctgtgagagtcagagttgctgagtagtgaccttcaccatcatctgtcatggcttctgaataatctgtaccatcaatgtcataaacaacactcacagatgctagtgtcccgtcaccatcaaccgccataccttccacatgagcagtcgtaataccagatgctacaccaaagtgagttgatgatccttcgagatcgaccactggaggagatactgctcctagataacctatcagtgcacccataaattgctcaacagccgatatatcccagcccattgtgtcaccatcaactatataccagtccacagctgcttccggcaaaaaagaaagataaatagctgtaccgttactaccatcctgttggctagttccaacaacattatcatctgcatcatagaagatttcagtagcagtattggcttcaaccaaatctgtccaaccgagaaaatctgggatagtgtggttcaaggtataaccgtctgcaaatggagtatcaaagcttgttgcttcagctccatatacagtgagagtatctccatgaagagatgcgtctccagcggcattcattggatcatttgaacctgctgatataccgaatacgtcgtacataaaatcaccctctgcgaatgtccattccgcaacaccacagtcgaggccacataaaaggtcctggtccattagcacaaggttgttaccggcttcaacaaaggctcgataaccagcatcatgttggtcagttacaggcacagaagagacgccccagccagacacaatgatattggtccagccatgattgataacagatgcatcaatgcctttgttggacggaacgtcccagacttcatagacgaaacctgaattatccatcgcatctaagagtatagactcttgatcctcattaatgttatctaccacaagtaaaatatcggatgccatgttccaaggttcgacaatattgaaagactgaatcgcagagatggattctaatccatcattatccactagttctacccagtactgaactgaatcaccttccattagtgtgtaagtaatatcaaattgataaataccattgccatttgtagcaaccgctgctgaagctgtgagagctccagttgaagtatctccacctgcaacatagtaatatgtcaacatgtcgtttgcatccaatgcagatcctgatgcatcttcatcatcaaaaagatcaacatcaatggttctagttcctgcgatttcatatgtattagaaggctggcttatagaagctactgcaataggagctccccaaggataggtaacctttactaacaccatattatccgtggcgtcgctatatcttccccactggttttcagtccagggaccaccaaaccaggtgtaggatgtg

SEQ ID NO: 305 - DNA, 4000 bp, Escherichia coli
  misc_feature (1)..(4): n is a, c, g, or t
  misc_feature (6)..(11): n is a, c, g, or t
  misc_feature (13)..(16): n is a, c, g, or t
  misc_feature (18)..(18): n is a, c, g, or t
  misc_feature (20)..(23): n is a, c, g, or t
  misc_feature (25)..(27): n is a, c, g, or t
  misc_feature (30)..(35): n is a, c, g, or t
  misc_feature (38)..(45): n is a, c, g, or t
  misc_feature (47)..(49): n is a, c, g, or t
  misc_feature (51)..(65): n is a, c, g, or t
  misc_feature (67)..(67): n is a, c, g, or t
  misc_feature (69)..(72): n is a, c, g, or t
  misc_feature (74)..(82): n is a, c, g, or t
  misc_feature (84)..(88): n is a, c, g, or t
  misc_feature (90)..(99): n is a, c, g, or t
  misc_feature (101)..(108): n is a, c, g, or t
  misc_feature (110)..(113): n is a, c, g, or t
  misc_feature (116)..(123): n is a, c, g, or t
  misc_feature (126)..(129): n is a, c, g, or t
  misc_feature (132)..(133): n is a, c, g, or t
  misc_feature (135)..(137): n is a, c, g, or t
  misc_feature (139)..(144): n is a, c, g, or t
  misc_feature (146)..(150): n is a, c, g, or t
  misc_feature (153)..(153): n is a, c, g, or t
  misc_feature (155)..(162): n is a, c, g, or t
  misc_feature (164)..(171): n is a, c, g, or t
  misc_feature (174)..(174): n is a, c, g, or t
  misc_feature (176)..(180): n is a, c, g, or t
  misc_feature (182)..(184): n is a, c, g, or t
  misc_feature (186)..(186): n is a, c, g, or t
  misc_feature (188)..(195): n is a, c, g, or t
  misc_feature (197)..(197): n is a, c, g, or t
  misc_feature (199)..(206): n is a, c, g, or t
  misc_feature (208)..(214): n is a, c, g, or t
  misc_feature (216)..(222): n is a, c, g, or t
  misc_feature (224)..(228): n is a, c, g, or t
  misc_feature (230)..(232): n is a, c, g, or t
  misc_feature (234)..(244): n is a, c, g, or t
  misc_feature (246)..(250): n is a, c, g, or t
  misc_feature (252)..(253): n is a, c, g, or t
  misc_feature (255)..(256): n is a, c, g, or t
  misc_feature (258)..(279): n is a, c, g, or t
  misc_feature (281)..(286): n is a, c, g, or t
  misc_feature (288)..(288): n is a, c, g, or t
  misc_feature (292)..(297): n is a, c, g, or t
  misc_feature (299)..(302): n is a, c, g, or t
  misc_feature (304)..(312): n is a, c, g, or t
  misc_feature (314)..(314): n is a, c, g, or t
  misc_feature (316)..(318): n is a, c, g, or t
  misc_feature (320)..(321): n is a, c, g, or t
  misc_feature (323)..(328): n is a, c, g, or t
  misc_feature (331)..(333): n is a, c, g, or t
  misc_feature (336)..(337): n is a, c, g, or t
  misc_feature (339)..(339): n is a, c, g, or t
  misc_feature (342)..(343): n is a, c, g, or t
  misc_feature (345)..(350): n is a, c, g, or t
  misc_feature (352)..(353): n is a, c, g, or t
  misc_feature (355)..(355): n is a, c, g, or t
  misc_feature (357)..(358): n is a, c, g, or t
  misc_feature (360)..(366): n is a, c, g, or t
  misc_feature (369)..(370): n is a, c, g, or t
  misc_feature (372)..(372): n is a, c, g, or t
  misc_feature (374)..(374): n is a, c, g, or t
  misc_feature (376)..(377): n is a, c, g, or t
  misc_feature (379)..(379): n is a, c, g, or t
  misc_feature (381)..(396): n is a, c, g, or t
  misc_feature (398)..(399): n is a, c, g, or t
  misc_feature (401)..(405): n is a, c, g, or t
  misc_feature (407)..(424): n is a, c, g, or t
  misc_feature (426)..(426): n is a, c, g, or t
  misc_feature (428)..(430): n is a, c, g, or t
  misc_feature (432)..(438): n is a, c, g, or t
  misc_feature (441)..(458): n is a, c, g, or t
  misc_feature (461)..(465): n is a, c, g, or t
  misc_feature (467)..(467): n is a, c, g, or t
  misc_feature (469)..(475): n is a, c, g, or t
  misc_feature (477)..(477): n is a, c, g, or t
  misc_feature (479)..(480): n is a, c, g, or t
  misc_feature (483)..(487): n is a, c, g, or t
  misc_feature (489)..(495): n is a, c, g, or t
  misc_feature (497)..(503): n is a, c, g, or t
  misc_feature (505)..(510): n is a, c, g, or t
  misc_feature (512)..(516): n is a, c, g, or t
  misc_feature (518)..(526): n is a, c, g, or t
  misc_feature (528)..(540): n is a, c, g, or t
  misc_feature (542)..(550): n is a, c, g, or t
  misc_feature (552)..(554): n is a, c, g, or t
  misc_feature (557)..(558): n is a, c, g, or t
  misc_feature (560)..(561): n is a, c, g, or t
  misc_feature (563)..(565): n is a, c, g, or t
  misc_feature (568)..(569): n is a, c, g, or t
  misc_feature (571)..(576): n is a, c, g, or t
  misc_feature (578)..(586): n is a, c, g, or t
  misc_feature (588)..(613): n is a, c, g, or t
  misc_feature (615)..(621): n is a, c, g, or t
  misc_feature (623)..(625): n is a, c, g, or t
  misc_feature (627)..(645): n is a, c, g, or t
  misc_feature (647)..(653): n is a, c, g, or t
  misc_feature (655)..(657): n is a, c, g, or t
  misc_feature (659)..(660): n is a, c, g, or t
  misc_feature (662)..(679): n is a, c, g, or t
  misc_feature (681)..(697): n is a, c, g, or t
  misc_feature (699)..(706): n is a, c, g, or t
  misc_feature (708)..(727): n is a, c, g, or t
  misc_feature (729)..(730): n is a, c, g, or t
  misc_feature (732)..(735): n is a, c, g, or t
  misc_feature (738)..(751): n is a, c, g, or t
  misc_feature (753)..(753): n is a, c, g, or t
  misc_feature (756)..(756): n is a, c, g, or t
  misc_feature (758)..(766): n is a, c, g, or t
  misc_feature (768)..(768): n is a, c, g, or t
  misc_feature (770)..(774): n is a, c, g, or t
  misc_feature (776)..(778): n is a, c, g, or t
  misc_feature (780)..(787): n is a, c, g, or t
  misc_feature (790)..(800): n is a, c, g, or t
  misc_feature (802)..(807): n is a, c, g, or t
  misc_feature (809)..(842): n is a, c, g, or t
  misc_feature (844)..(856): n is a, c, g, or t
  misc_feature (858)..(866): n is a, c, g, or t
  misc_feature (868)..(875): n is a, c, g, or t
  misc_feature (877)..(884): n is a, c, g, or t
  misc_feature (886)..(889): n is a, c, g, or t
  misc_feature (891)..(895): n is a, c, g, or t
  misc_feature (897)..(899): n is a, c, g, or t
  misc_feature (901)..(908): n is a, c, g, or t
  misc_feature (910)..(918): n is a, c, g, or t
  misc_feature (920)..(927): n is a, c, g, or t
  misc_feature (929)..(933): n is a, c, g, or t
  misc_feature (935)..(939): n is a, c, g, or t
  misc_feature (941)..(941): n is a, c, g, or t
  misc_feature (943)..(944): n is a, c, g, or t
  misc_feature (946)..(950): n is a, c, g, or t
  misc_feature (952)..(953): n is a, c, g, or t
  misc_feature (955)..(958): n is a, c, g, or t
  misc_feature (960)..(983): n is a, c, g, or t
  misc_feature (985)..(1004): n is a, c, g, or t
  misc_feature (1006)..(1006): n is a, c, g, or t
  misc_feature (1008)..(1010): n is a, c, g, or t
  misc_feature (1012)..(1012): n is a, c, g, or t
  misc_feature (1014)..(1017): n is a, c, g, or t
  misc_feature (1019)..(1042): n is a, c, g, or t
  misc_feature (1044)..(1052): n is a, c, g, or t
  misc_feature (1054)..(1055): n is a, c, g, or t
  misc_feature (1057)..(1057): n is a, c, g, or t
  misc_feature (1060)..(1074): n is a, c, g, or t
  misc_feature (1076)..(1077): n is a, c, g, or t
  misc_feature (1079)..(1093): n is a, c, g, or t
  misc_feature (1095)..(1096): n is a, c, g, or t
  misc_feature (1098)..(1098): n is a, c, g, or t
  misc_feature (1101)..(1104): n is a, c, g, or t
  misc_feature (1106)..(1112): n is a, c, g, or t
  misc_feature (1114)..(1116): n is a, c, g, or t
  misc_feature (1118)..(1119): n is a, c, g, or t
  misc_feature (1122)..(1124): n is a, c, g, or t
  misc_feature (1126)..(1139): n is a, c, g, or t
  misc_feature (1141)..(1141): n is a, c, g, or t
  misc_feature (1143)..(1146): n is a, c, g, or t
  misc_feature (1151)..(1151): n is a, c, g, or t
  misc_feature (1154)..(1154): n is a, c, g, or t
  misc_feature (1156)..(1157): n is a, c, g, or t
  misc_feature (1159)..(1160): n is a, c, g, or t
  misc_feature (1162)..(1162): n is a, c, g, or t
  misc_feature (1164)..(1168): n is a, c, g, or t
  misc_feature (1172)..(1172): n is a, c, g, or t
  misc_feature (1175)..(1187): n is a, c, g, or t
  misc_feature (1189)..(1189): n is a, c, g, or t
  misc_feature (1191)..(1193): n is a, c, g, or t
  misc_feature (1195)..(1195): n is a, c, g, or t
  misc_feature (1200)..(1203): n is a, c, g, or t
  misc_feature (1206)..(1206): n is a, c, g, or t
  misc_feature (1208)..(1214): n is a, c, g, or t
  misc_feature (1216)..(1219): n is a, c, g, or t
  misc_feature (1221)..(1223): n is a, c, g, or t
  misc_feature (1227)..(1230): n is a, c, g, or t
  misc_feature (1232)..(1234): n is a, c, g, or t
  misc_feature (1238)..(1240): n is a, c, g, or t
  misc_feature (1243)..(1247): n is a, c, g, or t
  misc_feature (1249)..(1249): n is a, c, g, or t
  misc_feature (1251)..(1252): n is a, c, g, or t
  misc_feature (1254)..(1255): n is a, c, g, or t
  misc_feature (1257)..(1261): n is a, c, g, or t
  misc_feature (1264)..(1274): n is a, c, g, or t
  misc_feature (1277)..(1277): n is a, c, g, or t
  misc_feature (1279)..(1281): n is a, c, g, or t
  misc_feature (1283)..(1286): n is a, c, g, or t
  misc_feature (1288)..(1288): n is a, c, g, or t
  misc_feature (1290)..(1290): n is a, c, g, or t
  misc_feature (1292)..(1292): n is a, c, g, or t
  misc_feature (1294)..(1296): n is a, c, g, or t
  misc_feature (1299)..(1300): n is a, c, g, or t
  misc_feature (1302)..(1315): n is a, c, g, or t
  misc_feature (1317)..(1319): n is a, c, g, or t
  misc_feature (1321)..(1325): n is a, c, g, or t
  misc_feature (1327)..(1328): n is a, c, g, or t
  misc_feature (1332)..(1335): n is a, c, g, or t
  misc_feature (1339)..(1339): n is a, c, g, or t
  misc_feature (1341)..(1343): n is a, c, g, or t
  misc_feature (1345)..(1346): n is a, c, g, or t
  misc_feature (1348)..(1358): n is a, c, g, or t
  misc_feature (1360)..(1360): n is a, c, g, or t
  misc_feature (1363)..(1365): n is a, c, g, or t
  misc_feature (1368)..(1368): n is a, c, g, or t
  misc_feature (1370)..(1372): n is a, c, g, or t
  misc_feature (1374)..(1375): n is a, c, g, or t
  misc_feature (1377)..(1381): n is a, c, g, or t
  misc_feature (1384)..(1384): n is a, c, g, or t
  misc_feature (1386)..(1387): n is a, c, g, or t
  misc_feature (1389)..(1392): n is a, c, g, or t
  misc_feature (1394)..(1394): n is a, c, g, or t
  misc_feature (1396)..(1399): n is a, c, g, or t
  misc_feature (1402)..(1402): n is a, c, g, or t
  misc_feature (1406)..(1407): n is a, c, g, or t
  misc_feature (1410)..(1418): n is a, c, g, or t
  misc_feature (1421)..(1425): n is a, c, g, or t
  misc_feature (1429)..(1429): n is a, c, g, or t
  misc_feature (1431)..(1435): n is a, c, g, or t
  misc_feature (1437)..(1444): n is a, c, g, or t
  misc_feature (1447)..(1448): n is a, c, g, or t
  misc_feature (1450)..(1462): n is a, c, g, or t
  misc_feature (1466)..(1467): n is a, c, g, or t
  misc_feature (1471)..(1471): n is a, c, g, or t
  misc_feature (1474)..(1484): n is a, c, g, or t
  misc_feature (1486)..(1488): n is a, c, g, or t
  misc_feature (1492)..(1503): n is a, c, g, or t
  misc_feature (1505)..(1505): n is a, c, g, or t
  misc_feature (1508)..(1509): n is a, c, g, or t
  misc_feature (1511)..(1518): n is a, c, g, or t
  misc_feature (1522)..(1525): n is a, c, g, or t
  misc_feature (1528)..(1528): n is a, c, g, or t
  misc_feature (1530)..(1530): n is a, c, g, or t
  misc_feature (1533)..(1535): n is a, c, g, or t
  misc_feature (1537)..(1540): n is a, c, g, or t
  misc_feature (1542)..(1542): n is a, c, g, or t
  misc_feature (1544)..(1545): n is a, c, g, or t
  misc_feature (1548)..(1551): n is a, c, g, or t
  misc_feature (1555)..(1557): n is a, c, g, or t
  misc_feature (1559)..(1560): n is a, c, g, or t
  misc_feature (1562)..(1563): n is a, c, g, or t
  misc_feature (1566)..(1566): n is a, c, g, or t
  misc_feature (1568)..(1570): n is a, c, g, or t
  misc_feature (1573)..(1576): n is a, c, g, or t
  misc_feature (1580)..(1580): n is a, c, g, or t
  misc_feature (1582)..(1583): n is a, c, g, or t
  misc_feature (1587)..(1592): n is a, c, g, or t
  misc_feature (1594)..(1605): n is a, c, g, or t
  misc_feature (1607)..(1609): n is a, c, g, or t
  misc_feature (1611)..(1613): n is a, c, g, or t
  misc_feature (1615)..(1620): n is a, c, g, or t
  misc_feature (1622)..(1622): n is a, c, g, or t
  misc_feature (1625)..(1630): n is a, c, g, or t
  misc_feature (1632)..(1632): n is a, c, g, or t
  misc_feature (1634)..(1634): n is a, c, g, or t
  misc_feature (1636)..(1636): n is a, c, g, or t
  misc_feature (1638)..(1641): n is a, c, g, or t
  misc_feature (1645)..(1645): n is a, c, g, or t
  misc_feature (1647)..(1650): n is a, c, g, or t
  misc_feature (1652)..(1653): n is a, c, g, or t
  misc_feature (1655)..(1657): n is a, c, g, or t
  misc_feature (1659)..(1662): n is a, c, g, or t
  misc_feature (1665)..(1666): n is a, c, g, or t
  misc_feature (1668)..(1668): n is a, c, g, or t
  misc_feature (1670)..(1674): n is a, c, g, or t
  misc_feature (1676)..(1676): n is a, c, g, or t
  misc_feature (1678)..(1680): n is a, c, g, or t
  misc_feature (1683)..(1684): n is a, c, g, or t
  misc_feature (1686)..(1692): n is a, c, g, or t
  misc_feature (1695)..(1695): n is a, c, g, or t
  misc_feature (1697)..(1697): n is a, c, g, or t
  misc_feature (1702)..(1702): n is a, c, g, or t
  misc_feature (1704)..(1704): n is a, c, g, or t
  misc_feature (1706)..(1706): n is a, c, g, or t
  misc_feature (1708)..(1708): n is a, c, g, or t
  misc_feature (1710)..(1713): n is a, c, g, or t
  misc_feature (1715)..(1716): n is a, c, g, or t
  misc_feature (1718)..(1718): n is a, c, g, or t
  misc_feature (1722)..(1724): n is a, c, g, or t
  misc_feature (1731)..(1731): n is a, c, g, or t
  misc_feature (1734)..(1737): n is a, c, g, or t
  misc_feature (1739)..(1739): n is a, c, g, or t
  misc_feature (1742)..(1745): n is a, c, g, or t
  misc_feature (1748)..(1748): n is a, c, g, or t
  misc_feature (1752)..(1756): n is a, c, g, or t
  misc_feature (1758)..(1761): n is a, c, g, or t
  misc_feature (1765)..(1765): n is a, c, g, or t
  misc_feature (1767)..(1767): n is a, c, g, or t
  misc_feature (1769)..(1769): n is a, c, g, or t
  misc_feature (1774)..(1774): n is a, c, g, or t
  misc_feature (1777)..(1778): n is a, c, g, or t
  misc_feature (1780)..(1784): n is a, c, g, or t
  misc_feature (1786)..(1786): n is a, c, g, or t
  misc_feature (1792)..(1795): n is a, c, g, or t
  misc_feature (1798)..(1798): n is a, c, g, or t
  misc_feature (1800)..(1805): n is a, c, g, or t
  misc_feature (1810)..(1811): n is a, c, g, or t
  misc_feature (1814)..(1814): n is a, c, g, or t
  misc_feature (1820)..(1820): n is a, c, g, or t
  misc_feature (1822)..(1822): n is a, c, g, or t
  misc_feature (1829)..(1829): n is a, c, g, or t
  misc_feature (1833)..(1833): n is a, c, g, or t
  misc_feature (1837)..(1837): n is a, c, g, or t
  misc_feature (1840)..(1844): n is a, c, g, or t
  misc_feature (1848)..(1850): n is a, c, g, or t
  misc_feature (1852)..(1852): n is a, c, g, or t
  misc_feature (1990)..(1990): n is a, c, g, or t
  misc_feature (1992)..(1992): n is a, c, g, or t
  misc_feature (3746)..(3746): n is a, c, g, or t
  misc_feature (3758)..(3758): n is a, c, g, or t
  misc_feature (3791)..(3791): n is a, c, g, or t
  misc_feature (3806)..(3806): n is a, c, g, or t
  misc_feature (3863)..(3863): n is a, c, g, or t
  misc_feature (3876)..(3876): n is a, c, g, or t
  misc_feature (3880)..(3880): n is a, c, g, or t
  misc_feature (3972)..(3972): n is a, c, g, or t
  misc_feature (3995)..(3995): n is a, c, g, or t
nnnngnnnnnnannnncncnnnnannnagnnnnnncannnnnnnnannngnnnnnnnnnnnnnnngncnnnnannnnnnnnngnnnnncnnnnnnnnnntnnnnnnnntnnnntgnnnnnnnntcnnnnttnncnnntnnnnnntnnnnnttntnnnnnnnntnnnnnnnnttntnnnnnannntntnnnnnnnntngnnnnnnnncnnnnnnncnnnnnnngnnnnntnnnannnnnnnnnnnannnnngnnanntnnnnnnnnnnnnnnnnnnnnnntnnnnnnanttgnnnnnntnnnncnnnnnnnnntngnnnanntnnnnnntgnnntcnncnaanntnnnnnngnngncnncnnnnnnntcnnantngnngnannnnnnnnnnnnnnnntnntnnnnntnnnnnnnnnnnnnnnnnnantnnncnnnnnnntcnnnnnnnnnnnnnnnnnngtnnnnnancnnnnnnncntnnttnnnnngnnnnnnnannnnnnnannnnnnannnnntnnnnnnnnntnnnnnnnnnnnnntnnnnnnnnntnnnctnntnntnnntgnncnnnnnntnnnnnnnnntnnnnnnnnnnnnnnnnnnnnnnnnnntnnnnnnntnnngnnnnnnnnnnnnnnnnnnntnnnnnnnannnanngnnnnnnnnnnnnnnnnnnannnnnnnnnnnnnnnnntnnnnnnnntnnnnnnnnnnnnnnnnnnnntnntnnnnttnnnnnnnnnnnnnntnttntnnnnnnnnnantnnnnntnnnannnnnnnnttnnnnnnnnnnnannnnnntnnnnnnnnnnnnnnnnnnnnnnnnnnnnnnnnnntnnnnnnnnnnnnncnnnnnnnnntnnnnnnnntnnnnnnnntnnnncnnnnnannntnnnnnnnntnnnnnnnnngnnnnnnnngnnnnntnnnnnantnnannnnntnntnnnntnnnnnnnnnnnnnnnnnnnnnnnntnnnnnnnnnnnnnnnnnnnntngnnntngnnnncnnnnnnnnnnnnnnnnnnnnnnnnannnnnnnnntnntnttnnnnnnnnnnnnnnntnntnnnnnnnnnnnnnnngnncnttnnnntnnnnnnnannntnnccnnnannnnnnnnnnnnnntncnnnnccttnttntnngnntngnnnnntttnttnnnnnnnnnnnnntnannntnctttnnnntcnannnnnnntnnnnannnttannnntnnnggtnnnatnnnnntntnnanntnnnnnaannnnnnnnnnnttntnnncnnnnantntntnnnaanncnnnnnnnnnnnnnngnnntnnnnntnnggannnntgtntnnngnntnnnnnnnnnnntntgnnnttntnnnanncnnnnnttntnnannnntntnnnnaanaatnnaannnnnnnnnttnnnnntatnannnnnannnnnnnnagnntnnnnnnnnnnnnnaacnncttncannnnnnnnnnnannnaagnnnnnnnnnnnncnatnnannnnnnnncttnnnnttnantannnannnnangnnttnnnntctnnncnntnngantnnnttnnnnttcntnntcannnnnntnnnnnnnnnnnncnnntnnntnnnnnnanttnnnnnntntntntnnnnggtntnnnnanntnnntnnnnagnntncnnnnntntnnntanncnnnnnnnaantnttttnantncnannnnanntntttnnnattttanttnnnntnttnnnnttnattnnnnntnnnnttcncnanttttnttnnannnnntnaaactnnnntcnannnnnntcaannttntccacnancttgccnacgntaanccnnnnntttnnntngtgaggtacacaggaggtacaaaaaatggcgtaaaaaggcttagcaacgattatcaacgatacttgagcaacaaaaaaggcgcccgtaaagagcgccatattaatcgattataatcaatttaactatttgataatcangnatttacttgccgatgcaaaacttggaaaatatggtcccaagtatttcgtcagtagagatttgaccggtgatttctccgaggtagtgcatgcattctctaatgtcttgggcgaggaagtctccggagaggccggattgtagaccgttgagggtacgtaggattgcgtcgtgggcatttagcagggcttcgtaatgacgtgcgttggtgacgataatgtcattttcgccagtttgtgttgactgtatggtatctgtaagctgtttttcgagtacgtcgatattttggtcatgtgaagctgaaagaaagatgaacgaagtgttgggcttttcacgagtgaggcgtttgtataggtctgtgagctgttgttgggttgcggatccgatcttatctattttgttaaaggcaacgatgaggcgtttatctgtgcagtgggggaggactcttccagcgattttttcaatgtcttgtgtcgatccagtggcatcaataagccagatgacgatgtgggcttgatctagtttttggaaggtgcgttcgatccccatattctcgatggcatcgtgcgtttcccgtataccggcagtgtcgataaagcggaaagtaattccttgtaatacgacggtatcttcgatgacatcgcgggttgtaccgtgtatgtccgagacgatggctttatcttctttgacaaggcggttgagcagtgtcgatttcccggcgttggtttctcctataatggcagtaggtacaccgtttttgatggcattgccgagtgtgaacgaatcggaaaggcgcttaatgactcgttctatttcactggcgaggtcggttagtttctcccgatcggcaaattctacttcttcttcgctgaaatcaagttcgagttcaacgagcgaggcgaatgtgagtagtttttcccgtagttggataagttctcggctgaatcctccacgcatttgttgcatagctaaacgatgcgaggccgccgaggtggaagcgataaggtcggccacggcttcggcttgtgagaggtcaagtttcccattggtaaaagccctacgggtaaattctcccggttgggccaggcggcagcctgctcgcaatagaaggctgatgatttgttgttgaatgtaaatcgacccgtggcaggatatctcgactgtatcttctcctgtaaatgaatggggggcgatgaaaagcgtaacgactacatcgtcaatgggagtttcgttctcatcggcgattgttccgtagtgtgctgtattgggctttgcttcggatagttttttcttgtttgcggtgtgaaatatacgatcggttataatgatagcgtttgttccgcttatgcgaattacggcaatacctcccataccgggagcggtagagatggcgcaaatcgtatcttcgggtattggcttgtttagtttaagttccatatttcaagggataggtcgctttctattttatgttcaatactgtcgggtaagttgtggaaaaaatctattccggtcactcgttccacactgtcgatggtgattgccaactcttttagagacggttgttccgcttcattgtcgaatataaatgcgattcctctgggcgtgccggtatacggaacagcgactactttgaaaaagcgggcagggacgactatctcgtgtcgtccgattgtctttctcggagtagaaacgatgggtccgcaagtaatgagtagtgcactgtctcgttgtacccattcacgtatttgttcttccagntctttccagcgncctcggtttaattcgggaatttgcggacagatntttgagagcaggaangattcttccattgctgtttcgttccatttcatatcggcagccggagccatatgtccncggtcgtatccgntatncgtgtaatcacgggtgtctatcattgtgcccactacatcgtagtcgggggtaaatcggttgttgcgtgtagcactaccttgcagttcgtctngtagtaattcgtaacttacccanttggg

SEQ ID NO: 306 - DNA, 4000 bp, Escherichia coli
  misc_feature (11)..(11): n is a, c, g, or t
  misc_feature (61)..(62): n is a, c, g, or t
  misc_feature (68)..(68): n is a, c, g, or t
  misc_feature (125)..(125): n is a, c, g, or t
  misc_feature (165)..(165): n is a, c, g, or t
  misc_feature (182)..(182): n is a, c, g, or t
  misc_feature (185)..(185): n is a, c, g, or t
  misc_feature (194)..(194): n is a, c, g, or t
  misc_feature (227)..(227): n is a, c, g, or t
  misc_feature (248)..(248): n is a, c, g, or t
  misc_feature (266)..(266): n is a, c, g, or t
  misc_feature (326)..(326): n is a, c, g, or t
  misc_feature (478)..(479): n is a, c, g, or t
  misc_feature (500)..(500): n is a, c, g, or t
  misc_feature (509)..(509): n is a, c, g, or t
  misc_feature (566)..(566): n is a, c, g, or t
  misc_feature (593)..(593): n is a, c, g, or t
  misc_feature (647)..(647): n is a, c, g, or t
  misc_feature (689)..(689): n is a, c, g, or t
  misc_feature (710)..(710): n is a, c, g, or t
  misc_feature (773)..(773): n is a, c, g, or t
  misc_feature (812)..(812): n is a, c, g, or t
  misc_feature (917)..(917): n is a, c, g, or t
  misc_feature (977)..(977): n is a, c, g, or t
  misc_feature (1070)..(1070): n is a, c, g, or t
  misc_feature (1721)..(1721): n is a, c, g, or t
  misc_feature (1921)..(1921): n is a, c, g, or t
  misc_feature (2007)..(2007): n is a, c, g, or t
  misc_feature (2497)..(2497): n is a, c, g, or t
catcttctgcntaggcattactttgataataagcatctacattagcagtaagtccttttgnnaacttntaagttgctcctgcatttactgtccatcttgatactcctgcaaattcttttccatcntaagttccacttgttacctttggtactatgtatgaaactntttctctcaatgttaanttntcaaaatantgtgccattgataattgtgctccaattcttctnacttttccatcaaagttttgnttattagaactgaatggnttagtcttatcataataaatttcatttttagaatttatgtagaatacagaagttgccacngaagtattcttgtaagcgtctcttagtcctatttcaaagatatcattcttttgagtttttacaggtccataccaagctccagcatcttgtattgttggagttcttaaagctcttgtatagttaaagaaaacatttcctgtatcagaatatanntagtttactccaaattcaaanctatcattncttgcatagtcagctgactgaggttttatttcacttaattgccaagtcataggattntaaacttttgaactatattcatatttnactttttctctacgataaccttgagtaaattgccacttaccaaaagttgatttntttgtgatataacccgcaaatgattctcttttatcatcaggngctttttgacttactccattnacaaagacatcatctttaaaatctctttttccatctctatagtcaagtcccaatgtaacatanctatcttttgcataagtgtatttaacttctggtcttaanaaatattcagaagttgaattattttggaatttatctttattatgatagtatccagctgttaggaaaatatcaattttatcatttattttttgattgtatttagcnttgacaatatcatttataccataagtataaccactccaagaacctacttgtcttgggttnttatcaaattgttctttgcttaaagaacctgtatagtaatctttatcttcactatgattatagttgattgcaatacttccattatctaataantattttcctcttaaccaaagactatctgttttatctttcttgttttcatattggggacttctatctctataatctttagatgtacttcctgaataagaagcatttaatagaagtttatctcctacttttccacctaaatgaacattttctcttaaagttctccaagaacctacttctaatcctgctccaccatatacagttttgtttgttggtgctttagtgattatatttactaccccaccaatagctccatctccatacataactgctcctgctccttgaagaacttctatttttgaaatttcttcaactggaacagaattcaaattaaatcctgcaagtccacttacaggtataccatctaacaagataacagtattaaattgtgctgttgctcctgaacctcttaaatctattgttggagaagaaccgtccatttctctaacaacaactccaggtactcctctaagtgcatcagcaatagtttttgcacctttttctttaatttcttttgcatttacaactgtcatatttttagttgtttcacgaacagaagttccaaaactatcagaagttacaactgtttgtttaagctccaaaacaggagtttcttctgcaaaagcactcacacttcctaatacaattaaagcnaataacataaattttttcttcatacttcctcctcttaaatatgtaatattttatgaataaaataaaaaagattaggaaacagaagatgcctaatcaaaaaaatattaataatggtaagtctcctgacttagtttcaacctacttttacaccttcccagtttcccagtggttattgtaatttcgtccaccatacagtagcntttgctgtgtgggattctcacccaacttcctttattaagccaataagcacctatttgtttcttgtctttatggtactatatatgantataattgtcaataaaataaaaaacaccacttattatagaaagtagtgttttcttttattatttactttaatttccaagtagaaccttagggaagtcatatttacaatatgattaagcactttgctcctacacctacaaggacttacctacctgttaaaataattatactctactaagagatatatgtcaaatttttatttattaatcatataccaaaattgtgtggtggaaaataaagtatttctattttcataaactttatatttattgcttttatactttctttttcataacatctccaataataattacatataaaatcagctaattgaatctcaaaattctttgctgaatctacataatatactttatctaaatttatcttggaattaaaataaaactcaccttgtaaatattcttctaatgtgttaatagaaccaacttttattgttttattatctagttttattataagatttgcttgattanttattaaatttagagttgctaatcttgttactaaaagttttataaaataattatataatatattaactttttcaataggtttttctaagttatttttatcaataactataaaaactggaatataaaaattattttttgacattttatttgaaatagatagtagcatgtttcttttatcataattttttatcatagaacctttgatttcaaccatattatctaagttattgttaattttataagtagacaattcttttttaaataattgtctagcctttaaggcattgttagtcaaatatcctcctataataaagtatctatctttactatttttatgtaaatttcctgactcatcaagaattaaatacaaattatccaaaatatcacttcctcaattaatttttccaaacttcacttggtttaaatgtttctgaacttttatcttcaatatcattatgtatttttaactctaattgtatattaaaaccttctcctactaccagagcatgtccagtttttaaatatgataatcttaataattgtgcatctaaaatataaggtatactttttctcatttgttctaaatcaatattatttcttattctatgtaaaataaaattattacattgagataaaactgtttttgatagttcagaaggtctttgactagataaaatcataaatatcccaaattttcttccttcttttgctattttttcaaatacagcaataggattaaagctagtgacatctgtattttctgatatataagtatgtgcttcatcaaaaataaaatggattaaattttttataccactctttctattatttttttctctttcataaatattatttaaaataaaacttgtaataaaaagtaaatcatgattatcataaccactacaatttattatttcaaatgctttatctttgtgttttaataataaattaaatttatttaacttgtttttgtcacttgaaaatagagtttttgaatattgattaattaaattatcaactctagtgattaatggtgagcaataatttctaatttgatttccaccttttgcttcttctattgacaatatagtatccaaagctatttttaaagtcattatatcttttatagaaacttcagcgtctcttaaattaacatataaaaattcttcagcattattttcccctatatactttaagatataattgtctaagctactcaaaaaattttcctctactatttgagtagaaaaattgctatatttagaatcatagttacttaaattttttttaatattttcatcatcaatttcacttaaaaaacttattattttatttctctttgcaactgcatctgtttgttggctttcatataattttttggcacaataaacttttatccagttagatatattatcacttgactttttttctaaaagatttcctaattttaaagtatttattaagataggaagttgaacagcagtagaaggaagtactaaattt

SEQ ID NO: 307 - DNA, 4000 bp, Escherichia coli
  misc_feature (1991)..(1991): n is a, c, g, or t
cgccgtcttcgcctgcgcgttcgtgctcgccgtgacgaaatccttcatcccctcaatctctggttctcgctcgatcgccgctcgcatcgcgcgcatcatctcgcgcgcctccatctcttttgttctcgctctcttttccttggacgcgcgcctcgcggcgtccgctcgttcatcccgagacgcagcgtcgctgcttccgaacgcgttcgtgctccccaaccgtctcgcgttcgacgccgccgcgcgcgatgacgacgatgacgacgaggacgacggcggcggcgacaaccgctcgatcgcccgtcgacgctcctcctcgctcgcgaaccgaggctttgactccctgtcaccgccctcgttcgattccacacgcgcgacgaccgcgccgcgtcgtccgcgaccgacgcgaccgacgcggcgcgccaccgcggacgtcgacaccgacggcgagaccgacgcgcgcgcggctctctccgtcggcaccgcgcgcgtccatcgcgcgacgtccatgaggcgcgcgctcgaatatgattctcgagggactccattctcaccagttcacaggagtacgcgaaagtactctttgagctgagcaaactggaatgatgagtgaccaagaggaagatgaagaaatgaattggataccgacgacgccgacggcgctcgctacgagttttgtaatactacgtacaaccaaaatgttttactacaaatgtactacaaatgattcgaacactcgtgtatacgacgaacacgcgcacacgtagctttaccctccttcaactatgtcgtcgagatgggcccatctacattgccttgtttcattcacgaagcgggcgccgtcgcgtcgcgtcgattgagctcgttcaagacagccaccgcctcgtccatcgtgcgaggtcgcctatcatacgcccgacgtcgggtgaattgttcagccatggagattattcttctatctgccgcgctcccggatttacgaaccgcacccgaagccacgagcacgctcgcgcagcgttcgtgcaactcagtcggcacgagcgccttcatcttttcaaacaagtcttcaagcgagtcgccggcggcggaagcttcctcctgagcgttggcgatggcgacgcgagccgacgcatcgtccaaagcttgccttgcgagctgtttcgcattcattttgaaccccgtgagatctgccaccgttcgtcgaagcacctgcgcacccgacagcgccgcggttgcgccgtcgtcgacgtcccgcgccgcgcgcgcgatcggtccgtacgccgcgaattcttcttcagccctatacacgtgcgagcgagcgaacgaatcgacgacgatgcaaaactcatccgtcagttcaaatcccgtcggggcgggtgtcgagcgtcgaggtcgtgtcgagatcgcaaagcgcgcttgtgtttgacgcaccacttgtgccgattttcgacggaacgaaacggcttcgtgaagacgaacacgagactactcgtcggaaactggcgcgcgcaatcttcgatgcgtctcttgacgctgcgcatgcgcgcgctccatcgcgccgacacccgtcgcgactcgatcgcgtccaacgcatcaatcatgtcctgcgtgagcgggggcgccttgtgcaaacgaaatccatcgttttcatccctggacgccgatcgcgcgtcggcgcttccatcgcgatcgccgcgcggtgcgccaccgtcgtccaccccggccgtcgtcgtcgtcgtcgtccgccgcggctcccgacgacgacccgacggcggccgcggcatgcgtcgatgcgacgcgcgcgggcgtctcgaatcgcgcgccgacgacgcgacgcgtgcgcgcgtcgacgcgtgcggtgcgcccggtcgccgatgcgcgtcgagcgcgcgtcgagtccgcgcgcgcgtcgacctctcgtgggggatcacacatggatgcaaaaacgagttttgttgatttgaattcaaatgtagggttccttcgggcgngaaagcaacgcgacacgtcgacgcgtgaacaacacgcgacgaacgtgaacgttacagacaccgttggggtgcgaggcgtcagattacgtcgtgggcaccgaccatgcgaccgacggtggcgcgctcgacgacgccgaccgcggcggcgacgcgcgcgacacggacgaaacgtccgtcttcgcgcgtctcgcgcgcgcgcggtgcgacgacgccgccgcgagcgacgccgcgaggcgaggatgagggacagcgtcagcgatccgtcgcgccgcgcgcgccggcggcgttcgcgtcgatgacgcgcgtcggtgggcgcggacgattgaggcgcggcgacgcgcacgtcgcgcgcttcctgaagcgcctgttcagccgcgacgaggacgacggtgcggacgaggagagagagaaggaggagtctgaaaaagagaaacccgaagaggtcgtcgacgcgtcgagcgctccggcgcaggcgacgagcgcgcccgcggcgtcgtcgttgcccaaggtggacatgaagacgacgctgagcgatctggacgcgctcttggggatcgatacggaggcggaggcggcgaagaaggcggcagaagaggaggcgtttcgagcgacgctgcgaccgccgtcgacggacgagggcgacgcgtcctcggacgcaccggcgagcgacgacgggatgtccatcagtccgcaggcgctcgacgctttgaaagcggcggaatcgcagcgacgggggttgggacaggataaaagcgcggagttggagaagatgttgaaggatttgggcgagagggcgagcgaaaacaaggcgctggggaaaagcgtgagcgacgacccggagcttcaagcgtcgttcaataaattggttactatgttagaggagcccgaggaagaggtgatctcgcccgaaaatgtcgagcgaatcaagaaggaggtattcggcatgcaaacgttttacgtcacttcggtggaaaatttgggcgccgagatgaacggggcgggtgtcttgttcaagggtaatttgcgaacggagcgcgcggtggtttgggaaacgttacaaaaggaactcaagcgcatgttcaaggacgagtacaccgcattcatgctcgaagaaccgctctcggaggaaggtccgagcggagacgtggcaatcgactccaagtacggaccgcgcgtgagtttcctcatcgtaccgagcgatcgtgcgggtccgattccggataccgcgggttggcagtaccttctcgcgctcgcgctcatggctctcacggtgggttccgccgttcagctgggcttggttgcggaaatctccaagcttccgccggaaaccatgtcgtggttgcaacaagccggcgacgtcgatttacccgaaggcgtgttgccgccgggtttggaagactttgactccgtcgcgtacgtcgaagccgcgcttccgatcacgatcggtgtcatggcggcgagcgtgggacacgagatcggtcatcaaattgcagcgtttatgcgcaagattaaaatcggcgttccgttcttgattccgaactcgcagctcggaacgttcggcacgttgacgcagttcaagagcatacccgagacgcgcgccgatttgttcgacgtcgccgccgcgggcccactcgctgggagcatggtggcgttgaacctgttcgtgtacggtttgacgctctccgtcggcggggacaacccggatttgatccccatcccggactcgttgttcaacaccagccttttgctcggcggtatttcgcagttcttcttgcacgtcagcgctaaaggcgtgctcgtacacccgtatttcatcgccggatggtgcgcgctgacgacgcaagcgctcaacttgctccccgtcggatccatcgacggaggccgcatggcgcaaaccgcgttcggccggcgcgttctcggcgccacctccctcggcacgtacatcagcctcagtttcggcatcatcgccagctcactcgccttaccgtgggccatttacatcgtattga

SEQ ID NO: 308 - DNA, 4000 bp, Escherichia coli
  misc_feature (1)..(2): n is a, c, g, or t
  misc_feature (5)..(5): n is a, c, g, or t
  misc_feature (7)..(7): n is a, c, g, or t
  misc_feature (9)..(9): n is a, c, g, or t
  misc_feature (11)..(11): n is a, c, g, or t
  misc_feature (13)..(20): n is a, c, g, or t
  misc_feature (24)..(26): n is a, c, g, or t
  misc_feature (28)..(35): n is a, c, g, or t
  misc_feature (38)..(39): n is a, c, g, or t
  misc_feature (42)..(45): n is a, c, g, or t
  misc_feature (48)..(49): n is a, c, g, or t
  misc_feature (51)..(54): n is a, c, g, or t
  misc_feature (56)..(57): n is a, c, g, or t
  misc_feature (59)..(59): n is a, c, g, or t
  misc_feature (62)..(64): n is a, c, g, or t
  misc_feature (66)..(66): n is a, c, g, or t
  misc_feature (71)..(71): n is a, c, g, or t
  misc_feature (73)..(73): n is a, c, g, or t
  misc_feature (75)..(80): n is a, c, g, or t
  misc_feature (82)..(83): n is a, c, g, or t
  misc_feature (86)..(86): n is a, c, g, or t
  misc_feature (89)..(90): n is a, c, g, or t
  misc_feature (93)..(93): n is a, c, g, or t
  misc_feature (96)..(97): n is a, c, g, or t
  misc_feature (100)..(101): n is a, c, g, or t
  misc_feature (103)..(104): n is a, c, g, or t
  misc_feature (106)..(110): n is a, c, g, or t
  misc_feature (114)..(114): n is a, c, g, or t
  misc_feature (116)..(119): n is a, c, g, or t
  misc_feature (121)..(121): n is a, c, g, or t
  misc_feature (124)..(127): n is a, c, g, or t
  misc_feature (130)..(131): n is a, c, g, or t
  misc_feature (133)..(134): n is a, c, g, or t
  misc_feature (136)..(136): n is a, c, g, or t
  misc_feature (140)..(143): n is a, c, g, or t
  misc_feature (146)..(152): n is a, c, g, or t
  misc_feature (155)..(156): n is a, c, g, or t
  misc_feature (158)..(162): n is a, c, g, or t
  misc_feature (164)..(164): n is a, c, g, or t
  misc_feature (169)..(169): n is a, c, g, or t
  misc_feature (171)..(174): n is a, c, g, or t
  misc_feature (176)..(177): n is a, c, g, or t
  misc_feature (179)..(183): n is a, c, g, or t
  misc_feature (185)..(185): n is a, c, g, or t
  misc_feature (188)..(189): n is a, c, g, or t
  misc_feature (191)..(192): n is a, c, g, or t
  misc_feature (194)..(204): n is a, c, g, or t
  misc_feature (206)..(209): n is a, c, g, or t
  misc_feature (212)..(213): n is a, c, g, or t
  misc_feature (215)..(219): n is a, c, g, or t
  misc_feature (223)..(233): n is a, c, g, or t
  misc_feature (235)..(236): n is a, c, g, or t
  misc_feature (238)..(241): n is a, c, g, or t
  misc_feature (244)..(244): n is a, c, g, or t
  misc_feature (246)..(246): n is a, c, g, or t
  misc_feature (249)..(249): n is a, c, g, or t
  misc_feature (252)..(252): n is a, c, g, or t
  misc_feature (254)..(266): n is a, c, g, or t
  misc_feature (269)..(275): n is a, c, g, or t
  misc_feature (278)..(282): n is a, c, g, or t
  misc_feature (284)..(289): n is a, c, g, or t
  misc_feature (291)..(294): n is a, c, g, or t
  misc_feature (296)..(296): n is a, c, g, or t
  misc_feature (298)..(298): n is a, c, g, or t
  misc_feature (300)..(316): n is a, c, g, or t
  misc_feature (319)..(336): n is a, c, g, or t
  misc_feature (338)..(341): n is a, c, g, or t
  misc_feature (344)..(345): n is a, c, g, or t
  misc_feature (350)..(350): n is a, c, g, or t
  misc_feature (353)..(353): n is a, c, g, or t
  misc_feature (357)..(357): n is a, c, g, or t
  misc_feature (360)..(361): n is a, c, g, or t
  misc_feature (364)..(366): n is a, c, g, or t
  misc_feature (369)..(376): n is a, c, g, or t
  misc_feature (378)..(380): n is a, c, g, or t
  misc_feature (382)..(382): n is a, c, g, or t
  misc_feature (384)..(385): n is a, c, g, or t
  misc_feature (388)..(389): n is a, c, g, or t
  misc_feature (391)..(405): n is a, c, g, or t
  misc_feature (407)..(410): n is a, c, g, or t
  misc_feature (412)..(418): n is a, c, g, or t
  misc_feature (420)..(420): n is a, c, g, or t
  misc_feature (423)..(425): n is a, c, g, or t
  misc_feature (428)..(430): n is a, c, g, or t
  misc_feature (433)..(448): n is a, c, g, or t
  misc_feature (450)..(457): n is a, c, g, or t
  misc_feature (459)..(460): n is a, c, g, or t
  misc_feature (462)..(469): n is a, c, g, or t
  misc_feature (472)..(474): n is a, c, g, or t
  misc_feature (477)..(477): n is a, c, g, or t
  misc_feature (479)..(479): n is a, c, g, or t
  misc_feature (481)..(482): n is a, c, g, or t
  misc_feature (486)..(486): n is a, c, g, or t
  misc_feature (488)..(493): n is a, c, g, or t
  misc_feature (495)..(497): n is a, c, g, or t
  misc_feature (503)..(506): n is a, c, g, or t
  misc_feature (509)..(510): n is a, c, g, or t
  misc_feature (512)..(515): n is a, c, g, or t
  misc_feature (517)..(518): n is a, c, g, or t
  misc_feature (521)..(521): n is a, c, g, or t
  misc_feature (524)..(527): n is a, c, g, or t
  misc_feature (531)..(537): n is a, c, g, or t
  misc_feature (539)..(546): n is a, c, g, or t
  misc_feature (548)..(550): n is a, c, g, or t
  misc_feature (554)..(557): n is a, c, g, or t
  misc_feature (559)..(561): n is a, c, g, or t
  misc_feature (563)..(564): n is a, c, g, or t
  misc_feature (566)..(566): n is a, c, g, or t
  misc_feature (569)..(569): n is a, c, g, or t
  misc_feature (571)..(572): n is a, c, g, or t
  misc_feature (574)..(574): n is a, c, g, or t
  misc_feature (576)..(576): n is a, c, g, or t
  misc_feature (578)..(583): n is a, c, g, or t
  misc_feature (585)..(593): n is a, c, g, or t
  misc_feature (595)..(598): n is a, c, g, or t
  misc_feature (600)..(600): n is a, c, g, or t
  misc_feature (603)..(605): n is a, c, g, or t
  misc_feature (607)..(609): n is a, c, g, or t
  misc_feature (611)..(611): n is a, c, g, or t
  misc_feature (613)..(613): n is a, c, g, or t
  misc_feature (616)..(616): n is a, c, g, or t
  misc_feature (618)..(624): n is a, c, g, or t
  misc_feature (626)..(626): n is a, c, g, or t
  misc_feature (629)..(630): n is a, c, g, or t
  misc_feature (632)..(634): n is a, c, g, or t
  misc_feature (636)..(640): n is a, c, g, or t
  misc_feature (642)..(643): n is a, c, g, or t
  misc_feature (645)..(656): n is a, c, g, or t
  misc_feature (658)..(658): n is a, c, g, or t
  misc_feature (660)..(666): n is a, c, g, or t
  misc_feature (668)..(670): n is a, c, g, or t
  misc_feature (672)..(674): n is a, c, g, or t
  misc_feature (676)..(685): n is a, c, g, or t
  misc_feature (688)..(690): n is a, c, g, or t
  misc_feature (692)..(692): n is a, c, g, or t
  misc_feature (694)..(696): n is a, c, g, or t
  misc_feature (698)..(705): n is a, c, g, or t
  misc_feature (708)..(710): n is a, c, g, or t
  misc_feature (715)..(718): n is a, c, g, or t
  misc_feature (720)..(721): n is a, c, g, or t
  misc_feature (723)..(733): n is a, c, g, or t
  misc_feature (735)..(739): n is a, c, g, or t
  misc_feature (741)..(743): n is a, c, g, or t
  misc_feature (747)..(750): n is a, c, g, or t
  misc_feature (752)..(755): n is a, c, g, or t
  misc_feature (758)..(765): n is a, c, g, or t
  misc_feature (769)..(779): n is a, c, g, or t
  misc_feature (781)..(781): n is a, c, g, or t
  misc_feature (783)..(785): n is a, c, g, or t
  misc_feature (789)..(800): n is a, c, g, or t
  misc_feature (802)..(803): n is a, c, g, or t
  misc_feature (805)..(806): n is a, c, g, or t
  misc_feature (808)..(813): n is a, c, g, or t
  misc_feature (815)..(827): n is a, c, g, or t
  misc_feature (829)..(838): n is a, c, g, or t
  misc_feature (840)..(842): n is a, c, g, or t
  misc_feature (844)..(849): n is a, c, g, or t
  misc_feature (851)..(851): n is a, c, g, or t
  misc_feature (853)..(853): n is a, c, g, or t
  misc_feature (855)..(861): n is a, c, g, or t
  misc_feature (863)..(871): n is a, c, g, or t
  misc_feature (873)..(875): n is a, c, g, or t
  misc_feature (877)..(880): n is a, c, g, or t
  misc_feature (884)..(890): n is a, c, g, or t
  misc_feature (893)..(898): n is a, c, g, or t
  misc_feature (900)..(901): n is a, c, g, or t
  misc_feature (903)..(934): n is a, c, g, or t
  misc_feature (936)..(941): n is a, c, g, or t
  misc_feature (943)..(950): n is a, c, g, or t
  misc_feature (952)..(953): n is a, c, g, or t
  misc_feature (956)..(958): n is a, c, g, or t
  misc_feature (960)..(960): n is a, c, g, or t
  misc_feature (962)..(964): n is a, c, g, or t
  misc_feature (969)..(969): n is a, c, g, or t
  misc_feature (972)..(972): n is a, c, g, or t
  misc_feature (974)..(974): n is a, c, g, or t
  misc_feature (977)..(979): n is a, c, g, or t
  misc_feature (981)..(987): n is a, c, g, or t
  misc_feature (989)..(994): n is a, c, g, or t
  misc_feature (997)..(1006): n is a, c, g, or t
  misc_feature (1008)..(1010): n is a, c, g, or t
  misc_feature (1012)..(1012): n is a, c, g, or t
  misc_feature (1014)..(1017): n is a, c, g, or t
  misc_feature (1019)..(1023): n is a, c, g, or t
  misc_feature (1025)..(1025): n is a, c, g, or t
  misc_feature (1027)..(1027): n is a, c, g, or t
  misc_feature (1030)..(1032): n is a, c, g, or t
  misc_feature (1035)..(1035): n is a, c, g, or t
  misc_feature (1039)..(1039): n is a, c, g, or t
  misc_feature (1041)..(1044): n is a, c, g, or t
  misc_feature (1046)..(1049): n is a, c, g, or t
  misc_feature (1051)..(1053): n is a, c, g, or t
  misc_feature (1056)..(1058): n is a, c, g, or t
  misc_feature (1060)..(1063): n is a, c, g, or t
  misc_feature (1066)..(1071): n is a, c, g, or t
  misc_feature (1073)..(1073): n is a, c, g, or t
  misc_feature (1075)..(1075): n is a, c, g, or t
  misc_feature (1078)..(1078): n is a, c, g, or t
  misc_feature (1080)..(1085): n is a, c, g, or t
  misc_feature (1087)..(1087): n is a, c, g, or t
  misc_feature (1089)..(1093): n is a, c, g, or t
  misc_feature (1095)..(1098): n is a, c, g, or t
  misc_feature (1100)..(1101): n is a, c, g, or t
  misc_feature (1103)..(1104): n is a, c, g, or t
  misc_feature (1107)..(1107): n is a, c, g, or t
  misc_feature (1109)..(1109): n is a, c, g, or t
  misc_feature (1111)..(1111): n is a, c, g, or t
  misc_feature (1113)..(1113): n is a, c, g, or t
  misc_feature (1115)..(1117): n is a, c, g, or t
  misc_feature (1119)..(1122): n is a, c, g, or t
  misc_feature (1124)..(1128): n is a, c, g, or t
  misc_feature (1130)..(1131): n is a, c, g, or t
  misc_feature (1134)..(1139): n is a, c, g, or t
  misc_feature (1142)..(1142): n is a, c, g, or t
  misc_feature (1145)..(1146): n is a, c, g, or t
  misc_feature (1148)..(1148): n is a, c, g, or t
  misc_feature (1152)..(1154): n is a, c, g, or t
  misc_feature (1156)..(1157): n is a, c, g, or t
  misc_feature (1159)..(1159): n is a, c, g, or t
  misc_feature (1161)..(1166): n is a, c, g, or t
  misc_feature (1168)..(1172): n is a, c, g, or t
  misc_feature (1174)..(1174): n is a, c, g, or t
  misc_feature (1177)..(1177): n is a, c, g, or t
  misc_feature (1179)..(1181): n is a, c, g, or t
  misc_feature (1184)..(1184): n is a, c, g, or t
  misc_feature (1186)..(1186): n is a, c, g, or t
  misc_feature (1188)..(1192): n is a, c, g, or t
  misc_feature (1194)..(1196): n is a, c, g, or t
  misc_feature (1198)..(1208): n is a, c, g, or t
  misc_feature (1210)..(1213): n is a, c, g, or t
  misc_feature (1216)..(1216): n is a, c, g, or t
  misc_feature (1218)..(1221): n is a, c, g, or t
  misc_feature (1223)..(1225): n is a, c, g, or t
  misc_feature (1228)..(1230): n is a, c, g, or t
  misc_feature (1233)..(1233): n is a, c, g, or t
  misc_feature (1235)..(1240): n is a, c, g, or t
  misc_feature (1242)..(1243): n is a, c, g, or t
  misc_feature (1245)..(1253): n is a, c, g, or t
  misc_feature (1255)..(1258): n is a, c, g, or t
  misc_feature (1261)..(1263): n is a, c, g, or t
  misc_feature (1265)..(1268): n is a, c, g, or t
  misc_feature (1270)..(1272): n is a, c, g, or t
  misc_feature (1274)..(1276): n is a, c, g, or t
  misc_feature (1278)..(1282): n is a, c, g, or t
  misc_feature (1286)..(1286): n is a, c, g, or t
  misc_feature (1289)..(1290): n is a, c, g, or t
  misc_feature (1292)..(1296): n is a, c, g, or t
  misc_feature (1298)..(1303): n is a, c, g, or t
  misc_feature (1305)..(1311): n is a, c, g, or t
  misc_feature (1314)..(1314): n is a, c, g, or t
  misc_feature (1318)..(1319): n is a, c, g, or t
  misc_feature (1325)..(1336): n is a, c, g, or t
  misc_feature (1339)..(1343): n is a, c, g, or t
  misc_feature (1345)..(1346): n is a, c, g, or t
  misc_feature (1348)..(1352): n is a, c, g, or t
  misc_feature (1355)..(1356): n is a, c, g, or t
  misc_feature (1358)..(1360): n is a, c, g, or t
  misc_feature (1362)..(1368): n is a, c, g, or t
  misc_feature (1371)..(1374): n is a, c, g, or t
  misc_feature (1376)..(1384): n is a, c, g, or t
  misc_feature (1391)..(1394): n is a, c, g, or t
  misc_feature (1396)..(1397): n is a, c, g, or t
  misc_feature (1401)..(1403): n is a, c, g, or t
  misc_feature (1405)..(1406): n is a, c, g, or t
  misc_feature (1408)..(1414): n is a, c, g, or t
  misc_feature (1416)..(1420): n is a, c, g, or t
  misc_feature (1422)..(1428): n is a, c, g, or t
  misc_feature (1431)..(1432): n is a, c, g, or t
  misc_feature (1434)..(1436): n is a, c, g, or t
  misc_feature (1438)..(1454): n is a, c, g, or t
  misc_feature (1456)..(1456): n is a, c, g, or t
  misc_feature (1458)..(1458): n is a, c, g, or t
  misc_feature (1460)..(1461): n is a, c, g, or t
  misc_feature (1463)..(1465): n is a, c, g, or t
  misc_feature (1468)..(1474): n is a, c, g, or t
  misc_feature (1476)..(1476): n is a, c, g, or t
  misc_feature (1479)..(1486): n is a, c, g, or t
  misc_feature (1488)..(1490): n is a, c, g, or t
  misc_feature (1493)..(1496): n is a, c, g, or t
  misc_feature (1498)..(1510): n is a, c, g, or t
  misc_feature (1512)..(1513): n is a, c, g, or t
  misc_feature (1516)..(1517): n is a, c, g, or t
  misc_feature (1519)..(1520): n is a, c, g, or t
  misc_feature (1522)..(1522): n is a, c, g, or t
  misc_feature (1525)..(1525): n is a, c, g, or t
  misc_feature (1527)..(1529): n is a, c, g, or t
  misc_feature (1531)..(1531): n is a, c, g, or t
  misc_feature (1533)..(1533): n is a, c, g, or t
  misc_feature (1535)..(1536): n is a, c, g, or t
  misc_feature (1540)..(1542): n is a, c, g, or t
  misc_feature (1546)..(1549): n is a, c, g, or t
  misc_feature (1551)..(1552): n is a, c, g, or t
  misc_feature (1554)..(1555): n is a, c, g, or t
  misc_feature (1557)..(1557): n is a, c, g, or t
  misc_feature (1563)..(1563): n is a, c, g, or t
  misc_feature (1565)..(1571): n is a, c, g, or t
  misc_feature (1574)..(1575): n is a, c, g, or t
  misc_feature (1577)..(1577): n is a, c, g, or t
  misc_feature (1580)..(1584): n is a, c, g, or t
  misc_feature (1586)..(1586): n is a, c, g, or t
  misc_feature (1588)..(1588): n is a, c, g, or t
  misc_feature (1593)..(1598): n is a, c, g, or t
  misc_feature (1602)..(1605): n is a, c, g, or t
  misc_feature (1609)..(1609): n is a, c, g, or t
  misc_feature (1611)..(1611): n is a, c, g, or t
  misc_feature (1615)..(1619): n is a, c, g, or t
  misc_feature (1621)..(1622): n is a, c, g, or t
  misc_feature (1624)..(1629): n is a, c, g, or t
  misc_feature (1632)..(1632): n is a, c, g, or t
  misc_feature (1635)..(1635): n is a, c, g, or t
  misc_feature (1639)..(1640): n is a, c, g, or t
  misc_feature (1642)..(1643): n is a, c, g, or t
  misc_feature (1645)..(1646): n is a, c, g, or t
  misc_feature (1648)..(1650): n is a, c, g, or t
  misc_feature (1652)..(1657): n is a, c, g, or t
  misc_feature (1660)..(1670): n is a, c, g, or t
  misc_feature (1672)..(1673): n is a, c, g, or t
  misc_feature (1677)..(1677): n is a, c, g, or t
  misc_feature (1679)..(1681): n is a, c, g, or t
  misc_feature (1683)..(1684): n is a, c, g, or t
  misc_feature (1687)..(1691): n is a, c, g, or t
  misc_feature (1693)..(1693): n is a, c, g, or t
  misc_feature (1696)..(1700): n is a, c, g, or t
  misc_feature (1702)..(1704): n is a, c, g, or t
  misc_feature (1706)..(1711): n is a, c, g, or t
  misc_feature (1714)..(1714): n is a, c, g, or t
  misc_feature (1716)..(1718): n is a, c, g, or t
  misc_feature (1720)..(1720): n is a, c, g, or t
  misc_feature (1723)..(1724): n is a, c, g, or t
  misc_feature (1726)..(1726): n is a, c, g, or t
  misc_feature (1728)..(1739): n is a, c, g, or t
  misc_feature (1741)..(1744): n is a, c, g, or t
  misc_feature (1746)..(1746): n is a, c, g, or t
  misc_feature (1748)..(1750): n is a, c, g, or t
  misc_feature (1752)..(1753): n is a, c, g, or t
  misc_feature (1758)..(1758): n is a, c, g, or t
  misc_feature (1760)..(1761): n is a, c, g, or t
  misc_feature (1764)..(1770): n is a, c, g, or t
  misc_feature (1773)..(1774): n is a, c, g, or t
  misc_feature (1776)..(1776): n is a, c, g, or t
  misc_feature (1778)..(1779): n is a, c, g, or t
  misc_feature (1782)..(1785): n is a, c, g, or t
  misc_feature (1981)..(1982): n is a, c, g, or t
  misc_feature (1989)..(1990): n is a, c, g, or t
  misc_feature (2366)..(2377): n is a, c, g, or t
  misc_feature (2379)..(2398): n is a, c, g, or t
  misc_feature (2400)..(2412): n is a, c, g, or t
  misc_feature (2414)..(2423): n is a, c, g, or t
  misc_feature (2425)..(2481): n is a, c, g, or t
  misc_feature (2483)..(2524): n is a, c, g, or t
  misc_feature (2526)..(2528): n is a, c, g, or t
  misc_feature (2530)..(2572): n is a, c, g, or t
  misc_feature (2574)..(2577): n is a, c, g, or t
  misc_feature (2579)..(2596): n is a, c, g, or t
  misc_feature (2598)..(2650): n is a, c, g, or t
  misc_feature (2652)..(2660): n is a, c, g, or t
  misc_feature (2662)..(2773): n is a, c, g, or t
  misc_feature (2775)..(2778): n is a, c, g, or t
  misc_feature (2780)..(2866): n is a, c, g, or t
  misc_feature (2868)..(2943): n is a, c, g, or t
  misc_feature (2945)..(2986): n is a, c, g, or t
  misc_feature (2988)..(2990): n is a, c, g, or t
  misc_feature (2992)..(3005): n is a, c, g, or t
  misc_feature (3007)..(3046): n is a, c, g, or t
  misc_feature (3048)..(3254): n is a, c, g, or t
  misc_feature (3256)..(3585): n is a, c, g, or t
  misc_feature (3587)..(3595): n is a, c, g, or t
  misc_feature (3597)..(3889): n is a, c, g, or t
  misc_feature (3891)..(4000): n is a, c, g, or t
nnatntntntnannnnnnnnttannnannnnnnnnaannaannnntanntnnnnanntnttnnnanttatnantnnnnnnannatntanntantanntannannannnnnaaantnnnnanaannnnatnnanntnaatnnnnttnnnnnnnttnntnnnnntnaaaanannnntnntnnnnnanatnntnntnnnnnnnnnnnannnnaannannnnnaaannnnnnnnnnnanntnnnnaanantantanannnnnnnnnnnnnttnnnnnnngtnnnnntnnnnnnannnntntnannnnnnnnnnnnnnnnnttnnnnnnnnnnnnnnnnnntnnnnatnnaaaanaanaaantannaannnaannnnnnnntnnntnannaannannnnnnnnnnnnnnntnnnnannnnnnnantannngannnaannnnnnnnnnnnnnnnannnnnnnnanntnnnnnnnnttnnntananannaaanannnnnnannnaaaatnnnntanntnnnnannttnttnnnnaaannnnnnntnnnnnnnnannnaaannnnannnanntnttnanntntnannnnnnannnnnnnnnannnnanaannnannnanantanannnnnnnanttnntnnnannnnntnnannnnnnnnnnnnanannnnnnntnnnannnannnnnnnnnnttnnntntnnntnnnnnnnnaannnaattnnnntnntnnnnnnnnnnnannnnnannnaaannnnannnnaannnnnnnnttannnnnnnnnnnantnnntaannnnnnnnnnnntnntnntnnnnnnannnnnnnnnnnnntnnnnnnnnnnannntnnnnnnanantnnnnnnnannnnnnnnnannnannnnaaannnnnnntannnnnnanntnnnnnnnnnnnnnnnnnnnnnnnnnnnnnnnntnnnnnntnnnnnnnntnntannnanannnataanttntnttnnntnnnnnnnannnnnnaannnnnnnnnnannnantnnnntnnnnnananaannnaanaaantnnnnannnntnnnatnnnannnntannnnnnantntanannnnnntntnnnnnannnntnnannaananantntnnntnnnnannnnntnnatnnnnnnaanaannanaaannnannanannnnnntnnnnnanaancnnnaanantnnnnntnnnannnnnnnnnnntnnnnaantnnnntnnnaannnttnannnnnntnnannnnnnnnnannnnttnnntnnnntnnngnnncnnnnnaaanttnnannnnngnnnnnnannnnnnnttnaaannaaaaannnnnnnnnnnnttnnnnntnnannnnnagnnannnannnnnnntcnnnntnnnnnnnnnattggtnnnnannaaannnanntnnnnnnntnnnnntnnnnnnnttnnannnannnnnnnnnnnnnnnnnantntnnannnttnnnnnnntnacnnnnnnnnannntgnnnnannnnnnnnnnnnnannttnnanntnctntnnnanantnnaaannnaatnnnnannanntngtttanannnnnnnaannantannnnnantnaactnnnnnnaatnnnntttnangcannnnntnnannnnnnttnctntcannanntnntnnnannnnnnctnnnnnnnnnnnannaaancnnncnntannnnntncannnnnannncnnnnnnaanannnanaanntnannnnnnnnnnnnannnnanannntnntaagnannttnnnnnnnatnnantnnaannnnaaaaaaagaccttccaaaaggaaggtcactgttgcctggcaacgttctagtctcgcagggcgtaaacccaactacattcgacgctaaagagcttaacttctgtgttcggtatgggtacaggtgtgtcctcttcgctatcgccaccagacgaaaacttcatacatctattatatcatcatttattcctttgtcaacnncttactnnaaagaacttcacttgattaagtcctcgacctattagtattagtcagctgaatgtgttaccacacttacactcctaacctattctccttgtcgtcttcaaggggtcttaatatccgtgggaaatctcatctcgaggggggcttcatgcttagatgctttcagctcttatcccttccatatttagctacccagctatgccactggcgtgacaactggtacaccattgatatgtccatcccggtcctctcgtactaaggacagctcctctcaaatttcctacgcccacgacggatagggaccgaactgtctcacgacgttctgaacccagctcgcgtaccgctttaatgggcgaacagcccaacccttgggaccgactnnnnnnnnnnnntnnnnnnnnnnnnnnnnnnnntnnnnnnnnnnnnngnnnnnnnnnncnnnnnnnnnnnnnnnnnnnnnnnnnnnnnnnnnnnnnnnnnnnnnnnnnnnnnnnnncnnnnnnnnnnnnnnnnnnnnnnnnnnnnnnnnnnnnnnnnnncnnncnnnnnnnnnnnnnnnnnnnnnnnnnnnnnnnnnnnnnnnnnnncnnnncnnnnnnnnnnnnnnnnnncnnnnnnnnnnnnnnnnnnnnnnnnnnnnnnnnnnnnnnnnnnnnnnnnnnnnnannnnnnnnncnnnnnnnnnnnnnnnnnnnnnnnnnnnnnnnnnnnnnnnnnnnnnnnnnnnnnnnnnnnnnnnnnnnnnnnnnnnnnnnnnnnnnnnnnnnnnnnnnnnnnnnnnnnnnnnncnnnncnnnnnnnnnnnnnnnnnnnnnnnnnnnnnnnnnnnnnnnnnnnnnnnnnnnnnnnnnnnnnnnnnnnnnnnnnnnnnnnnnnnnnnncnnnnnnnnnnnnnnnnnnnnnnnnnnnnnnnnnnnnnnnnnnnnnnnnnnnnnnnnnnnnnnnnnnnnnnnnnnnncnnnnnnnnnnnnnnnnnnnnnnnnnnnnnnnnnnnnnnnnnncnnncnnnnnnnnnnnnnncnnnnnnnnnnnnnnnnnnnnnnnnnnnnnnnnnnnnnnnntnnnnnnnnnnnnnnnnnnnnnnnnnnnnnnnnnnnnnnnnnnnnnnnnnnnnnnnnnnnnnnnnnnnnnnnnnnnnnnnnnnnnnnnnnnnnnnnnnnnnnnnnnnnnnnnnnnnnnnnnnnnnnnnnnnnnnnnnnnnnnnnnnnnnnnnnnnnnnnnnnnnnnnnnnnnnnnnnnnnnnnnnnnnnnnnnnnnnnnnnnnnnnnntnnnnnnnnnnnnnnnnnnnnnnnnnnnnnnnnnnnnnnnnnnnnnnnnnnnnnnnnnnnnnnnnnnnnnnnnnnnnnnnnnnnnnnnnnnnnnnnnnnnnnnnnnnnnnnnnnnnnnnnnnnnnnnnnnnnnnnnnnnnnnnnnnnnnnnnnnnnnnnnnnnnnnnnnnnnnnnnnnnnnnnnnnnnnnnnnnnnnnnnnnnnnnnnnnnnnnnnnnnnnnnnnnnnnnnnnnnnnnnnnnnnnnnnnnnnnnnnnnnnnnnnnnnnnnnnnnnnnnnnnnnnnnnnnnnnnnnnnnnnnnnnnnnnnnnnnnnnnnnnnnnnnnnnnnntnnnnnnnnntnnnnnnnnnnnnnnnnnnnnnnnnnnnnnnnnnnnnnnnnnnnnnnnnnnnnnnnnnnnnnnnnnnnnnnnnnnnnnnnnnnnnnnnnnnnnnnnnnnnnnnnnnnnnnnnnnnnnnnnnnnnnnnnnnnnnnnnnnnnnnnnnnnnnnnnnnnnnnnnnnnnnnnnnnnnnnnnnnnnnnnnnnnnnnnnnnnnnnnnnnnnnnnnnnnnnnnnnnnnnnnnnnnnnnnnnnnnnnnnnnnnnnnnnnnnnnnnnnnnnnnnnnnnnnnnnnnnnnnnnnnnnnnnnnnnnntnnnnnnnnnnnnnnnnnnnnnnnnnnnnnnnnnnnnnnnnnnnnnnnnnnnnnnnnnnnnnnnnnnnnnnnnnnnnnnnnnnnnnnnnnnnnnnnnnnnnnnnnnnnnnn

SEQ ID NO: 309 - DNA, 4000 bp, Escherichia coli
  misc_feature (63)..(63): n is a, c, g, or t
  misc_feature (177)..(177): n is a, c, g, or t
  misc_feature (201)..(201): n is a, c, g, or t
  misc_feature (222)..(222): n is a, c, g, or t
  misc_feature (227)..(227): n is a, c, g, or t
  misc_feature (255)..(255): n is a, c, g, or t
  misc_feature (312)..(312): n is a, c, g, or t
  misc_feature (331)..(331): n is a, c, g, or t
  misc_feature (345)..(345): n is a, c, g, or t
  misc_feature (438)..(438): n is a, c, g, or t
  misc_feature (489)..(489): n is a, c, g, or t
  misc_feature (615)..(615): n is a, c, g, or t
  misc_feature (648)..(648): n is a, c, g, or t
  misc_feature (663)..(663): n is a, c, g, or t
  misc_feature (909)..(909): n is a, c, g, or t
  misc_feature (1105)..(1106): n is a, c, g, or t
  misc_feature (1992)..(1992): n is a, c, g, or t
  misc_feature (2347)..(2347): n is a, c, g, or t
  misc_feature (2557)..(2557): n is a, c, g, or t
  misc_feature (2623)..(2623): n is a, c, g, or t
  misc_feature (2710)..(2710): n is a, c, g, or t
  misc_feature (2758)..(2758): n is a, c, g, or t
  misc_feature (2839)..(2839): n is a, c, g, or t
  misc_feature (2926)..(2926): n is a, c, g, or t
  misc_feature (2938)..(2938): n is a, c, g, or t
  misc_feature (2998)..(2998): n is a, c, g, or t
  misc_feature (3028)..(3028): n is a, c, g, or t
  misc_feature (3055)..(3055): n is a, c, g, or t
  misc_feature (3133)..(3133): n is a, c, g, or t
  misc_feature (3163)..(3163): n is a, c, g, or t
  misc_feature (3177)..(3177): n is a, c, g, or t
  misc_feature (3180)..(3180): n is a, c, g, or t
  misc_feature (3211)..(3211): n is a, c, g, or t
  misc_feature (3213)..(3213): n is a, c, g, or t
  misc_feature (3215)..(3215): n is a, c, g, or t
  misc_feature (3220)..(3221): n is a, c, g, or t
  misc_feature (3226)..(3226): n is a, c, g, or t
  misc_feature (3229)..(3230): n is a, c, g, or t
  misc_feature (3232)..(3235): n is a, c, g, or t
  misc_feature (3238)..(3238): n is a, c, g, or t
  misc_feature (3241)..(3241): n is a, c, g, or t
  misc_feature (3244)..(3246): n is a, c, g, or t
  misc_feature (3250)..(3250): n is a, c, g, or t
  misc_feature (3253)..(3255): n is a, c, g, or t
  misc_feature (3258)..(3262): n is a, c, g, or t
  misc_feature (3264)..(3264): n is a, c, g, or t
  misc_feature (3269)..(3271): n is a, c, g, or t
  misc_feature (3273)..(3273): n is a, c, g, or t
  misc_feature (3277)..(3277): n is a, c, g, or t
  misc_feature (3283)..(3284): n is a, c, g, or t
  misc_feature (3286)..(3288): n is a, c, g, or t
  misc_feature (3291)..(3291): n is a, c, g, or t
  misc_feature (3295)..(3297): n is a, c, g, or t
  misc_feature (3299)..(3300): n is a, c, g, or t
  misc_feature (3303)..(3303): n is a, c, g, or t
  misc_feature (3308)..(3310): n is a, c, g, or t
  misc_feature (3312)..(3312): n is a, c, g, or t
  misc_feature (3316)..(3318): n is a, c, g, or t
  misc_feature (3322)..(3322): n is a, c, g, or t
  misc_feature (3324)..(3324): n is a, c, g, or t
  misc_feature (3327)..(3327): n is a, c, g, or t
  misc_feature (3332)..(3333): n is a, c, g, or t
  misc_feature (3335)..(3336): n is a, c, g, or t
  misc_feature (3340)..(3340): n is a, c, g, or t
  misc_feature (3342)..(3342): n is a, c, g, or t
  misc_feature (3344)..(3346): n is a, c, g, or t
  misc_feature (3349)..(3350): n is a, c, g, or t
  misc_feature (3352)..(3355): n is a, c, g, or t
  misc_feature (3359)..(3366): n is a, c, g, or t
  misc_feature (3369)..(3369): n is a, c, g, or t
  misc_feature (3372)..(3372): n is a, c, g, or t
  misc_feature (3374)..(3374): n is a, c, g, or t
  misc_feature (3376)..(3376): n is a, c, g, or t
  misc_feature (3379)..(3380): n is a, c, g, or t
  misc_feature (3385)..(3389): n is a, c, g, or t
  misc_feature (3391)..(3391): n is a, c, g, or t
  misc_feature (3394)..(3396): n is a, c, g, or t
  misc_feature (3398)..(3398): n is a, c, g, or t
  misc_feature (3400)..(3400): n is a, c, g, or t
  misc_feature (3404)..(3405): n is a, c, g, or t
  misc_feature (3408)..(3410): n is a, c, g, or t
  misc_feature (3412)..(3412): n is a, c, g, or t
  misc_feature (3415)..(3420): n is a, c, g, or t
  misc_feature (3423)..(3423): n is a, c, g, or t
  misc_feature (3425)..(3427): n is a, c, g, or t
  misc_feature (3429)..(3435): n is a, c, g, or t
  misc_feature (3437)..(3437): n is a, c, g, or t
  misc_feature (3442)..(3442): n is a, c, g, or t
  misc_feature (3444)..(3444): n is a, c, g, or t
  misc_feature (3446)..(3446): n is a, c, g, or t
  misc_feature (3448)..(3448): n is a, c, g, or t
  misc_feature (3454)..(3462): n is a, c, g, or t
  misc_feature (3465)..(3465): n is a, c, g, or t
  misc_feature (3467)..(3470): n is a, c, g, or t
  misc_feature (3472)..(3474): n is a, c, g, or t
  misc_feature (3476)..(3478): n is a, c, g, or t
  misc_feature (3480)..(3481): n is a, c, g, or t
  misc_feature (3483)..(3485): n is a, c, g, or t
  misc_feature (3488)..(3489): n is a, c, g, or t
  misc_feature (3491)..(3492): n is a, c, g, or t
  misc_feature (3495)..(3496): n is a, c, g, or t
  misc_feature (3498)..(3498): n is a, c, g, or t
  misc_feature (3500)..(3500): n is a, c, g, or t
  misc_feature (3502)..(3503): n is a, c, g, or t
  misc_feature (3505)..(3509): n is a, c, g, or t
  misc_feature (3511)..(3513): n is a, c, g, or t
  misc_feature (3518)..(3518): n is a, c, g, or t
  misc_feature (3520)..(3521): n is a, c, g, or t
  misc_feature (3523)..(3525): n is a, c, g, or t
  misc_feature (3531)..(3531): n is a, c, g, or t
  misc_feature (3533)..(3533): n is a, c, g, or t
  misc_feature (3535)..(3535): n is a, c, g, or t
  misc_feature (3537)..(3539): n is a, c, g, or t
  misc_feature (3543)..(3543): n is a, c, g, or t
  misc_feature (3545)..(3550): n is a, c, g, or t
  misc_feature (3552)..(3557): n is a, c, g, or t
  misc_feature (3559)..(3560): n is a, c, g, or t
  misc_feature (3562)..(3562): n is a, c, g, or t
  misc_feature (3564)..(3566): n is a, c, g, or t
  misc_feature (3571)..(3571): n is a, c, g, or t
  misc_feature (3573)..(3573): n is a, c, g, or t
  misc_feature (3578)..(3581): n is a, c, g, or t
  misc_feature (3583)..(3584): n is a, c, g, or t
  misc_feature (3587)..(3587): n is a, c, g, or t
  misc_feature (3591)..(3591): n is a, c, g, or t
  misc_feature (3593)..(3593): n is a, c, g, or t
  misc_feature (3595)..(3597): n is a, c, g, or t
  misc_feature (3599)..(3600): n is a, c, g, or t
  misc_feature (3604)..(3607): n is a, c, g, or t
  misc_feature (3609)..(3611): n is a, c, g, or t
  misc_feature (3614)..(3615): n is a, c, g, or t
  misc_feature (3617)..(3619): n is a, c, g, or t
  misc_feature (3621)..(3625): n is a, c, g, or t
  misc_feature (3627)..(3628): n is a, c, g, or t
  misc_feature (3633)..(3635): n is a, c, g, or t
  misc_feature (3637)..(3639): n is a, c, g, or t
  misc_feature (3641)..(3644): n is a, c, g, or t
  misc_feature (3647)..(3653): n is a, c, g, or t
  misc_feature (3657)..(3660): n is a, c, g, or t
  misc_feature (3662)..(3663): n is a, c, g, or t
  misc_feature (3665)..(3668): n is a, c, g, or t
  misc_feature (3670)..(3671): n is a, c, g, or t
  misc_feature (3673)..(3677): n is a, c, g, or t
  misc_feature (3679)..(3681): n is a, c, g, or t
  misc_feature (3683)..(3685): n is a, c, g, or t
  misc_feature (3688)..(3688): n is a, c, g, or t
  misc_feature (3690)..(3690): n is a, c, g, or t
  misc_feature (3693)..(3694): n is a, c, g, or t
  misc_feature (3697)..(3698): n is a, c, g, or t
  misc_feature (3701)..(3703): n is a, c, g, or t
  misc_feature (3705)..(3705): n is a, c, g, or t
  misc_feature (3707)..(3709): n is a, c, g, or t
  misc_feature (3711)..(3712): n is a, c, g, or t
  misc_feature (3716)..(3716): n is a, c, g, or t
  misc_feature (3719)..(3719): n is a, c, g, or t
  misc_feature (3722)..(3722): n is a, c, g, or t
  misc_feature (3725)..(3725): n is a, c, g, or t
  misc_feature (3727)..(3728): n is a, c, g, or t
  misc_feature (3732)..(3733): n is a, c, g, or t
  misc_feature (3735)..(3742): n is a, c, g, or t
  misc_feature (3745)..(3747): n is a, c, g, or t
  misc_feature (3749)..(3749): n is a, c, g, or t
  misc_feature (3752)..(3752): n is a, c, g, or t
  misc_feature (3756)..(3757): n is a, c, g, or t
  misc_feature (3759)..(3761): n is a, c, g, or t
  misc_feature (3763)..(3768): n is a, c, g, or t
  misc_feature (3771)..(3772): n is a, c, g, or t
  misc_feature (3774)..(3775): n is a, c, g, or t
  misc_feature (3777)..(3784): n is a, c, g, or t
  misc_feature (3787)..(3788): n is a, c, g, or t
  misc_feature (3790)..(3790): n is a, c, g, or t
  misc_feature (3794)..(3796): n is a, c, g, or t
  misc_feature (3798)..(3804): n is a, c, g, or t
  misc_feature (3806)..(3806): n is a, c, g, or t
  misc_feature (3809)..(3818): n is a, c, g, or t
  misc_feature (3822)..(3822): n is a, c, g, or t
  misc_feature (3827)..(3828): n is a, c, g, or t
  misc_feature (3832)..(3832): n is a, c, g, or t
  misc_feature (3834)..(3836): n is a, c, g, or t
  misc_feature (3838)..(3841): n is a, c, g, or t
  misc_feature (3843)..(3844): n is a, c, g, or t
  misc_feature (3847)..(3847): n is a, c, g, or t
  misc_feature (3849)..(3851): n is a, c, g, or t
  misc_feature (3853)..(3854): n is a, c, g, or t
  misc_feature (3856)..(3861): n is a, c, g, or t
  misc_feature (3863)..(3864): n is a, c, g, or t
  misc_feature (3866)..(3867): n is a, c, g, or t
  misc_feature (3872)..(3872): n is a, c, g, or t
  misc_feature (3876)..(3876): n is a, c, g, or t
  misc_feature (3880)..(3886): n is a, c, g, or t
  misc_feature (3889)..(3889): n is a, c, g, or t
  misc_feature (3891)..(3893): n is a, c, g, or t
  misc_feature (3896)..(3896): n is a, c, g, or t
  misc_feature (3898)..(3898): n is a, c, g, or t
  misc_feature (3900)..(3903): n is a, c, g, or t
  misc_feature (3908)..(3908): n is a, c, g, or t
  misc_feature (3911)..(3911): n is a, c, g, or t
  misc_feature (3913)..(3913): n is a, c, g, or t
  misc_feature (3916)..(3917): n is a, c, g, or t
  misc_feature (3920)..(3920): n is a, c, g, or t
  misc_feature (3923)..(3923): n is a, c, g, or t
  misc_feature (3925)..(3927): n is a, c, g, or t
  misc_feature (3929)..(3931): n is a, c, g, or t
  misc_feature (3933)..(3937): n is a, c, g, or t
  misc_feature (3939)..(3940): n is a, c, g, or t
  misc_feature (3942)..(3942): n is a, c, g, or t
  misc_feature (3945)..(3945): n is a, c, g, or t
  misc_feature (3947)..(3953): n is a, c, g, or t
  misc_feature (3955)..(3955): n is a, c, g, or t
  misc_feature (3957)..(3965): n is a, c, g, or t
  misc_feature (3967)..(3967): n is a, c, g, or t
  misc_feature (3969)..(3970): n is a, c, g, or t
  misc_feature (3974)..(3975): n is a, c, g, or t
  misc_feature (3977)..(3979): n is a, c, g, or t
  misc_feature (3981)..(3981): n is a, c, g, or t
  misc_feature (3983)..(3983): n is a, c, g, or t
  misc_feature (3987)..(3988): n is a, c, g, or t
  misc_feature (3992)..(4000): n is a, c, g, or t
ccataaccacggcctggcttacagtcattacaatcgccaaatacaaagcctgcaattttatcnagtgcgcccataagttttagtgtgctcatcatcctgtcaattctatacggtgcttcgtcgatatcttctaaaaataaaattgcgccattaaagtcaggtaaataattcgagccngcaagggctgtcagtaccgttaanttaccgccgattaatcgtccngaggntttacctgatgtaatcgtttgggtcagntactgagtgttaacaagctcatcatcggcttttggtaagttttggaaatgcatcaanttacgcgcttcgaacatgntcttaaattgcgcnacatgaaacgggttccagtcacttgatgcatttggaccatgaaagctgattaacccagcttgagacagtaatgcattgtgaagagcggtaatntctgaatagcccattagaggttttgggttgttacggatcattgcgtagtcnagcaaaggtagaatacgggcagcgcctgaaccgccacgtaaacacaaaatggcatcaacctctttgtcgctgaataaactatttaagtcgccggctcgcattgcatcagtgccagctaaatgaccncgtcttgctaaaatgtttggtgcaagcttagcnttgtaacccagtgcntctataacgccttgtgctaataaaatatcagcgtgtgcagcagtggcagctgaagggctacatatcccaattgtgccgcctttaggaagagcttttggcttaattaatgtttgggtgctagcattctgcgccgccattaaaggagctgatgtcagacttgcgccagcggcaagaattgaaagtgactttaaaaatgaccgtttattcatagcgagcctcatgtttttatagtatgagtatcgcatngaagaaaatatttcaaatatttgttacgaaatggaatagatgattctttttaggcaggcaaaaaggtgtttttcagcagagagtgtttctctgctgtgtaactaagctgttagctggtgtgattagaataaaggttatcgattaactcatcttctagctcaaagcgcagttcaagtgcttcgcctaagattgatanntctttatcaaactcatcaagcaagtcatctttgtcaacttctgcgtatttgtcgttaaagtcgagtgccacatctgtggtttcagaaatgcgcgggtataaggcattagccagcttttggctttcaggacctttttcttcacacgctttggcaatgtcgtcgtaaatttcgaaatggccagcagaaaggtaatccatcagaatttggcaaaagttttgaatttgcagctgatcaggaagggcgtgatctttcttttcgtacggtgaaaagcctgcaatacggcagaacaacacaagcagctcttgacgttctgtgagccatttgtcgattacagagtgactaccaccccacttttgttgagctttttccaaacgcgtcagcatatttcatctcctcgctgagtaggttttcctttgtatatataaaaaggaaatatgacacaaagatcaactaaattcttagtgtctaattgcaacagattgtaaaagtcattctaaaggcatagttttcagcattgaataagctaaaaaattccttgttttttagagtggactttttttgctctcattgcagtgtatgggaattgattcaaaactactagtattaattttgcgatttttatctaagcggatgagttgtaatttgctgatttagaaaagaaaaaaccaccaaaattggtggtttaattctttttctaagacttgttaaaacaagcgttcttattattatgggaagattgttgttcttattgttataagatttttattattgtttttgttaacgcgggataagttataccaagcttttttgtatgttgcaaatttattaatgaaaagttttaaatttattttgttttcgctcaaaaaacacactataggcttaggtnggcttaaaaaacatgatctatatctagccttgattatctatccatagtgagacgcgcaatatggtgatacaatctgctcaatttcattcagttctaggattctatacgcatgagcgaattaaaaaacgatcgttatttacgtgcactacaaaagcaacctgttgatgtcacaccggtatggatgatgcgccaagctggccgttatttacctgaataccgtgctacacgtgcccaagcaggcgactttatgagtttatgtaaaaacgctgaacttgcttgtgaagtaacgttacagccattacgtcgttatccgcttgatgctgcaattctattcagtgatattttaactattccngatgctatgggcttaggtctttactttgaaacaggtgaaggtccaaaatttgaacgtccgatttcttcattagcagatgttaaaaaaatcccaaatatcgatccaactgatgagcttggttatgtgatgaatgcggtaagtacgattcgtcgcgaattaaaaggtgaagtaccgctaattggtttctctggttcaccttggacacttgcnacttacatggttgaaggtggtagcagcaaaacattcggtaaaatcaagaaaatggcctttgcaganccacaaacactgcacctattacttgataaattagctgactcagtaatcgactatttaaacgcgcaagttaaagcgggcgcgcaatcnttaatggtatttgactcatggggcggtgtattaagcccacgtgactanaatgagttttcattacaatacatgcacaagattgttgatggcttaattcgcgaatacgatggccgtaaagtgccagtgacnttatttactaaaaatggtggtcagtggattgaagcaattgcagcaacaggctgtgatgcagtaggtctagactggactattaacatnggtgatgcaaancgtcgtgttggcgataaagtcgcgctgcaaggtaacatggacccagcaatgctgcatggnacgcctgagcgtattcgccaagaagttgcnactatcctagaagactttggtacaggntctggccatgtattcaacctaggtcacggtattacaccagatgtagacccagaaaacgcaggtgtatttatcaacgcngttcatgaattcagtggtaaataccacaantaagcaaaagctantcntaaaaaagcccgcattaagcgggcttttttntnanttacnnaaacnaannannnnaancanttnnngcanctnnncgnnnnncntcagnnntngtcnggtagnngnnngtngtannnannaantaatnnntnttannnccgncnttnttttnntnnatantngnnnganngnnnngaannnnnnnngangcncncncanngaagnnnnncncannnantncttnnttnnnancannnnnnaanannntnnnnnnncnacccncntngntgccannnnnnnnngcncnnnntnnntnnntnnannnagnncnnccnncntngnnannnnntnnngcagntnntnnntcttgntntntnnnaccnannnnnntnnnnnnanngntnnnataantncctgnnnnannatnaatnancnnntnntcannnnannnacnncnnncnnnnncnncggcnnnannncnnnnttnnnnnnntgcnnnncnngnnnngnntnnnnnannnannncancnccnncannatnnntntnnncnncttntgnttngtntnnttcnntnnnnnnnngcnnncnacnaccnncnnntnnnnnnccnncnncnnnnnnnnttnntntgtnnntnnnnnnngnacnnnnnnnnnnaaanaaaanncagncnnntnnnncnngcntnnntnntnnnnnntnnannaccanacantcannnnnnnttncnnnacnancnnnntcttnatnangannaanaanannncnnntnnnnnannantgntnnnnnnnancnnnnnnnnntncnncatnnannnangnaagnnggcnnnnnnnnn

SEQ ID NO: 310 - DNA, 4000 bp, Escherichia coli
  misc_feature (2)..(2): n is a, c, g, or t
  misc_feature (5)..(5): n is a, c, g, or t
  misc_feature (7)..(8): n is a, c, g, or t
  misc_feature (10)..(10): n is a, c, g, or t
  misc_feature (13)..(14): n is a, c, g, or t
  misc_feature (20)..(20): n is a, c, g, or t
  misc_feature (26)..(26): n is a, c, g, or t
  misc_feature (31)..(32): n is a, c, g, or t
  misc_feature (35)..(36): n is a, c, g, or t
  misc_feature (38)..(38): n is a, c, g, or t
  misc_feature (46)..(46): n is a, c, g, or t
  misc_feature (48)..(48): n is a, c, g, or t
  misc_feature (57)..(58): n is a, c, g, or t
  misc_feature (62)..(62): n is a, c, g, or t
  misc_feature (65)..(66): n is a, c, g, or t
  misc_feature (68)..(68): n is a, c, g, or t
  misc_feature (71)..(72): n is a, c, g, or t
  misc_feature (76)..(76): n is a, c, g, or t
  misc_feature (78)..(79): n is a, c, g, or t
  misc_feature (82)..(82): n is a, c, g, or t
  misc_feature (85)..(85): n is a, c, g, or t
  misc_feature (87)..(87): n is a, c, g, or t
  misc_feature (93)..(93): n is a, c, g, or t
  misc_feature (95)..(95): n is a, c, g, or t
  misc_feature (100)..(100): n is a, c, g, or t
  misc_feature (103)..(103): n is a, c, g, or t
  misc_feature (106)..(106): n is a, c, g, or t
  misc_feature (110)..(110): n is a, c, g, or t
  misc_feature (114)..(114): n is a, c, g, or t
  misc_feature (116)..(119): n is a, c, g, or t
  misc_feature (126)..(126): n is a, c, g, or t
  misc_feature (129)..(131): n is a, c, g, or t
  misc_feature (134)..(134): n is a, c, g, or t
  misc_feature (139)..(139): n is a, c, g, or t
  misc_feature (142)..(142): n is a, c, g, or t
  misc_feature (146)..(148): n is a, c, g, or t
  misc_feature (150)..(150): n is a, c, g, or t
  misc_feature (153)..(153): n is a, c, g, or t
  misc_feature (155)..(159): n is a, c, g, or t
  misc_feature (162)..(162): n is a, c, g, or t
  misc_feature (164)..(165): n is a, c, g, or t
  misc_feature (172)..(172): n is a, c, g, or t
  misc_feature (180)..(180): n is a, c, g, or t
  misc_feature (182)..(182): n is a, c, g, or t
  misc_feature (184)..(184): n is a, c, g, or t
  misc_feature (188)..(188): n is a, c, g, or t
  misc_feature (191)..(191): n is a, c, g, or t
  misc_feature (194)..(194): n is a, c, g, or t
  misc_feature (198)..(198): n is a, c, g, or t
  misc_feature (201)..(201): n is a, c, g, or t
  misc_feature (204)..(206): n is a, c, g, or t
  misc_feature (211)..(211): n is a, c, g, or t
  misc_feature (214)..(217): n is a, c, g, or t
  misc_feature (220)..(220): n is a, c, g, or t
  misc_feature (225)..(225): n is a, c, g, or t
  misc_feature (227)..(227): n is a, c, g, or t
  misc_feature (229)..(229): n is a, c, g, or t
  misc_feature (236)..(236): n is a, c, g, or t
  misc_feature (242)..(242): n is a, c, g, or t
  misc_feature (245)..(247): n is a, c, g, or t
  misc_feature (254)..(255): n is a, c, g, or t
  misc_feature (257)..(257): n is a, c, g, or t
  misc_feature (260)..(260): n is a, c, g, or t
  misc_feature (264)..(265): n is a, c, g, or t
  misc_feature (267)..(267): n is a, c, g, or t
  misc_feature (272)..(275): n is a, c, g, or t
  misc_feature (277)..(277): n is a, c, g, or t
  misc_feature (281)..(281): n is a, c, g, or t
  misc_feature (284)..(285): n is a, c, g, or t
  misc_feature (287)..(288): n is a, c, g, or t
  misc_feature (295)..(295): n is a, c, g, or t
  misc_feature (297)..(297): n is a, c, g, or t
  misc_feature (302)..(303): n is a, c, g, or t
  misc_feature (307)..(307): n is a, c, g, or t
  misc_feature (309)..(311): n is a, c, g, or t
  misc_feature (313)..(314): n is a, c, g, or t
  misc_feature (318)..(318): n is a, c, g, or t
  misc_feature (322)..(322): n is a, c, g, or t
  misc_feature (326)..(326): n is a, c, g, or t
  misc_feature (329)..(329): n is a, c, g, or t
  misc_feature (333)..(337): n is a, c, g, or t
  misc_feature (340)..(340): n is a, c, g, or t
  misc_feature (345)..(345): n is a, c, g, or t
  misc_feature (347)..(347): n is a, c, g, or t
  misc_feature (354)..(355): n is a, c, g, or t
  misc_feature (357)..(358): n is a, c, g, or t
  misc_feature (360)..(362): n is a, c, g, or t
  misc_feature (364)..(365): n is a, c, g, or t
  misc_feature (372)..(373): n is a, c, g, or t
  misc_feature (377)..(378): n is a, c, g, or t
  misc_feature (384)..(385): n is a, c, g, or t
  misc_feature (387)..(387): n is a, c, g, or t
  misc_feature (389)..(390): n is a, c, g, or t
  misc_feature (392)..(393): n is a, c, g, or t
  misc_feature (402)..(406): n is a, c, g, or t
  misc_feature (408)..(408): n is a, c, g, or t
  misc_feature (412)..(412): n is a, c, g, or t
  misc_feature (419)..(420): n is a, c, g, or t
  misc_feature (422)..(422): n is a, c, g, or t
  misc_feature (428)..(432): n is a, c, g, or t
  misc_feature (437)..(437): n is a, c, g, or t
  misc_feature (447)..(449): n is a, c, g, or t
  misc_feature (452)..(452): n is a, c, g, or t
  misc_feature (457)..(457): n is a, c, g, or t
  misc_feature (459)..(461): n is a, c, g, or t
  misc_feature (464)..(464): n is a, c, g, or t
  misc_feature (467)..(467): n is a, c, g, or t
  misc_feature (470)..(470): n is a, c, g, or t
  misc_feature (473)..(474): n is a, c, g, or t
  misc_feature (477)..(477): n is a, c, g, or t
  misc_feature (480)..(480): n is a, c, g, or t
  misc_feature (488)..(489): n is a, c, g, or t
  misc_feature (491)..(491): n is a, c, g, or t
  misc_feature (499)..(499): n is a, c, g, or t
  misc_feature (506)..(506): n is a, c, g, or t
  misc_feature (509)..(510): n is a, c, g, or t
  misc_feature (513)..(513): n is a, c, g, or t
  misc_feature (516)..(517): n is a, c, g, or t
  misc_feature (519)..(519): n is a, c, g, or t
  misc_feature (521)..(522): n is a, c, g, or t
  misc_feature (527)..(527): n is a, c, g, or t
  misc_feature (530)..(532): n is a, c, g, or t
  misc_feature (536)..(536): n is a, c, g, or t
  misc_feature (540)..(542): n is a, c, g, or t
  misc_feature (547)..(547): n is a, c, g, or t
  misc_feature (550)..(550): n is a, c, g, or t
  misc_feature (552)..(553): n is a, c, g, or t
  misc_feature (555)..(555): n is a, c, g, or t
  misc_feature (558)..(559): n is a, c, g, or t
  misc_feature (561)..(561): n is a, c, g, or t
  misc_feature (564)..(564): n is a, c, g, or t
  misc_feature (568)..(569): n is a, c, g, or t
  misc_feature (572)..(572): n is a, c, g, or t
  misc_feature (575)..(575): n is a, c, g, or t
  misc_feature (580)..(580): n is a, c, g, or t
  misc_feature (582)..(582): n is a, c, g, or t
  misc_feature (586)..(586): n is a, c, g, or t
  misc_feature (589)..(589): n is a, c, g, or t
  misc_feature (593)..(593): n is a, c, g, or t
  misc_feature (598)..(598): n is a, c, g, or t
  misc_feature (601)..(602): n is a, c, g, or t
  misc_feature (606)..(607): n is a, c, g, or t
  misc_feature (613)..(613): n is a, c, g, or t
  misc_feature (616)..(616): n is a, c, g, or t
  misc_feature (619)..(619): n is a, c, g, or t
  misc_feature (622)..(622): n is a, c, g, or t
  misc_feature (624)..(624): n is a, c, g, or t
  misc_feature (627)..(628): n is a, c, g, or t
  misc_feature (630)..(630): n is a, c, g, or t
  misc_feature (632)..(632): n is a, c, g, or t
  misc_feature (634)..(634): n is a, c, g, or t
  misc_feature (640)..(640): n is a, c, g, or t
  misc_feature (663)..(664): n is a, c, g, or t
  misc_feature (675)..(675): n is a, c, g, or t
  misc_feature (699)..(699): n is a, c, g, or t
  misc_feature (714)..(714): n is a, c, g, or t
  misc_feature (717)..(717): n is a, c, g, or t
  misc_feature (720)..(720): n is a, c, g, or t
  misc_feature (725)..(725): n is a, c, g, or t
  misc_feature (729)..(729): n is a, c, g, or t
  misc_feature (733)..(733): n is a, c, g, or t
  misc_feature (745)..(745): n is a, c, g, or t
  misc_feature (748)..(750): n is a, c, g, or t
  misc_feature (820)..(820): n is a, c, g, or t
  misc_feature (823)..(823): n is a, c, g, or t
  misc_feature (825)..(825): n is a, c, g, or t
  misc_feature (828)..(828): n is a, c, g, or t
  misc_feature (834)..(834): n is a, c, g, or t
  misc_feature (837)..(837): n is a, c, g, or t
  misc_feature (840)..(840): n is a, c, g, or t
  misc_feature (843)..(844): n is a, c, g, or t
  misc_feature (846)..(846): n is a, c, g, or t
  misc_feature (853)..(853): n is a, c, g, or t
  misc_feature (890)..(890): n is a, c, g, or t
  misc_feature (902)..(902): n is a, c, g, or t
  misc_feature (907)..(909): n is a, c, g, or t
  misc_feature (913)..(913): n is a, c, g, or t
  misc_feature (915)..(915): n is a, c, g, or t
  misc_feature (918)..(919): n is a, c, g, or t
  misc_feature (922)..(922): n is a, c, g, or t
  misc_feature (927)..(927): n is a, c, g, or t
  misc_feature (938)..(938): n is a, c, g, or t
  misc_feature (952)..(952): n is a, c, g, or t
  misc_feature (1023)..(1023): n is a, c, g, or t
  misc_feature (1314)..(1314): n is a, c, g, or t
  misc_feature (1452)..(1452): n is a, c, g, or t
  misc_feature (1992)..(1992): n is a, c, g, or t
  misc_feature (2002)..(2002): n is a, c, g, or t
  misc_feature (2013)..(2013): n is a, c, g, or t
tntcntnntntcnntgtcgntgttgntgagnntgnnanctcgaagngntctcgtcanntaantcnncntcnnaccncnnaanaanantacaangngacgngtnaantcanacanannnngatcacnctnnnacngtccnaancttnnncnaanannnnngtnanngagattntttttgtnangnactnagngtnttcncgnacnnnctcantcnnnnctncttgntngngacaaanagaggngannngaaacgnnanacnactnngnacgannnngnaacngtnnannacgacgntnaaagnncaanannnanntatnaaantttnaangaannnnnctncgtcnanggatcannannannntnntcttttnncgannaaaagnngngnnanncgcaatcannnnnancgcncgtcgtnnangacaannnnnagaanaaatttgaannnganaaaantnnnganganagngtnnagncanataagaannangacggagnaaaacgnctnnatnctnntntnnatganttnnngtgnatcnnncgatnatnanngnagnngntcnttcnnganaanaacgncngaanagncgtntcagnggnnaagnncatcgncantgncgncncanncncnanagtcgncgccgccgccgagtccgccgccnntgcctccgccntctccaccgtcgccgccgccgccnagtccgccgccgagnccnccnccatngccnccgncgtctcctccgncgnnnccgccgccgagtccgccgcctttgccgccgccgtctcctccgtcgccgccgccgccgagtccgccgccgncgncnccnccgtcnccnccnccnncncctccgncgccgccgccgccgcctccgccgccgccgccgccgcngccgccgccgcngccgnnnccgncnccnncgncgccnccgccgccgcngccgccgccgccgncgccgccgccgccgagtccgccgccatcaccaccgccgttgccgccgccgagtccgccgccgtcgccgccnccaccaccgtcgccgagtccaccgccgtcgccgccgccaagtccggcatccgcctcggctgctttgcgcatttacttgaacggctacagtaaggaagaattcgaggtgaacgaggtgtcggctttgtttcgaagcgggatgattgcgttcttcaagaacgcctcgggtggagcaaacgtgccggcggcggttgagatcgtagaagttgtcgacgttcgagcgccaccgcctccgagtccaccaccgtctccaccaccgagtccaccgccgaatccgccaccgtcgccgccnccatcgccgccaccgccgagtccgcctccatcgccgcctccatcgccgcctccatcgccgccgcctccgtcgccaccgccgtctccaccacctttgccgccgccgtctccgccgccttcacctccgccgccgccgtcnccaccgccctcgcctccaccgagtccgccgccgtctccaccgcctccgagcccaccaccgaatccgccgccttcgcctcctcctccgagcccgccgccgagtccgccgcctttaccgcctccgagcccaccgccgtctccaccaccgtctccaccgccgagtccaccaccgtcgccgccaccaccgagcccaccaccgtctccaccaccgtcgccgccaccatcgccgccaccaccgagtccgccgccatctcctccgtcgccaccgccaccgagtccgccaccgagtccgccgccgtcgccgccgccgccgccatctcctccgccatctcctccatcgccaccgccgtcgcctccatcgccgcctccgtcgcctccatcgccgccaccaccgagtccgcctccatcgccgcctccatcgccgccacctactgagagaaggagaagaagacagttgttgctcgaaagatcgaccaaggcgacgacgagcacgattgcggttgagtttctcgttttggggaccacggaagcagacgccaangcgtttgtgnctttctacaangcagtatctgtcgaggacatcgagtggcacctcgacaacgcgggattatttacggaatcgatcgtgaaggatgcgcagatcactggtgttcgcgcgccgccgccgccttcgccgccgccgagaccgagtccacctccatcgcctcctcctcctccttctccgccgccgtcgccgccttcgcctccaccaccggcgccgttgccaccaccaccgccgtcgcctccaccagacgcgccgccgtcgccgccgcctccaccgaacccgcctcctttgaatcctccgccgccaaagccgagtcctccgccgccgtcgccgcctccaccgtcgcctccggcgctctctccaccaccggctccggaaggatcggcgtcgccaccacccaacgcaccacctccggcaccaccggctttggttgttggtcgcgccatcgacgcgtatttgaagaactgcgacgcgtttatggatgaaaatggagatcgtaaatactcgagaggcgaagcgtattcgcaaacggatagtttgggtggctacgagtttcagccgaacaactacgacgccgcggcatcggcatacctcgtcgttctgatgcgcaacgaaagtcgcacgggaacgtcgagcgagtgcgtggatgcttatacgggacaagctccgggactgaaaattttggaagcgccgccggggtcgaaagtgatttcgccgatgactacgctcattggcgaggtcatcagactgtactctggtgacgtcgacatgactgtcgctgaagcgacgaccatgatcaactccgcttttggtttgggcaacgcggaacacacgcaaatcgatccgatttacgccgcctcgaacggtgaagtggctgtttacggtccagtcgtcggcgcaatcaatatgattgcgaacctcgtctcctccgtcggcacgttattgtttggcatgtccagtctgaatggcggcagattgagtgcagcagattgtgaattgaaggtatattctggcattgcccgtgaaattaacgaggctttacttgtcgcttcgcgaggtggtaaccgaaagttactcacgacgcacttgttagatttggccaactcagattcaatctccggcattgcgaaatcttcgttatactccgcgagtttgacgaacattcagttgatgggtgctggttattctccagcagcgttggagtccacggtgtccatgtcagccaactctggggcggcgatcaagaatagcttgagcgatttgtcggatccgacaaccttcttgaaaaaagtcaccgcggcttccaaggttgctcaagatccagctgttctgagtgcccttctcagtagcgctacgaacgaagcgacggaggatgaactcactactttgaatggcgtacaggatgcagagctgtacgcgagtaaagcgacggctgaaactgagaccatcgcggtgtcaattccgctttatccgcctccgccgtcgccgccacctccggggtttccacctccatacgtttctagaggaccgatattgaatccagcggaattatctgctgctatcacggttccaacgctctttgtgttcattgtagctttggctttgacgttgaggtatattgcaaagaatagaagagcgagacgattagcgagatatgaaactaggattgagagagagcagttagcggcgcaaaagtcagtgaagaaactcaacgatgacaagattaaacgcgaattagcggcgttaacggatgagaaagcggctgagcgaaagttgatcaagaaatacgagcagcacatgcaaaagtcgaaagagaaagtagaaaaagcaatcgcgttgcgaattcaagcagagaaacagaagaagaaggataaaaaggcagccgagaaagccgccttgcgatgatatagatgaattcgtgattgagatacgattactttaggcacagcacataacatatatcatgtatagaaacagaaacgctttattaattttaaaaatacaa

SEQ ID NO: 311 - DNA, 4000 bp, Escherichia coli
  misc_feature (1991)..(1992): n is a, c, g, or t
  misc_feature (2064)..(2064): n is a, c, g, or t
cgaagccgcgctcgagggcggtttccgccacacgcacgcgcgcttgatcgctcacgcggaggaaatcgccttattagacgggggcaaacgcgagattgagattttagatgaaggcttggataatttggtcgtcacgcagcgctggcatgcgctgcagcgtattcgcaagagcgtcgccgacaacgtatccaagttccaaggcttgctcgtgggcagtattttcgtacacgtcccgttcatgatgaaggcatcagtgtccgaaggcgagcgcatttcatccttccgagccaccgaggagctcatgcttcgatgcggcggcgcgttcaccgaagtgttgcttctcggcaaaaatctcgacgaactcgccggatacacgcaccggctttcgcaactgttcaaaacgttggatctcgcgagcaaggaagcgcgcgaagacaaggctaaactggcttcggcaggcgctgaccacgccgaaggctcgccgatcgtgttcgataaagtcaccgtaggagcgcccgagccggatggctcgcaacgcgtgttggtgaaggacttgacgctcgccgtggcgtcgggtcaacacttgttgataactggtccgaatggatgcggaaaaacgtcattgcttcgcgtgttggctggattatgggcgcccgtgtccggcaccgtcaccagaccgtctggcgtatccagcatcatgtggttgccgcaacggccgtacttgttgcaaggatcgttgcgcgatcaagtcgtgtacccgcgcgacgcgcgcacggagaagatcgacgacgcgcgcgtgaaggagtgtctgatgatggctggcctggccaaattcgtggacggctccatgaacgttggattaaacacgcggcacttggagtggaacgatgtgttgtccggcggcgagcgtcagagaatcggtttcgcccgcctttactatcacgcgccaaagtttgccattcttgacgaagcgacgagcgcaatcaatccagacgaagagtccaagctgtacgaacgtctcatcgaaaccgacaccaccgtcgtgagcatcgcgcacaggctcgagcttagaaaattccacaagttggaactcaaaatcgcgggcgacggcgaaggcggttttcgaatcctcaaactttagattacttgtgatagcacgtatattacattaatgcgtcgacgtcgtcaagtatgcgaacaacagcatgggcgcgccgaagaggccgaccatggtgagcatcgcctgcgtgttcagcgccttgacttcttcttcgtcgatttcgcccgcaaacttttcgttcgccatcttgatcaggtactcgtcgtacgcgtctagttttgcggcgtccatgtaatcgaataagtccgatttcatcttcttggaagccgtcgtcatcccccaaatcattcgatccgcttgcttggacacgtttccgtactggtttccgatgcaccgacgatactgcttcaacgcctcatctcggcgctgcaagttgtccagacagatggcgtagttgaagattatcctcccgcccatctccgtcttttgcccgatgcgatcgagcgcccacggctcgagcaaatcgagcgcgtcttgcatgtatcctcgcttcatcgcctcgcccgaacgctccaaaacctcccgcacctccgcgtactccgcgttcgtcagcgtcatcccctgatcctcgcgatatttcgccaatttcttcgccactctcgcccttcgcgccgcgatcgcctcctcgtcctccaactcctcccgtttaacggttcgtccgccgccgtacgtcttcgatatatccggcggtcgctcgaacaccccccacgtgctcaccgacggtttatacaccgcgtcctccacgtcgtaccccaccgccttctcgtccgcgtcgaacgggtcgtaatcccggtcccgcgtcaagatgcgcaccgtcacctcccgtttgcgcgtcgcccccgtcgcgccgtcgctcgccgtctcgcccgcnngcgtcccgtccgtcgtcgacgcctccatcgcgtcgtcccgatcgcctccgtcgccctccgcgcgcgcgcgcnccatcgccgccgcgtactcgcgcgcctttttcacgcgatcctccaccgacgcgcgcagatcgatcctcgcgtccgcgtcctcgcgcggcgccgcgcgcgcgcgaaagcgacgccgtcgcgcgacgcgcgtcggcgcccgcggccgcgcgacgcgcgcgacgcgcgccgcgcgcgccatcgcgcgcgccgctctcgcgcgatcgcgcgcgcgcgaccgcgcgacgttcgcgtctcgaggttcgacgtcgaaaccgacgcgaggttcgatcgcgcgcgctcgaacctcgcgatcgcgggttcgatcgcgcgcgcgccgacgtcactgcgcgtcgatgcccgcgaccgggacggcgtcgtcgcgcgacgagatcgtgcccccgcgacgaggcgcgcgaaatccatgggtgctcgtcggtgcgggcgccacggcggcggtgttgctcgcgggattcgtcgcgttcagggctggggacgcgcgcgcgtcgcagcggatgatgcgcgcgcgggtgctcgcgcagggcgcgacggtggcgctgatggtggcgacgtccgcgggaggactgtcgagcgcgacgtcttggacgctcgcgcgtcccggcgcgggcgggacggcgggcgaggggtgacggacgcgcgggcgaacgcgcgcgggttcgcggcgagcgcgacgacgacgcgcggcgacgacgacgcgtcgacgtcgcgcgacggaggcgcgagcgatggtggggagcgcgggcgcgacggtgacgcgagagacgcgcgcgcgaggcgggacgaggaggcgcgcgcggtgctgcgcgaacgcgcgctgcgagcggcgttgaagcgcgtgcgcgagctgggatggacggacgccgccgtcgacgcgggattgagggatttgaatttatcgcccgcgatgcgcgcgatcgttcgcggcgacgcgggggcgggcgcgagggactcgggaccgggcgacgggctcgcgggggagttggcgggatactttgaggagtgcgcggacgcggcgtttcacgcgaaggtcgtcgccgagggcgagacgctgcgcgcgatgaagtcgcgcgagcgcgtgaagtggctgatgcgcgcgcgtttggagatgatcgagtccaagctcgattcgtggccgcgcgcgctcgccgcgatggcgacgccgcggtacgcgatgacgacgcttcggcgtcgcgccgcgctcgcggatttcatcgccgacgccgcggacgtcgacgccttggacgtgcttccggattcgttggatacgtttcgttggcacgccgaacgcgccgcgatgctcgcgctgtacgccgccaccgagttacgcttgttgacggattcgagcaaggatcgtcgcaagacgtgggcctttctcgacgcccgcgtcgacgacatcgcgcgatcccgcgtcgacgtcctcgagctcaagtcgtacatcgacgtcttcgcgcgcgacgccgacttgacgacgctcggcgcgtcgttcgcgagcaaagacgcgctcgccgcggcgttcgcgcccgtcgccgacgtcttcgctcgcgcgtctcgcgccgtcttctcgaccccttcgcgcgacgcgtccgagcgcgacccgccgcgcgactcgcccgatcgatagtttacccggtagtcttaatgctcacgcgcgcgcctttaaccgacttcgcgcgcgctcgccgtcgcgttttgtgtcgcttcggtcgctccactcccgggtgtttcatccgaatcgtcgcgacctaaacccgaatcgtcgcgccgccgcgcgccgcgcgtcacgcgcgcgcgcgctcgagcgatgtcgttcgacctgcgctgcgccgtcctgtgctacgccctcgccggcgtcgcgcacgagctcgcgcacgtcctcgcgcacgccgcgctcgcgctcgcgaagcgtcgcgggtcggtcgccgtcttcgacgcgtgcgcc

SEQ ID NO: 312 - DNA, 4000 bp, Escherichia coli
  misc_feature (216)..(216): n is a, c, g, or t
  misc_feature (228)..(228): n is a, c, g, or t
  misc_feature (230)..(230): n is a, c, g, or t
  misc_feature (255)..(255): n is a, c, g, or t
  misc_feature (335)..(335): n is a, c, g, or t
  misc_feature (389)..(389): n is a, c, g, or t
  misc_feature (491)..(491): n is a, c, g, or t
  misc_feature (1985)..(1985): n is a, c, g, or t
  misc_feature (2072)..(2072): n is a, c, g, or t
  misc_feature (2942)..(2942): n is a, c, g, or t
ggatgtagtggcatgacctatgttttaggttttgatgttccaaaaactgatgatgaaattttctctattgagggtattccttgttgcatggaaaaatcgcatcagatttatgtatatggaatggagatagattggcaaggtggtctgaatagccgtggatttacttttaaaaatccgaatgcttctagtacctgcggatgtggtacttcatttgcngtttaaaattantngaaaaaatacatcattctcgctctntatcgcgaagctcataaaaaaaggccctgattactcaaggccttttttatatcaattcaatgttgaattatttctttttntcttcacgacctaatgggcgtgtttttgcaaagtcaactagtacgggtgccgcnacaaagatagaagagtaagtacctgtgataactccaattaacattgcgaatgcaaaacctcttgttacttctccaccaaagatgaataagattaaaatagtnatgaacacggttaaagaagtcataatagtacgactcaatgtttggttaatggctttattaatgatagtagcattatctacacctttcattaattggctgtcctcacgaatacggtcatatacaattacagtatcgttcatagagaaaccaattacggttaatatagctgcgataaagtgttggtcaatctctaatgggaatggcaccacttttcttaagaaactaaatacgattaaagtaacaaatatatcgtgcaataaagagaagatagttcctaaagaatatctccaatcacggaaacgaataaagatgtataaacaaattgcaattaaagcaaaaatggttgctttcgtagcacctgcttttaaatcatcagagatagtaggtaatactgtttgagaactttgcttatactgagagtcgaactcttttaaagaagttcctgcaggtaattgcttctctaaacctttgaataataaagcttctacttcttggtcaatattattgccttgttctttaattttataagaagtggtaatattaatttggttcttagaatctactgttttaattataggagactcgccaaacacttttttcaagtcttctcttactgtttcaatattcaccgctttggcaaacttaatagtataacttcttcctccagcaaattcaacaccttcgtcgaatccgttaaagaaactagcaatacccattactaatacaacagcagataacatataagcatactttctgaattcaataaatttgaatgatgcatgcttaaagatacctcttgaaattttagtgaaatattcgaagtgtctgtttttgcttgtgtagatatcggtaattaaacgagatactaaaattccgcagaataaagaaagtaaaataccaatgatttgcgttgtagcgaaaccaagtactggacctaaaccaaagtaagctaagatacaagctgttaatagggtagtaacgtgtgcatccaatactggagacatagaacgtttgtaaccatctgtgacagccaactgataactttttccttttgttaattcctctttaattctttcaaatataattacgttggtatcgaccgccataccaatagttaatactaaacctgcaataccaggtgctgttaaagtaaaacctaaggcgcttaatataccaatagtgaaaagtaagtttaatactaatgcaatgttcgctacccatccacctgtgttaaagtataataacattaaagcgaaaatgacaaggaaagatattccaaatgccatcgcaccaccttgaatagaagccaaacctaaagttggacctactaattgctcttgtacaattttagcaggcgctggtaatttaccactctctaaaatttcagctaagtcttgtgctgtttttaaagtatagtttccagagatagaagagttacctgtagtaatagcatcatttacattcggcgctgaataaacaatattatcaagtacnatcgcaagtggcttacctacattttttgaagtcatcttagcccaaatgctggtacctaatttatccatattcattttgatggctacntttcctctttcatcaaaatcttgtgctgcattcgcaacatggtcaccttctaattctgcttgaccattatctaaagttttaatagcataaataggaactacatctttgcttttaggatcttcgctttcatttttaccatacataaataccaagttcgatgggaacttagattttacttctggcatggctaaataggcgtttagtttacttgtatcagctttgaaagtgtacccaatttcagcagggtaaatagattgaccattttttccttgataaggctgcgtaaactgaaccatttttaataaaggatttttattaaggttcaatttagaagtatctgcttttactaaactcgtatctgaaattccatttaaacttgcttcaatagctttatcggcagcaacaataccattttgaagatccctgttctcaaaagtgtatacttcaaagaattgtaggttagccgtagattgtaaataagaacgtacacgctctttatcgttcacacctgctaattcaatattgataatacctttagcggcatccggattgatattaggagaggctagaccaaagcggtcaatacgcgttcttaaaatacggtatgtattattgaaagcctgtgtagattgttcttttaagtaagtaacggctgcgtcatcagtagcgtcgaactttaatttgccattacttcttgcagcaaataaaggggctaatttacccgttgggttaatagttgcatattcatctctgaataaagaaattaagtcggcacggctgttcgcttttttctgaactgcattgtttaaagcagtattgaatgaaatgtccttggtatagttggcgagtgatttaattaaaccatctaancctacttccatggtgacactcataccaccttgtaaatcaaggcctagcattaattctttttctttagcagaagcataagtggttaaaccaaaagccaatttactgtctttggtactgtctaataacttcttataataagctttttgaatatcgtttaagctatcgttgtataataactgctcttctttattagaagggtatacttgatctgcttttgggaacttcttcacccatgaactagctttcgcttccatggctttttcgtgacttcttacgaaccaagtaaatgacaattgataaagacaaattaaaataagcgcaatggtaaaaaagcgcactaatcctttgagttgcataatagtgtggttaactgatttttagtcggcaaatataatggaaacgggccaaaataaaggctaaaaagccattattttaccttcgataggcttacatcaaagtacaagggggcgttgcctggaatctcgccacttcctctagatccataacctaatgtagatggtataaggattttgatttggccgccttcacctattaagggaagggctacttgccagcctggaataaggttatttaaaggataagtgatagtaccgctatcaaaggtcttatcgttcattaatttacctgtataagtaactgtaattgtgctagttagcctaggtttattgctatttcctgcagtaattatttgatataagacgccagatgggtctgatacataggtaatattattcttttttgcatagctaatcatttggtcagcttcactagccgaagacttactacagcccatttggctaaatgttcccactatgacaagggttgcgatggttaaattgcgaaaaatgagggttattggggttttggaattcattagattcattaggttcattttttattttttaagtgcttgagttcattaaatctttgttcattcatctcggaggtaaattgctggtagagccatgcaaatccaaaagagaatagtacaatagcaatcataatccatatttcattacccctcatattggctacca

SEQ ID NO: 313 - DNA, 4000 bp, Escherichia coli
  misc_feature (1353)..(1353): n is a, c, g, or t
  misc_feature (1983)..(1983): n is a, c, g, or t
  misc_feature (1989)..(1990): n is a, c, g, or t
  misc_feature (1992)..(1993): n is a, c, g, or t
  misc_feature (2001)..(2002): n is a, c, g, or t
  misc_feature (2004)..(2005): n is a, c, g, or t
  misc_feature (2014)..(2014): n is a, c, g, or t
  misc_feature (2019)..(2020): n is a, c, g, or t
  misc_feature (2025)..(2025): n is a, c, g, or t
  misc_feature (2028)..(2029): n is a, c, g, or t
  misc_feature (2034)..(2035): n is a, c, g, or t
  misc_feature (2040)..(2040): n is a, c, g, or t
  misc_feature (2043)..(2044): n is a, c, g, or t
  misc_feature (2046)..(2046): n is a, c, g, or t
  misc_feature (2049)..(2050): n is a, c, g, or t
  misc_feature (2055)..(2056): n is a, c, g, or t
  misc_feature (2058)..(2059): n is a, c, g, or t
  misc_feature (2063)..(2064): n is a, c, g, or t
tccaagtctgaaatctactctgacatcagcggtctgcacaattacaccaagattcttgaccatgcaaatagtatcggtggaattgaggcatatccggccttcgaagccgtcgagaaatggaatgatatgtacagtataaatgaataccgcccacctcgtaataccacaggctggtttattccttcctccggtcagtggtgggacatccttcagaatctgggcggttgtccggctatggcggataaaggtcagcaaacctcgtcggattccggtgatttccgttggctaggtcaaggcgatgttccagctgccttgaatgcttggatgaataaaattgcagccgacagcaagaatgattttaccaccggtgaccgtttttggtcgtcatcggagttaaatcagttccgcgcacggaactggaacgtgtactcctctgattacgtgtgctgcgactttgtctataagaaatggagtaacgctgtccgtcccgtccttgctttctgaactatttgcctatttagtcctttaagaatatgaagatacaaaacatataccacctcttgcaagctgcgttgctcctgctgcttgtatcctgcacgcaagaagagttccctgccgtgcaagacaaggcgcagcaactgacaatctccgttaccgatggcggatatacatcggctgttgagaatatgaaaacccgtgtcgagacccgtgccgtggagaacggctacaccaccgagttcaccgaaggcgatgcctgcggattctacatggtgcgcggcggaaagccggtttattcaaacgtgaagctgacagccgaaaaggatgccgccacgggcggcatcatgtggaaaaccgacggtacgacgcttgccgccggaatggatggagagagctactacctctactatccttatcaggcggacatggcgggcaagactgccacacctgcggagggggcggtcatgaccgatgccgagttcttcaagccgctcattgatggctggcaacccggggacgaccagagcacccatgccgcttacaccgcctccgacctgatgacagccggaggctcaacgacagggacgggcaacaccatccacctctctttcgccatgaaacaccgcatggcgttggccgtcatcgagatgccgaagaccgtttacaagtttatcgacgcgaatgttcccgactacaccgtgggggcagaagctacgttcacaggcaccgccaagccgctgcgcatggctgacggcacttaccgctacttggtgcactcgtccatgccgactatcgagggatgttatgacggggggaacagggagtttaccatcaccacgtccgcgtcccatcctntcgtaggggaatacaagagatacaaggtggacggtgcgcaggctatggaaaagaattataacttgcagatgggcgactacctgtgcaagaattccgatggtaattggtatattatccccggtgaggaaatgccgaatgaggagtgcatcgccatcgtgttccatgccggtcatcacgaaaacgatgcctccgattactccgccaccggtatcggtcagcagaagtgccacggctatgccattgccttgcaggatgccacaaacggttattgtcagtggggcgtttacggaaccgagttgggttgctgccccacggatggaagcggaaacaaacagaacaattactctacacctgacatcgactggagcggctacgcctggacacagaaaatcatcgccgctgccggaggtacgggcaacttgaatgccgccgaagattccggttatcctgccacctactatgccgttgtggattatgcgagcaaagtcccgtcccctgccaatagcagcggttggtttcttccttctatcggtcagatgtggaatgtttatcaaaaccgtacttctttgtttgacggcaagacagtggtatcaggcttaaagtccgattggtactggtcctcctcggagnactacnncnntccggcgnncnncgctctttntgtgnntgtgnacnncggcnncgtgnacnncnacnntaagnncnncagnnatagctacgtgcgtccggtcttggctttctgacctatttacctattcaatctatttatctatttgcggcgtagccgctcatttaaaagatggaatacccgcgaagcgggtcggaaaaatttttgaaaaatcgagttatggcattatccgaagaattacccctataccgcgacacttaccggttgttgaacaacctgttgatcctgacgcaggattttccgcgcttcttccgctacagtatgggcagccgtatggtggatttgactttggatatgctttctctgatttacaaggcgaacagcagctatgaaaaagtgggcgtattgaccgaatttctcgaccgttaccgcatgttgcagatgcttttccgcgtatgtgtggagcagaaggtcattaccgagcgcaaatacgcctcgttcgggctgctgttggagaagataggcaagcaggctacgagctggaaacaatataacgaacgcggaatgaagaaacaggaagataaaaggcaatgatttatcagtcgggattcgggcggtcaaggcttcccgaagcgaactgtttattattgaaaaagggttgtcggcaggctttcctcgtgcagggaggctcgcaaagacaaaaacagacaacatttactggtcctcctcggagaactacaacaatccggcgaacaacgctctttatgtgaatgtgaacaacggcaacgtgaacaacaacaataagaacaacagaaatagctacgtgcgtccggtcttggccttttcaataaaaactttacgataaacaaaatggtattgcgatatggagttacaacaaagtcttttcacggatgaggaactcggaggcattccgttggaggatgttttcgaggcgtatttcgagtgccgtaaaaagaaacgcaatacctgtaatgcccttgccttcgagagcgattacgaacgcaggtgtgtggaactgtggcgggaaatcaatgccggcacataccgcccttcgcgttccatcgctttcattatcaacaaacccgtgaaacgggagattttcgctgcagacttccgcgaccgtgtggtacaccacctcatagcccgcaggctcgttccgcttttggaagagaagttcatcaatgacagctacagcacccgcaagggaaaaggtacgctctatggcatcgaacatgtggcggaacatatccggctctgttcggaaaactacacgaaagagtgctacatcctgaaaatagacatccgttcgttcttcatgaaaatatcgaagaggcggctgtatgacctgaccgaagaactcttgcacgaacgctacgggggaaacgacctggcgatactgctctatctgctccgtgagactatattcaaccgtccggaaaagaactgcatccgcaagacgcctccccaaagctggcgcggattgcccaaagacaagagcctgttccattccgacggctcgtgcggactgcctatcggcaacctgacaagccagttgctcgcccttaacttcctggacggactggaccatctcatcagcgaagaatggggcgtgaagcactacggcaggtatgtggacgacatggtgcttgtccatccctcgaaagagcacctgatagaggtgaaagcgaaaattgccggctggctctccgaacacgggctgtcgttgcacccgcgcaagatctatctgcaacattacacgaaaggtgtcctgtttatcggagggatgatacttccggggcggaaatacctgagcaaccgcacagtcggcttctgctacgatgccatcgaccgcctgaaccgcttggcggcaggctcgcccgattacgtgaaaacccacggggaggagtttgtcagtacgataaactcctatttgggaatgatgcggcatttttcctcctacaacctgcggtgcaaggtcatgagccgtatcggtaagga

SEQ ID NO: 314 - DNA, 4000 bp, Escherichia coli
  misc_feature (162)..(164): n is a, c, g, or t
  misc_feature (167)..(172): n is a, c, g, or t
  misc_feature (174)..(176): n is a, c, g, or t
  misc_feature (178)..(179): n is a, c, g, or t
  misc_feature (181)..(184): n is a, c, g, or t
  misc_feature (186)..(189): n is a, c, g, or t
  misc_feature (192)..(197): n is a, c, g, or t
  misc_feature (199)..(204): n is a, c, g, or t
  misc_feature (206)..(206): n is a, c, g, or t
  misc_feature (208)..(217): n is a, c, g, or t
  misc_feature (222)..(223): n is a, c, g, or t
  misc_feature (226)..(226): n is a, c, g, or t
  misc_feature (228)..(238): n is a, c, g, or t
  misc_feature (240)..(243): n is a, c, g, or t
  misc_feature (245)..(246): n is a, c, g, or t
  misc_feature (249)..(250): n is a, c, g, or t
  misc_feature (252)..(254): n is a, c, g, or t
  misc_feature (256)..(256): n is a, c, g, or t
  misc_feature (258)..(258): n is a, c, g, or t
  misc_feature (260)..(264): n is a, c, g, or t
  misc_feature (266)..(268): n is a, c, g, or t
  misc_feature (270)..(273): n is a, c, g, or t
  misc_feature (275)..(277): n is a, c, g, or t
  misc_feature (279)..(279): n is a, c, g, or t
  misc_feature (281)..(283): n is a, c, g, or t
  misc_feature (285)..(285): n is a, c, g, or t
  misc_feature (287)..(288): n is a, c, g, or t
  misc_feature (290)..(293): n is a, c, g, or t
  misc_feature (295)..(295): n is a, c, g, or t
  misc_feature (297)..(297): n is a, c, g, or t
  misc_feature (299)..(300): n is a, c, g, or t
  misc_feature (303)..(303): n is a, c, g, or t
  misc_feature (306)..(306): n is a, c, g, or t
  misc_feature (308)..(308): n is a, c, g, or t
  misc_feature (310)..(312): n is a, c, g, or t
  misc_feature (314)..(318): n is a, c, g, or t
  misc_feature (321)..(322): n is a, c, g, or t
  misc_feature (324)..(328): n is a, c, g, or t
  misc_feature (332)..(342): n is a, c, g, or t
  misc_feature (344)..(345): n is a, c, g, or t
  misc_feature (347)..(350): n is a, c, g, or t
  misc_feature (352)..(357): n is a, c, g, or t
  misc_feature (359)..(359): n is a, c, g, or t
  misc_feature (362)..(373): n is a, c, g, or t
  misc_feature (375)..(375): n is a, c, g, or t
  misc_feature (377)..(387): n is a, c, g, or t
  misc_feature (390)..(408): n is a, c, g, or t
  misc_feature (412)..(412): n is a, c, g, or t
  misc_feature (414)..(417): n is a, c, g, or t
  misc_feature (419)..(423): n is a, c, g, or t
  misc_feature (426)..(427): n is a, c, g, or t
  misc_feature (430)..(433): n is a, c, g, or t
  misc_feature (435)..(438): n is a, c, g, or t
  misc_feature (440)..(440): n is a, c, g, or t
  misc_feature (443)..(446): n is a, c, g, or t
  misc_feature (448)..(451): n is a, c, g, or t
  misc_feature (453)..(456): n is a, c, g, or t
  misc_feature (459)..(475): n is a, c, g, or t
  misc_feature (477)..(478): n is a, c, g, or t
  misc_feature (480)..(484): n is a, c, g, or t
  misc_feature (486)..(487): n is a, c, g, or t
  misc_feature (489)..(499): n is a, c, g, or t
  misc_feature (501)..(509): n is a, c, g, or t
  misc_feature (511)..(516): n is a, c, g, or t
  misc_feature (518)..(523): n is a, c, g, or t
  misc_feature (525)..(525): n is a, c, g, or t
  misc_feature (529)..(531): n is a, c, g, or t
  misc_feature (533)..(533): n is a, c, g, or t
  misc_feature (535)..(537): n is a, c, g, or t
  misc_feature (539)..(543): n is a, c, g, or t
  misc_feature (545)..(545): n is a, c, g, or t
  misc_feature (548)..(550): n is a, c, g, or t
  misc_feature (552)..(552): n is a, c, g, or t
  misc_feature (555)..(556): n is a, c, g, or t
  misc_feature (558)..(558): n is a, c, g, or t
  misc_feature (560)..(563): n is a, c, g, or t
  misc_feature (565)..(565): n is a, c, g, or t
  misc_feature (568)..(579): n is a, c, g, or t
  misc_feature (581)..(583): n is a, c, g, or t
  misc_feature (585)..(588): n is a, c, g, or t
  misc_feature (590)..(591): n is a, c, g, or t
  misc_feature (593)..(593): n is a, c, g, or t
  misc_feature (595)..(597): n is a, c, g, or t
  misc_feature (600)..(602): n is a, c, g, or t
  misc_feature (605)..(605): n is a, c, g, or t
  misc_feature (610)..(615): n is a, c, g, or t
  misc_feature (617)..(617): n is a, c, g, or t
  misc_feature (619)..(621): n is a, c, g, or t
  misc_feature (623)..(623): n is a, c, g, or t
  misc_feature (625)..(626): n is a, c, g, or t
  misc_feature (629)..(629): n is a, c, g, or t
  misc_feature (631)..(631): n is a, c, g, or t
  misc_feature (634)..(638): n is a, c, g, or t
  misc_feature (640)..(640): n is a, c, g, or t
  misc_feature (642)..(643): n is a, c, g, or t
  misc_feature (645)..(646): n is a, c, g, or t
  misc_feature (648)..(650): n is a, c, g, or t
  misc_feature (652)..(656): n is a, c, g, or t
  misc_feature (658)..(667): n is a, c, g, or t
  misc_feature (669)..(676): n is a, c, g, or t
  misc_feature (679)..(684): n is a, c, g, or t
  misc_feature (686)..(688): n is a, c, g, or t
  misc_feature (690)..(695): n is a, c, g, or t
  misc_feature (697)..(698): n is a, c, g, or t
  misc_feature (700)..(706): n is a, c, g, or t
  misc_feature (709)..(709): n is a, c, g, or t
  misc_feature (712)..(712): n is a, c, g, or t
  misc_feature (714)..(714): n is a, c, g, or t
  misc_feature (716)..(730): n is a, c, g, or t
  misc_feature (733)..(734): n is a, c, g, or t
  misc_feature (736)..(739): n is a, c, g, or t
  misc_feature (741)..(748): n is a, c, g, or t
  misc_feature (750)..(750): n is a, c, g, or t
  misc_feature (752)..(755): n is a, c, g, or t
  misc_feature (757)..(760): n is a, c, g, or t
  misc_feature (762)..(762): n is a, c, g, or t
  misc_feature (764)..(766): n is a, c, g, or t
  misc_feature (769)..(772): n is a, c, g, or t
  misc_feature (774)..(774): n is a, c, g, or t
  misc_feature (777)..(777): n is a, c, g, or t
  misc_feature (780)..(781): n is a, c, g, or t
  misc_feature (784)..(787): n is a, c, g, or t
  misc_feature (789)..(789): n is a, c, g, or t
  misc_feature (794)..(807): n is a, c, g, or t
  misc_feature (809)..(812): n is a, c, g, or t
  misc_feature (815)..(816): n is a, c, g, or t
  misc_feature (818)..(818): n is a, c, g, or t
  misc_feature (820)..(820): n is a, c, g, or t
  misc_feature (823)..(825): n is a, c, g, or t
  misc_feature (827)..(847): n is a, c, g, or t
  misc_feature (849)..(849): n is a, c, g, or t
  misc_feature (852)..(854): n is a, c, g, or t
  misc_feature (859)..(862): n is a, c, g, or t
  misc_feature (864)..(866): n is a, c, g, or t
  misc_feature (869)..(871): n is a, c, g, or t
  misc_feature (874)..(876): n is a, c, g, or t
  misc_feature (878)..(880): n is a, c, g, or t
  misc_feature (882)..(883): n is a, c, g, or t
  misc_feature (886)..(887): n is a, c, g, or t
  misc_feature (889)..(894): n is a, c, g, or t
  misc_feature (896)..(902): n is a, c, g, or t
  misc_feature (906)..(907): n is a, c, g, or t
  misc_feature (909)..(909): n is a, c, g, or t
  misc_feature (911)..(917): n is a, c, g, or t
  misc_feature (919)..(927): n is a, c, g, or t
  misc_feature (929)..(934): n is a, c, g, or t
  misc_feature (936)..(939): n is a, c, g, or t
  misc_feature (941)..(947): n is a, c, g, or t
  misc_feature (949)..(949): n is a, c, g, or t
  misc_feature (953)..(956): n is a, c, g, or t
  misc_feature (958)..(961): n is a, c, g, or t
  misc_feature (963)..(963): n is a, c, g, or t
  misc_feature (965)..(965): n is a, c, g, or t
  misc_feature (967)..(968): n is a, c, g, or t
  misc_feature (970)..(976): n is a, c, g, or t
  misc_feature (978)..(980): n is a, c, g, or t
  misc_feature (984)..(990): n is a, c, g, or t
  misc_feature (992)..(997): n is a, c, g, or t
  misc_feature (999)..(1002): n is a, c, g, or t
  misc_feature (1005)..(1007): n is a, c, g, or t
  misc_feature (1009)..(1018): n is a, c, g, or t
  misc_feature (1021)..(1023): n is a, c, g, or t
  misc_feature (1026)..(1026): n is a, c, g, or t
  misc_feature (1030)..(1030): n is a, c, g, or t
  misc_feature (1032)..(1035): n is a, c, g, or t
  misc_feature (1038)..(1038): n is a, c, g, or t
  misc_feature (1041)..(1041): n is a, c, g, or t
  misc_feature (1044)..(1044): n is a, c, g, or t
  misc_feature (1048)..(1048): n is a, c, g, or t
  misc_feature (1050)..(1050): n is a, c, g, or t
  misc_feature (1052)..(1053): n is a, c, g, or t
  misc_feature (1055)..(1056): n is a, c, g, or t
  misc_feature (1058)..(1059): n is a, c, g, or t
  misc_feature (1061)..(1064): n is a, c, g, or t
  misc_feature (1066)..(1066): n is a, c, g, or t
  misc_feature (1068)..(1075): n is a, c, g, or t
  misc_feature (1077)..(1079): n is a, c, g, or t
  misc_feature (1081)..(1094): n is a, c, g, or t
  misc_feature (1096)..(1101): n is a, c, g, or t
  misc_feature (1103)..(1107): n is a, c, g, or t
  misc_feature (1109)..(1109): n is a, c, g, or t
  misc_feature (1111)..(1111): n is a, c, g, or t
  misc_feature (1114)..(1116): n is a, c, g, or t
  misc_feature (1119)..(1123): n is a, c, g, or t
  misc_feature (1125)..(1126): n is a, c, g, or t
  misc_feature (1128)..(1128): n is a, c, g, or t
  misc_feature (1130)..(1131): n is a, c, g, or t
  misc_feature (1133)..(1139): n is a, c, g, or t
  misc_feature (1142)..(1142): n is a, c, g, or t
  misc_feature (1146)..(1146): n is a, c, g, or t
  misc_feature (1148)..(1151): n is a, c, g, or t
  misc_feature (1153)..(1153): n is a, c, g, or t
  misc_feature (1155)..(1156): n is a, c, g, or t
  misc_feature (1158)..(1160): n is a, c, g, or t
  misc_feature (1162)..(1166): n is a, c, g, or t
  misc_feature (1168)..(1168): n is a, c, g, or t
  misc_feature (1170)..(1171): n is a, c, g, or t
  misc_feature (1174)..(1177): n is a, c, g, or t
  misc_feature (1180)..(1184): n is a, c, g, or t
  misc_feature (1189)..(1189): n is a, c, g, or t
  misc_feature (1191)..(1197): n is a, c, g, or t
  misc_feature (1200)..(1200): n is a, c, g, or t
  misc_feature (1202)..(1204): n is a, c, g, or t
  misc_feature (1206)..(1206): n is a, c, g, or t
  misc_feature (1208)..(1208): n is a, c, g, or t
  misc_feature (1211)..(1217): n is a, c, g, or t
  misc_feature (1220)..(1221): n is a, c, g, or t
  misc_feature (1223)..(1228): n is a, c, g, or t
  misc_feature (1230)..(1232): n is a, c, g, or t
  misc_feature (1234)..(1234): n is a, c, g, or t
  misc_feature (1236)..(1236): n is a, c, g, or t
  misc_feature (1238)..(1241): n is a, c, g, or t
  misc_feature (1243)..(1243): n is a, c, g, or t
  misc_feature (1245)..(1251): n is a, c, g, or t
  misc_feature (1253)..(1253): n is a, c, g, or t
  misc_feature (1257)..(1258): n is a, c, g, or t
  misc_feature (1260)..(1261): n is a, c, g, or t
  misc_feature (1263)..(1264): n is a, c, g, or t
  misc_feature (1268)..(1272): n is a, c, g, or t
  misc_feature (1275)..(1275): n is a, c, g, or t
  misc_feature (1277)..(1284): n is a, c, g, or t
  misc_feature (1286)..(1293): n is a, c, g, or t
  misc_feature (1295)..(1297): n is a, c, g, or t
  misc_feature (1300)..(1301): n is a, c, g, or t
  misc_feature (1305)..(1305): n is a, c, g, or t
  misc_feature (1307)..(1314): n is a, c, g, or t
  misc_feature (1318)..(1318): n is a, c, g, or t
  misc_feature (1320)..(1335): n is a, c, g, or t
  misc_feature (1337)..(1339): n is a, c, g, or t
  misc_feature (1341)..(1342): n is a, c, g, or t
  misc_feature (1345)..(1345): n is a, c, g, or t
  misc_feature (1348)..(1349): n is a, c, g, or t
  misc_feature (1351)..(1351): n is a, c, g, or t
  misc_feature (1353)..(1355): n is a, c, g, or t
  misc_feature (1357)..(1359): n is a, c, g, or t
  misc_feature (1362)..(1362): n is a, c, g, or t
  misc_feature (1364)..(1365): n is a, c, g, or t
  misc_feature (1367)..(1367): n is a, c, g, or t
  misc_feature (1369)..(1376): n is a, c, g, or t
  misc_feature (1379)..(1380): n is a, c, g, or t
  misc_feature (1382)..(1382): n is a, c, g, or t
  misc_feature (1384)..(1384): n is a, c, g, or t
  misc_feature (1387)..(1400): n is a, c, g, or t
  misc_feature (1404)..(1412): n is a, c, g, or t
  misc_feature (1414)..(1421): n is a, c, g, or t
  misc_feature (1423)..(1426): n is a, c, g, or t
  misc_feature (1428)..(1429): n is a, c, g, or t
  misc_feature (1431)..(1431): n is a, c, g, or t
  misc_feature (1433)..(1433): n is a, c, g, or t
  misc_feature (1437)..(1438): n is a, c, g, or t
  misc_feature (1450)..(1451): n is a, c, g, or t
  misc_feature (1454)..(1454): n is a, c, g, or t
  misc_feature (1456)..(1458): n is a, c, g, or t
  misc_feature (1460)..(1462): n is a, c, g, or t
  misc_feature (1466)..(1469): n is a, c, g, or t
  misc_feature (1471)..(1474): n is a, c, g, or t
  misc_feature (1476)..(1481): n is a, c, g, or t
  misc_feature (1484)..(1485): n is a, c, g, or t
  misc_feature (1487)..(1493): n is a, c, g, or t
  misc_feature (1495)..(1495): n is a, c, g, or t
  misc_feature (1987)..(1987): n is a, c, g, or t
  misc_feature (1993)..(1993): n is a, c, g, or t
  misc_feature (2001)..(2001): n is a, c, g, or t
  misc_feature (2004)..(2005): n is a, c, g, or t
  misc_feature (2019)..(2019): n is a, c, g, or t
  misc_feature (2025)..(2026): n is a, c, g, or t
  misc_feature (2028)..(2028): n is a, c, g, or t
  misc_feature (2034)..(2035): n is a, c, g, or t
  misc_feature (2040)..(2040): n is a, c, g, or t
  misc_feature (2044)..(2044): n is a, c, g, or t
  misc_feature (2046)..(2046): n is a, c, g, or t
  misc_feature (2050)..(2050): n is a, c, g, or t
  misc_feature (2058)..(2058): n is a, c, g, or t
  misc_feature (2063)..(2064): n is a, c, g, or t
  misc_feature (2841)..(2841): n is a, c, g, or t
  misc_feature (2846)..(2846): n is a, c, g, or t
  misc_feature (2849)..(2850): n is a, c, g, or t
  misc_feature (2854)..(2855): n is a, c, g, or t
  misc_feature (2859)..(2859): n is a, c, g, or t
  misc_feature (2861)..(2861): n is a, c, g, or t
  misc_feature (2863)..(2863): n is a, c, g, or t
  misc_feature (2865)..(2865): n is a, c, g, or t
  misc_feature (2871)..(2871): n is a, c, g, or t
  misc_feature (2874)..(2874): n is a, c, g, or t
  misc_feature (2879)..(2879): n is a, c, g, or t
  misc_feature (2890)..(2890): n is a, c, g, or t
  misc_feature (2893)..(2893): n is a, c, g, or t
  misc_feature (2895)..(2895): n is a, c, g, or t
  misc_feature (2900)..(2900): n is a, c, g, or t
  misc_feature (2904)..(2905): n is a, c, g, or t
  misc_feature (2912)..(2912): n is a, c, g, or t
  misc_feature (2916)..(2916): n is a, c, g, or t
  misc_feature (2919)..(2919): n is a, c, g, or t
  misc_feature (2921)..(2921): n is a, c, g, or t
  misc_feature (2926)..(2927): n is a, c, g, or t
  misc_feature (2929)..(2929): n is a, c, g, or t
  misc_feature (2932)..(2932): n is a, c, g, or t
  misc_feature (2934)..(2934): n is a, c, g, or t
  misc_feature (2936)..(2936): n is a, c, g, or t
  misc_feature (2938)..(2938): n is a, c, g, or t
  misc_feature (2944)..(2944): n is a, c, g, or t
  misc_feature (2946)..(2946): n is a, c, g, or t
  misc_feature (2948)..(2948): n is a, c, g, or t
  misc_feature (2952)..(2953): n is a, c, g, or t
  misc_feature (2958)..(2958): n is a, c, g, or t
  misc_feature (2962)..(2962): n is a, c, g, or t
  misc_feature (2964)..(2964): n is a, c, g, or t
  misc_feature (2967)..(2967): n is a, c, g, or t
  misc_feature (2971)..(2972): n is a, c, g, or t
  misc_feature (2974)..(2974): n is a, c, g, or t
  misc_feature (2976)..(2978): n is a, c, g, or t
  misc_feature (2981)..(2981): n is a, c, g, or t
  misc_feature (2983)..(2984): n is a, c, g, or t
  misc_feature (2991)..(2991): n is a, c, g, or t
  misc_feature (2995)..(2995): n is a, c, g, or t
  misc_feature (3002)..(3002): n is a, c, g, or t
  misc_feature (3005)..(3007): n is a, c, g, or t
  misc_feature (3009)..(3014): n is a, c, g, or t
  misc_feature (3016)..(3016): n is a, c, g, or t
  misc_feature (3021)..(3025): n is a, c, g, or t
  misc_feature (3028)..(3028): n is a, c, g, or t
  misc_feature (3031)..(3033): n is a, c, g, or t
  misc_feature (3035)..(3037): n is a, c, g, or t
  misc_feature (3039)..(3039): n is a, c, g, or t
  misc_feature (3041)..(3047): n is a, c, g, or t
  misc_feature (3049)..(3050): n is a, c, g, or t
  misc_feature (3053)..(3053): n is a, c, g, or t
  misc_feature (3056)..(3056): n is a, c, g, or t
  misc_feature (3058)..(3058): n is a, c, g, or t
  misc_feature (3061)..(3061): n is a, c, g, or t
  misc_feature (3063)..(3068): n is a, c, g, or t
  misc_feature (3071)..(3073): n is a, c, g, or t
  misc_feature (3075)..(3078): n is a, c, g, or t
  misc_feature (3080)..(3081): n is a, c, g, or t
  misc_feature (3087)..(3090): n is a, c, g, or t
  misc_feature (3094)..(3094): n is a, c, g, or t
  misc_feature (3097)..(3100): n is a, c, g, or t
  misc_feature (3104)..(3106): n is a, c, g, or t
  misc_feature (3108)..(3109): n is a, c, g, or t
  misc_feature (3111)..(3114): n is a, c, g, or t
  misc_feature (3116)..(3116): n is a, c, g, or t
  misc_feature (3118)..(3121): n is a, c, g, or t
  misc_feature (3124)..(3125): n is a, c, g, or t
  misc_feature (3129)..(3132): n is a, c, g, or t
  misc_feature (3134)..(3134): n is a, c, g, or t
  misc_feature (3137)..(3137): n is a, c, g, or t
  misc_feature (3139)..(3145): n is a, c, g, or t
  misc_feature (3149)..(3151): n is a, c, g, or t
  misc_feature (3153)..(3157): n is a, c, g, or t
  misc_feature (3159)..(3159): n is a, c, g, or t
  misc_feature (3161)..(3163): n is a, c, g, or t
  misc_feature (3167)..(3167): n is a, c, g, or t
  misc_feature (3169)..(3169): n is a, c, g, or t
  misc_feature (3171)..(3173): n is a, c, g, or t
  misc_feature (3176)..(3177): n is a, c, g, or t
  misc_feature (3180)..(3191): n is a, c, g, or t
  misc_feature (3193)..(3197): n is a, c, g, or t
  misc_feature (3199)..(3199): n is a, c, g, or t
  misc_feature (3202)..(3204): n is a, c, g, or t
  misc_feature (3206)..(3206): n is a, c, g, or t
  misc_feature (3212)..(3212): n is a, c, g, or t
  misc_feature (3215)..(3225): n is a, c, g, or t
  misc_feature (3227)..(3230): n is a, c, g, or t
  misc_feature (3232)..(3232): n is a, c, g, or t
  misc_feature (3234)..(3235): n is a, c, g, or t
  misc_feature (3238)..(3239): n is a, c, g, or t
  misc_feature (3241)..(3241): n is a, c, g, or t
  misc_feature (3243)..(3244): n is a, c, g, or t
  misc_feature (3246)..(3246): n is a, c, g, or t
  misc_feature (3248)..(3251): n is a, c, g, or t
  misc_feature (3253)..(3253): n is a, c, g, or t
  misc_feature (3255)..(3256): n is a, c, g, or t
  misc_feature (3258)..(3259): n is a, c, g, or t
  misc_feature (3261)..(3262): n is a, c, g, or t
  misc_feature (3264)..(3266): n is a, c, g, or t
  misc_feature (3269)..(3271): n is a, c, g, or t
  misc_feature (3273)..(3277): n is a, c, g, or t
  misc_feature (3280)..(3281): n is a, c, g, or t
  misc_feature (3284)..(3286): n is a, c, g, or t
  misc_feature (3288)..(3290): n is a, c, g, or t
  misc_feature (3293)..(3294): n is a, c, g, or t
  misc_feature (3298)..(3305): n is a, c, g, or t
  misc_feature (3307)..(3308): n is a, c, g, or t
  misc_feature (3310)..(3312): n is a, c, g, or t
  misc_feature (3314)..(3315): n is a, c, g, or t
  misc_feature (3317)..(3320): n is a, c, g, or t
  misc_feature (3325)..(3330): n is a, c, g, or t
  misc_feature (3332)..(3334): n is a, c, g, or t
  misc_feature (3336)..(3337): n is a, c, g, or t
  misc_feature (3339)..(3340): n is a, c, g, or t
  misc_feature (3342)..(3343): n is a, c, g, or t
  misc_feature (3345)..(3346): n is a, c, g, or t
  misc_feature (3349)..(3352): n is a, c, g, or t
  misc_feature (3354)..(3355): n is a, c, g, or t
  misc_feature (3357)..(3358): n is a, c, g, or t
  misc_feature (3360)..(3363): n is a, c, g, or t
  misc_feature (3365)..(3370): n is a, c, g, or t
  misc_feature (3372)..(3378): n is a, c, g, or t
  misc_feature (3383)..(3383): n is a, c, g, or t
  misc_feature (3386)..(3387): n is a, c, g, or t
  misc_feature (3389)..(3389): n is a, c, g, or t
  misc_feature (3391)..(3392): n is a, c, g, or t
  misc_feature (3394)..(3410): n is a, c, g, or t
  misc_feature (3412)..(3413): n is a, c, g, or t
  misc_feature (3415)..(3426): n is a, c, g, or t
  misc_feature (3428)..(3429): n is a, c, g, or t
  misc_feature (3433)..(3435): n is a, c, g, or t
  misc_feature (3437)..(3437): n is a, c, g, or t
  misc_feature (3439)..(3439): n is a, c, g, or t
  misc_feature (3443)..(3444): n is a, c, g, or t
  misc_feature (3446)..(3452): n is a, c, g, or t
  misc_feature (3454)..(3456): n is a, c, g, or t
  misc_feature (3458)..(3458): n is a, c, g, or t
  misc_feature (3461)..(3462): n is a, c, g, or t
  misc_feature (3464)..(3465): n is a, c, g, or t
  misc_feature (3469)..(3469): n is a, c, g, or t
  misc_feature (3472)..(3475): n is a, c, g, or t
  misc_feature (3477)..(3477): n is a, c, g, or t
  misc_feature (3479)..(3480): n is a, c, g, or t
  misc_feature (3482)..(3483): n is a, c, g, or t
  misc_feature (3485)..(3486): n is a, c, g, or t
  misc_feature (3489)..(3489): n is a, c, g, or t
  misc_feature (3492)..(3495): n is a, c, g, or t
  misc_feature (3497)..(3500): n is a, c, g, or t
  misc_feature (3502)..(3504): n is a, c, g, or t
  misc_feature (3506)..(3506): n is a, c, g, or t
  misc_feature (3508)..(3509): n is a, c, g, or t
  misc_feature (3511)..(3511): n is a, c, g, or t
  misc_feature (3513)..(3516): n is a, c, g, or t
  misc_feature (3518)..(3518): n is a, c, g, or t
  misc_feature (3520)..(3525): n is a, c, g, or t
  misc_feature (3528)..(3531): n is a, c, g, or t
  misc_feature (3533)..(3534): n is a, c, g, or t
  misc_feature (3536)..(3537): n is a, c, g, or t
  misc_feature (3539)..(3540): n is a, c, g, or t
  misc_feature (3542)..(3542): n is a, c, g, or t
  misc_feature (3544)..(3548): n is a, c, g, or t
  misc_feature (3550)..(3551): n is a, c, g, or t
  misc_feature (3553)..(3555): n is a, c, g, or t
  misc_feature (3557)..(3561): n is a, c, g, or t
  misc_feature (3565)..(3565): n is a, c, g, or t
  misc_feature (3567)..(3567): n is a, c, g, or t
  misc_feature (3569)..(3570): n is a, c, g, or t
  misc_feature (3572)..(3572): n is a, c, g, or t
  misc_feature (3574)..(3575): n is a, c, g, or t
  misc_feature (3577)..(3577): n is a, c, g, or t
  misc_feature (3579)..(3579): n is a, c, g, or t
  misc_feature (3582)..(3583): n is a, c, g, or t
  misc_feature (3586)..(3586): n is a, c, g, or t
  misc_feature (3589)..(3601): n is a, c, g, or t
  misc_feature (3603)..(3604): n is a, c, g, or t
  misc_feature (3606)..(3607): n is a, c, g, or t
  misc_feature (3611)..(3615): n is a, c, g, or t
  misc_feature (3617)..(3619): n is a, c, g, or t
  misc_feature (3621)..(3624): n is a, c, g, or t
  misc_feature (3626)..(3628): n is a, c, g, or t
  misc_feature (3630)..(3635): n is a, c, g, or t
  misc_feature (3637)..(3641): n is a, c, g, or t
  misc_feature (3644)..(3644): n is a, c, g, or t
  misc_feature (3647)..(3649): n is a, c, g, or t
  misc_feature (3651)..(3653): n is a, c, g, or t
  misc_feature (3655)..(3657): n is a, c, g, or t
  misc_feature (3660)..(3663): n is a, c, g, or t
  misc_feature (3666)..(3671): n is a, c, g, or t
  misc_feature (3673)..(3680): n is a, c, g, or t
  misc_feature (3682)..(3684): n is a, c, g, or t
  misc_feature (3687)..(3690): n is a, c, g, or t
  misc_feature (3694)..(3694): n is a, c, g, or t
  misc_feature (3696)..(3697): n is a, c, g, or t
  misc_feature (3699)..(3699): n is a, c, g, or t
  misc_feature (3701)..(3703): n is a, c, g, or t
  misc_feature (3705)..(3709): n is a, c, g, or t
  misc_feature (3711)..(3712): n is a, c, g, or t
  misc_feature (3714)..(3717): n is a, c, g, or t
  misc_feature (3720)..(3731): n is a, c, g, or t
  misc_feature (3734)..(3736): n is a, c, g, or t
  misc_feature (3738)..(3738): n is a, c, g, or t
  misc_feature (3740)..(3751): n is a, c, g, or t
  misc_feature (3753)..(3755): n is a, c, g, or t
  misc_feature (3757)..(3758): n is a, c, g, or t
  misc_feature (3760)..(3762): n is a, c, g, or t
  misc_feature (3767)..(3770): n is a, c, g, or t
  misc_feature (3772)..(3774): n is a, c, g, or t
  misc_feature (3777)..(3780): n is a, c, g, or t
  misc_feature (3782)..(3783): n is a, c, g, or t
  misc_feature (3786)..(3793): n is a, c, g, or t
  misc_feature (3795)..(3795): n is a, c, g, or t
  misc_feature (3797)..(3797): n is a, c, g, or t
  misc_feature (3801)..(3802): n is a, c, g, or t
  misc_feature (3807)..(3809): n is a, c, g, or t
  misc_feature (3812)..(3816): n is a, c, g, or t
  misc_feature (3818)..(3818): n is a, c, g, or t
  misc_feature (3820)..(3828): n is a, c, g, or t
  misc_feature (3830)..(3830): n is a, c, g, or t
  misc_feature (3833)..(3839): n is a, c, g, or t
  misc_feature (3841)..(3844): n is a, c, g, or t
  misc_feature (3846)..(3851): n is a, c, g, or t
  misc_feature (3853)..(3854): n is a, c, g, or t
  misc_feature (3856)..(3858): n is a, c, g, or t
  misc_feature (3860)..(3860): n is a, c, g, or t
  misc_feature (3862)..(3863): n is a, c, g, or t
  misc_feature (3866)..(3866): n is a, c, g, or t
  misc_feature (3868)..(3869): n is a, c, g, or t
  misc_feature (3871)..(3873): n is a, c, g, or t
  misc_feature (3875)..(3879): n is a, c, g, or t
  misc_feature (3882)..(3884): n is a, c, g, or t
  misc_feature (3886)..(3891): n is a, c, g, or t
  misc_feature (3895)..(3895): n is a, c, g, or t
  misc_feature (3898)..(3900): n is a, c, g, or t
  misc_feature (3904)..(3905): n is a, c, g, or t
  misc_feature (3907)..(3909): n is a, c, g, or t
  misc_feature (3912)..(3923): n is a, c, g, or t
  misc_feature (3926)..(3928): n is a, c, g, or t
  misc_feature (3930)..(3931): n is a, c, g, or t
  misc_feature (3935)..(3935): n is a, c, g, or t
  misc_feature (3938)..(3938): n is a, c, g, or t
  misc_feature (3940)..(3946): n is a, c, g, or t
  misc_feature (3948)..(3950): n is a, c, g, or t
  misc_feature (3955)..(3955): n is a, c, g, or t
  misc_feature (3957)..(3957): n is a, c, g, or t
  misc_feature (3960)..(3962): n is a, c, g, or t
  misc_feature (3965)..(3965): n is a, c, g, or t
  misc_feature (3967)..(3970): n is a, c, g, or t
  misc_feature (3973)..(3975): n is a, c, g, or t
  misc_feature (3977)..(3977): n is a, c, g, or t
  misc_feature (3979)..(3980): n is a, c, g, or t
  misc_feature (3982)..(3986): n is a, c, g, or t
  misc_feature (3988)..(3993): n is a, c, g, or t
  misc_feature (3996)..(3996): n is a, c, g, or t
  misc_feature (3998)..(3998): n is a, c, g, or t
  misc_feature (4000)..(4000): n is a, c, g, or t
cgggcagcgttgtgagcgactggatgttacgccagtgcaccggtgccccgaagacggccacggacaagtgcgtggcaacctttgacgccgccacgggcgtgatgactttcaccatgatcctgctcccgcagacactcgccaacgctttggtgcttgagatannnccnnnnnncnnngnntnnnngnnnnacnnnnnnannnnnntnannnnnnnnnngttgnnggncnnnnnnnnnnntnnnnannccnncnnngngnannnnncnnngnnnncnnntngnnnangnncnnnngnanannggnacnangnnngnnnnnatnngnnnnntgcnnnnnnnnnnngnntnnnnannnnnntnccnnnnnnnnnnnntnannnnnnnnnnngcnnnnnnnnnnnnnnnnnnnggcngnnnncnnnnnaannggnnnngnnnnanaannnnannnntnnnnacnnnnnnnnnnnnnnnnngnncnnnnngnnannnnnnnnnnngnnnnnnnnngnnnnnntnnnnnntntgannntnannngnnnnntnctnnntnccnntngnnnngnggnnnnnnnnnnnncnnncnnnncnnangnnnagnnnccnctgcnnnnnncngnnnangnngcncngcnnnnnancnncnncnnngnnnnngnnnnnnnnnngnnnnnnnnggnnnnnngnnngnnnnnngnngnnnnnnntgntancnannnnnnnnnnnnnnncgnntnnnncnnnnnnnncncnnnngnnnncnannntgnnnncnatnggnngannnncnatgannnnnnnnnnnnnncnnnnacnncngncannnannnnnnnnnnnnnnnnnnnnncnaannnggcgnnnncnnngcnnncgnnntnnngnncgnnannnnnntnnnnnnntatnncnannnnnnnannnnnnnnntnnnnnncnnnntnnnnnnnancgannnnannnncnangnngnnnnnnncnnnacgnnnnnnnannnnnngnnnncgnnngnnnnnnnnnncgnnnacncgcnannnnacncanccnccgncntnntnncnncnnnngncnnnnnnnncnnngnnnnnnnnnnnnnntnnnnnncnnnnncnangannnacnnnnngnnantnncnnnnnnnganatgncnnnnangnngnnnannnnnancnncannnncannnnngactntnnnnnnnctncnnnancngannnnnnnggnnannnnnngnnntncngnnnnangnnnnnnncntacnncnncnncgtnnnnnccngnnnnnnnnannnnnnnncnnncannggcngnnnnnnnnacgncnnnnnnnnnnnnnnnntnnncnngancannancnnngnnngcncnnanannnnnnnnaanntngncgnnnnnnnnnnnnnngacnnnnnnnnnannnnnnnngnnnngnncnanctcnntgccgacggcannatngnnngnnnagannnnannnngnnnnnngannannnnnnnancgttatcgccatcgtgttccatgccggtcatcacgaaaacgatgcctccgattactccgccaccggtatcggtcagcagaagtgccacggctatgccgttgccttgcaggatgccacaaacggttattgtcagtggggcgtttacggaaccgagttgggttgctgccccacggatggaagcggaaaaaaacagaacaattactctgcacctgacatcgactggagcggctacgcctggacacagaaaatcatcaccgctgccggcggcaaggacaagttgaatgccaccgaagattccggttatcctgccacctactatgccgttgtggattatgcgcacaaagtcccgtcccctgccaacagcaccggctggtttttgccctccatcggccagatgtggaatgtttatcaaaaccgcgcttctttgtttgaaggcaagacagtggtatcaggcttaaagtctgactggtactggtcctcctcggagttctncgaccntccggcgngcnncgctctttatgtgngtgtgnncngcggcnncgtgnacancnacantaaggacnacagnnatagttacgtgcgtccggtcttggctttctgacctatttacctattcaatctatttatctatttgcggcgtagccgctcgttgataaaggctgaatacccgcgaagcgggtcggaaaaatttttgaaaaatcgagttatggcattatccgaagaattacccctataccgcgacacttaccggttgttgaacaacctgttgatcctgacgcaggattttccgcgcttcttccgctacagtatgggcagccgtatggtggatttgactttggatatgctttctctgatttacaaggcgaacagcagctatgaaaaagtgggcgtattgaccgaatttctcgaccgttaccgcatgttgcagatgcttttccgcgtatgtgtggagcagaaggtcattaccgagcgcaaatacgcctcgttcgggctgctgttggagaagataggcaagcaggctacgagctggaaacaatataacgaacgcggaatgaagaaacaggaagataaaaggcaatgatttatcagtcgggattcgggcggtcaaggcttcccgaagcgaactgtttattattgaaaaagggttgtcggcaggctttcctcgtgcagggaggctcgcaaagacaaaaacagacaacatttactggtcctcctcggagttctacaacaatccggcgaacaacgctctttatgtgaatgtgaacaacggcaacgtgaacaacaacaataagaacaacagaaatagttacgtgcgtccggtcttggctttttcaataaaaactttncgatnaannaaanngtanancnanatgganttncaacnaagtctttttncanangaggnactnngaggcantccnttngnggatnncntcnangngnatttcnantnccgnnaaaanaaangnaanaccnncnannnccntnncttcganagcnattacgnacnnngnnnnnngnaccgnnnnnggnaannnannncngnnnnnnncnnccnttncngtncnnnnnnttnnntnnnnannaacccnnnnaaanggnnnntttnnncnncnnnntncnnnnacnntgtnnnnancancnnnnnnncccnnngnnnnntncnnntttngnannnaanntcnnnnnnnnnnnntnnnnntnccnnnangggaanggnnnnnnnnnnngnnnnanannggnngnannancnnnncngnntnncnncnnngannncnnnnnggnnttnnntnnnctnnaaannnnnnnncnntnnntnntnnnnaaaannnnnnannngnngnngnntnnccnnnncnnannannnntnnnnnnannnnnnnggggnaannancnngnnnnnnnnnnnnnnnnncnncnnnnnnnnnnnntnnaccnnncngnaaannannnnnnncnnnanacnncnncccnaannnngngnngnntnnccnaannnnannnncnnntncnntncnnnngntnnnnnngannnncnntnngnnancnnnnnanncnnntnnnnncccntnanntncnngncngannggnccnnnnnnnnnnnnnannanngggnnnnnannncnnnngnnngnnnnnngnnnnnatngtnnntnnncnnnccnnnnaannnnnncnnnnnnnngnnnaannnnaaantnncngnnngnnnnncnnannnnggnnnnnnnnnnnnccnnncnannnnnnnnnnnnannntnnannnaaggnnnncnnnttnnnngnnggnnnnnnnntncngggnngaaannnctnnnnnancnnnnnnnnngnttnnnnnnngnnnncnnnnnncnncnnnancnnttngnngnnngnnnnnccnnntnnnnnnaaanccnnngggnngnnnttnnnnnnnnnnnnaannncnntttnggnannnnnnngnnnttttncnccnnnaancnnnngtnnnangnnannnnncnnnnnngtnangn

SEQ ID NO: 315 - DNA, 4000 bp, Escherichia coli
  misc_feature (4)..(4): n is a, c, g, or t
  misc_feature (11)..(11): n is a, c, g, or t
  misc_feature (21)..(21): n is a, c, g, or t
  misc_feature (24)..(24): n is a, c, g, or t
  misc_feature (31)..(31): n is a, c, g, or t
  misc_feature (75)..(75): n is a, c, g, or t
  misc_feature (79)..(79): n is a, c, g, or t
  misc_feature (138)..(138): n is a, c, g, or t
  misc_feature (196)..(196): n is a, c, g, or t
  misc_feature (1870)..(1870): n is a, c, g, or t
  misc_feature (1938)..(1938): n is a, c, g, or t
  misc_feature (1987)..(1987): n is a, c, g, or t
  misc_feature (3751)..(3751): n is a, c, g, or t
ggantattttntaaaattttnacnatttcgnaaatattcagatttaatcctttttcgtcatttaaagagaaatgnatcnagaagaattttaaactctttttgaacaaaccgatgaccacgttttgagcttgctagatnaatgcattttctcatttactttaattttaattcaaatatacaatgaaaaaatataatnatcagctacatgacccaatcagagaacactcactttaaaggtcttattgaaaaggcctccgacagcaaaaaaatagatcttctggctcaatgggctctttgcgaatttgatcttttttattccagcttccagacgataacagaatcagcaaagactgcattcgaaactcgcgactaccaagcgtcgctgacaattagtaggaaacgactgtctctatacagtgacagtatgttcaaattgggggaaaagcttgcggatgctttctctcctatctcaagagatcaggcactatgggaagtaattgaagaaaaatatcggcagcttgttagaaaccgttatgagggggacctcgctctggcatatattcattcagttcgtcggtcgctcttcctaggagaatggagccccgtagcctattccttcgataccccaagcaaggccaacacaaacttttccaactttctgttcgagacttttcaaacggaattaatcaccactgaccttcttattgatatactccgtgtccctggattcaacgtccagtatcgtgaactgaaggtggacgcaatgttggcagcacaacgagttaaagctgatctggatgacagattcagcacatataaaattcagaaaatcgaagtcattaaaggggagttctaccgtaatcggggtgcctacatcgtcggaagaattgtacttgataatcagtcaatggtaccacttgtcatcgcgttgctgaatgatgaaaaagggatttatgttgatgcgattctcacttcagagtctgccactttcaatattttcagtacaacccgggcaaactttcatgttaacaacgaatactatcatgaactttcagaatttcttcacagtattataccaaaacgatctctgggtctagcctattctacaatcggatttaatcattttggtaaagttgcagtaatggaagaattgaaggaagaacttttgtctactgatggaaagcttgattttgctataggttttaagggtactgttgcaataggtttccagtcccctcaatcgggttacaatcttaaagttattcgtaatacacctactgagcaatataagtggggagtgtttgaaggagttccctctgtgctggaaaaatacggtcgtgtccacgttattaatcggacaggcagtatgctggacaacattattttctatcgcgttaaacttgaaagagcttggttcaccaatgcactactgcaagaacttttgaacgacgcgagtgaatgtgtgacactgcaaggtgaatctctatttttcagacaccttatcgtacagagtaaattgatccccttgccggtctacctagaaaactcatcgcaggctgaaagcgaggccgcaataatcaatcttgggcactgcatcaaaaacaatatggctgccaatatattcaataaggacctcgatgccagaaactatggtgtcggtgtattcggaggagtgtacttgtttgattacgacgctctggaacagtttactgaagttaagatccgcactaatcagaaccagttcgaaggagaagaagatattccagagtggttctttgaggacggtgtgatattcctgcccgaggaaatagaatctggcctgagaatacccaatcgctctctgcgacaattgtttagggaggtacatggngacttgctgcaagtagattactatgagcgtattcaggatgaactaggtgtgggtaaagtccccagtgntagagtctatccagagcggtaccagatcaattagaaagtctatgcacancattgcaagggtaattgagaatcaccctttcggagtatgagacgatcatgtctgtctcttgcttaataaatatcaagagaaattcattttgttgatgaccttcatcctattaattgcaataatacacgattaaaatctgttagcttataatcctcagtcgtacagttacttaaacttgttccaacgttcacttctttcattcagcgaatcgagagtaattattagattgtttcattgcagggcacagcttgacttgtccatctcataaggagtttacagcatgaaggtatgtattgttggagctggagccatcggcggttacatggctgttcgcattgcaaatgcaggacataatgtttcggtaatagcacgtggtcctcatttggctgctataaaagccagagggatgaagttgatcgaggagaacgatgaatttgtagctgagaatttgaccgccactgaatttgtaggggaacttggaccaatggacgtggttctcttggcacttaaagcccatcagatagtccctattgtgaatgacatgtctgtacttcttggccccaacactgtcattgtcacccttcagaatgggatcccatggtggtatttccaaaatttcgttggtgactatgccaaccgggtagtggaaactgttgatcctggcggtttgctatttaagagtatcgatccggatcgcttgattggctgcatagcctatcctgctacaactatttctaaaccaggagtgatccagcatatcgagggtaatcgttttccagtgggagaactatgcggcatgaaaacagagcgagttcagatggtgtctgacttatttactgaatcaggattcaagtctagaattctcgatgatattcgctctgaaatctggttgaaattgtggggaaatctgactttcaatccaatcagcgctctctcccattcaacgcttgtcgacatatgtcagttcccgttgaccagacaattggctgccacaatgatgaccgaggcgcagactgtcggagaacgcctgggggctcatttccgcatacccatggaaaagcgcattgccggtgcagagagtgtcggcaaacacaagacctcaatgctccaggatgtggaggctgggaaacccgtggaaatagaaagcatgctgggtgctgtgattgagttggctgaagttacaggagtgcaaacccctaccttgagggctatttacgcttgcgtgagcttactcgacaaaacactgagtcaagaaaaaatcttaatcaaagggatatcgaaagaataaacctaaatttttttaataaataagttgtcaagaaacaaggttactcgtttttccgtcaacgaagttctcgatattatcaactacttgattagacgattgtttgctacctagatccagcggtctgcgtaactacatacaaatatactacggcatcttgctggtgtttgtatatttttggtgttcaaattgagactgctaaacgaactttacgctattactgatttagtaatgtgccgactgcggcaatgggaatttttgggttttttacactaaaaggagacttaccacaaatgactcaatggatacgttttgattaccaggaaaagacggagatcgggacactgactggcgatactgtctcagaatacaaaggaggactttttgatagaccccagcctacaggccgttcaatgccacttgcagatgtccagttgaaagccccgctagtaccgcattccatttttgcattgtggaanaactttcacgaacgtgcccaaaaagaaagccagacgcttcccgatgtaccactttacttcatgaagccgataaccagcgtgattggtcctggacagactatctatcgtccccgcggacatcatggacgggtaatatttgaggctgaattgggtattgttctcggctcgacctgccgagagatcagcgaagaggaggccggccaatatatttttggctatacctgtgtcaatgatgttacagcaattgag

SEQ ID NO: 316 - DNA, 4000 bp, Escherichia coli
  misc_feature (670)..(670): n is a, c, g, or t
  misc_feature (706)..(706): n is a, c, g, or t
  misc_feature (724)..(724): n is a, c, g, or t
  misc_feature (871)..(871): n is a, c, g, or t
  misc_feature (988)..(988): n is a, c, g, or t
  misc_feature (1285)..(1285): n is a, c, g, or t
  misc_feature (1318)..(1318): n is a, c, g, or t
  misc_feature (1420)..(1420): n is a, c, g, or t
  misc_feature (1555)..(1555): n is a, c, g, or t
  misc_feature (1597)..(1597): n is a, c, g, or t
  misc_feature (1618)..(1618): n is a, c, g, or t
  misc_feature (1702)..(1702): n is a, c, g, or t
  misc_feature (1759)..(1759): n is a, c, g, or t
  misc_feature (1801)..(1801): n is a, c, g, or t
  misc_feature (1870)..(1870): n is a, c, g, or t
  misc_feature (1987)..(1987): n is a, c, g, or t
  misc_feature (3101)..(3101): n is a, c, g, or t
  misc_feature (3194)..(3194): n is a, c, g, or t
  misc_feature (3196)..(3196): n is a, c, g, or t
  misc_feature (3199)..(3199): n is a, c, g, or t
  misc_feature (3349)..(3349): n is a, c, g, or t
  misc_feature (3510)..(3510): n is a, c, g, or t
  misc_feature (3558)..(3558): n is a, c, g, or t
  misc_feature (3582)..(3582): n is a, c, g, or t
tgtcgatttgtgatgtgctggtctattccgaagggctggacgaccctgtcgcgcgggcatcgctgacctatgccattccgccacgctgattgtaccccacactgacgggtacaatcgaaaaaagggccggtatttaccggcccgagtgaagaggtctggactgcgccacagggacgttacgccttccagaacacccgaatagactcatcatgagcctgtcgcggtgtgagtcccacgtctgccaactgccaaggctcaagctgcgcgagcgctttgcgtgtccggcgacgcgatgccatcttcgtgacgcagaccgcaaatttgaccgcaagaacagcggcaaacggtgtgctgcgctggttcaggattgccacagtttcgtggttgagggtcagggtctgtgtcatgagaatctcctatttctgaattgtattgacacaatgttacgttttgccgtaacaaaggggtacaaaatgcgatacattttgaaaaggaaaacattgtaatgggtacaatttggcaacctgatcaaattgacgggcctggccctaaatacaaagccgttgttacaatgatacgaaacggtatctcgaacggcgctttatcggcgggggaaaaactgccgccggtgcgggaactggcatggaagcttggcgtcacgccggggacngtggcacgggcctatacgatgctgaccgaaagcggnacgttgcaggccgaggtngggcgcggcacctttgtcgccctgccgcccacgacccccgatcgcaacagcccgatcgagatggatgtgatcgcccaccacgtgcatcaagggacaaagaactaccccgcggacacctatgccgtgaacatgttctcgccgcacctnccatcggcggggcaggcgacgctgatccgcaatctgatggccgaggtcgctcaggatccggcgtcaggtgtgatgcattatcccagccgcaccggggcgcgccccgcccgcgaagcngtggtcaaatggctggccggcacgccgctgggatcctttaccgaggccgatgtgatcctgtctcacggcgggcaaaacggtctgtctctcgtgttccagtccatcctgcaaggccgacgccccgccatcgcgattgaagagctgtcgtaccccggtttccgccgcgcgggcgagctgctgcgcgccgatgtcattccggtggcgatggataaagacggcgtgatccccgaagcgctggacgaggtggcgcggaaccatgatcttcagattttctgcacctcgcccgaagtccataanccgaccgccggcttcacacctgtggcgcgccgngaggcgctggtcgaggtggcgcgcaaacatgactttcaaattgtcgaggacgattgttatcgcatgcgcgtagagcgtgcgccgacctaccggatgcttgcncccgaacgcggctggtatgtctcgtcactggccaagaccctgacccctgcgctgcgcatcggcttcgccatcggcccgcgccagcgcacacccgatctgcgtcgcgtggccgagtacaattgcttcggccttgcnaccccgttgatcgacctttgtgccaagctgctggtgcatccngatatcgacgccatcgccganggcacgcgtcagggctttaacgcctatgtccaaagcgcggtgaatatactgggcggatatgatgtggcgtggcgcaccaacgtnccgtttttgtggctgagcctgccggttggctggcgggcgggtgcgttctgtcaggcngctgaagggcagggtgttcaaatccgctcggccgaggaattngtctgccgcgatgcccgcgcgccccatgcagtgcggcttgcgatcaacgcaggcgtggcgctgcacagntttgaggatgcgatcatgcgcctgcgacatctgctggactctccacccgagcagttgagtgtgtgatttttgtggggtataataatacctaatttgcaaggcattgtttttgtgagnaaaaatagggaatgtggcgcttgacgtggcgaagggcgtgtttataacccagccatcagatagcggggttcggtttcggaccctttcaccaaagtaacgggaattccctccatgaaaaccttttctgcaacaccggcagatatcgacaagaaatggatcatcgtcgacgctgaaggcgtcgtccttggccgtcttgcgtcgatcattgccatgcgtctgcgcggcaagcacaagccttcctacacacctcacatggattgcggcgacaacgtcatcgtgatcaatgccgagaaaatccagatgaccggcaagaagcgtgaagaaaacttctactggcacactggccaccccggcgggatcaaagagcgtaccaaagctcagatccttgaaggtgcgcaccccgagcgtgttgtgacccaagcggtcaagcgcatgctgcccggcaaccgcctgagccgccagatcatgaccaacctgcgcgtttacgccggttccgaacacccccacgaggcgcaaagccccgaggttctggacgtgaaatccatgaactctaaaaacacgcggagtgcataagcatggctgatgaaatcaaaacactcgaaggcctcgaagcggccgtaaccgagaacatcggtggcgttcaggggacagaagttgaaatgaccccacgcgagcccgtgcgtgacgcgcaaggccgcgcctatgcaaccggtaagcgtaaagatgcggttgcccgcgtctggatcaaaccaggttccggtaaagtcatcgtaaacggcaaagcgcaaaacgaatattttgcacgccccgttctgcagatgatcctggcacagccattcaccatcacaggcaccgacggtcagttcgacgttgttgcaactgtgaaaggtggcggtctgtccggtcaggcgggcgcggtgaagcacggtgtttccaaagcactgcagctctacgatccctccctgcgcggcgcgctgaaagcggcaggcttcctgacacgcgacagccgtgttgttgagcgtaagaagtacggtcgtgcgaaagcgcgtaagagcttccagttctccaagcgttaagctttactttacagtttttggaaaaggccgctcctgcnggggcggcctttttcgtatgcgcctgaggccagccgacccttcggggagagtttatttcgcaaaatgaagccggcggggtggttttgttttcnangcngcgtgcttaggtaaaggatgcgttaaaaacggagccgccccatgcgatattcagtccttgatctttcccccgtgcccgaagggtcagatgcccgccaggccattgcgaatacgattgatctggcaaagcggaccgaagcggcgggatatnatcgctactggatggcagagcatcacaacatgccggggatcgcctctgccgcgacatcggtgttgatcgggcatgtggcggatcacacctctcgcatccgtgtgggcgcggggggcatcatgttgccgaaccacgcgccgctggcgattgcagagcagttnggcacgcttgccacgattcacggagaccggattgatctgggccttggncgcgcgcccggtggggatcaggcngtgtaccatgccttgcggcgcgggatgcaagggggcgaccgtttccccgaagatgtggccgagctgatcggctatcttggcgaggcccctgcgggggcgcgtgtgatggcgcatccggggcagggcacgcatgtgccggtgtggatcctgggctcttcgctttatggcgcgcagctggcggcgcatttcgggctgccctatgcctttgcctcgcattttgcccccgatgcgttggaagacgccgtggcgatttaccgtcgcgatttcaaaccctcggcgcagtgggagaaaccgcatttcatgttggcggcgaatgttttcgcggcggataccgatgaagagggggcctaccttcggacctccatgcagcaggcttttgtgcggttgcgcaccggcaaaccgggcaagctgccgcgtc

SEQ ID NO: 317 - DNA, 4000 bp, Escherichia coli
  misc_feature (1968)..(1968): n is a, c, g, or t
  misc_feature (1970)..(1970): n is a, c, g, or t
  misc_feature (1972)..(1975): n is a, c, g, or t
  misc_feature (1977)..(1977): n is a, c, g, or t
  misc_feature (1982)..(1987): n is a, c, g, or t
  misc_feature (1989)..(1997): n is a, c, g, or t
  misc_feature (2045)..(2050): n is a, c, g, or t
  misc_feature (2052)..(2057): n is a, c, g, or t
  misc_feature (2059)..(2073): n is a, c, g, or t
  misc_feature (2122)..(2126): n is a, c, g, or t
  misc_feature (2128)..(2141): n is a, c, g, or t
  misc_feature (2143)..(2152): n is a, c, g, or t
  misc_feature (2154)..(2155): n is a, c, g, or t
  misc_feature (2157)..(2158): n is a, c, g, or t
  misc_feature (2160)..(2164): n is a, c, g, or t
  misc_feature (2166)..(2168): n is a, c, g, or t
  misc_feature (2171)..(2171): n is a, c, g, or t
  misc_feature (2173)..(2174): n is a, c, g, or t
  misc_feature (2176)..(2179): n is a, c, g, or t
  misc_feature (2183)..(2184): n is a, c, g, or t
  misc_feature (2186)..(2188): n is a, c, g, or t
  misc_feature (2191)..(2195): n is a, c, g, or t
  misc_feature (2197)..(2204): n is a, c, g, or t
  misc_feature (2206)..(2212): n is a, c, g, or t
  misc_feature (2214)..(2215): n is a, c, g, or t
  misc_feature (2217)..(2217): n is a, c, g, or t
  misc_feature (2219)..(2222): n is a, c, g, or t
  misc_feature (2224)..(2230): n is a, c, g, or t
  misc_feature (2232)..(2233): n is a, c, g, or t
  misc_feature (2235)..(2238): n is a, c, g, or t
  misc_feature (2240)..(2242): n is a, c, g, or t
  misc_feature (2245)..(2245): n is a, c, g, or t
  misc_feature (2247)..(2252): n is a, c, g, or t
  misc_feature (2254)..(2256): n is a, c, g, or t
  misc_feature (2259)..(2265): n is a, c, g, or t
  misc_feature (2267)..(2269): n is a, c, g, or t
  misc_feature (2272)..(2281): n is a, c, g, or t
  misc_feature (2283)..(2283): n is a, c, g, or t
  misc_feature (2285)..(2285): n is a, c, g, or t
  misc_feature (2288)..(2305): n is a, c, g, or t
  misc_feature (2309)..(2309): n is a, c, g, or t
  misc_feature (2312)..(2313): n is a, c, g, or t
  misc_feature (2315)..(2317): n is a, c, g, or t
  misc_feature (2320)..(2320): n is a, c, g, or t
  misc_feature (2322)..(2322): n is a, c, g, or t
  misc_feature (2324)..(2328): n is a, c, g, or t
  misc_feature (2330)..(2333): n is a, c, g, or t
  misc_feature (2336)..(2339): n is a, c, g, or t
  misc_feature (2341)..(2342): n is a, c, g, or t
  misc_feature (2344)..(2344): n is a, c, g, or t
  misc_feature (2346)..(2347): n is a, c, g, or t
  misc_feature (2352)..(2355): n is a, c, g, or t
  misc_feature (2357)..(2367): n is a, c, g, or t
  misc_feature (2370)..(2370): n is a, c, g, or t
  misc_feature (2372)..(2383): n is a, c, g, or t
  misc_feature (2385)..(2386): n is a, c, g, or t
  misc_feature (2388)..(2391): n is a, c, g, or t
  misc_feature (2393)..(2395): n is a, c, g, or t
  misc_feature (2398)..(2398): n is a, c, g, or t
  misc_feature (2401)..(2405): n is a, c, g, or t
  misc_feature (2407)..(2409): n is a, c, g, or t
  misc_feature (2413)..(2418): n is a, c, g, or t
  misc_feature (2421)..(2422): n is a, c, g, or t
  misc_feature (2425)..(2426): n is a, c, g, or t
  misc_feature (2428)..(2440): n is a, c, g, or t
  misc_feature (2442)..(2444): n is a, c, g, or t
  misc_feature (2446)..(2447): n is a, c, g, or t
  misc_feature (2449)..(2452): n is a, c, g, or t
  misc_feature (2454)..(2455): n is a, c, g, or t
  misc_feature (2457)..(2457): n is a, c, g, or t
  misc_feature (2459)..(2460): n is a, c, g, or t
  misc_feature (2462)..(2463): n is a, c, g, or t
  misc_feature (2465)..(2468): n is a, c, g, or t
  misc_feature (2470)..(2472): n is a, c, g, or t
  misc_feature (2475)..(2475): n is a, c, g, or t
  misc_feature (2477)..(2482): n is a, c, g, or t
  misc_feature (2484)..(2486): n is a, c, g, or t
  misc_feature (2489)..(2495): n is a, c, g, or t
  misc_feature (2497)..(2499): n is a, c, g, or t
  misc_feature (2502)..(2505): n is a, c, g, or t
  misc_feature (2507)..(2516): n is a, c, g, or t
  misc_feature (2518)..(2529): n is a, c, g, or t
  misc_feature (2532)..(2532): n is a, c, g, or t
  misc_feature (2535)..(2537): n is a, c, g, or t
  misc_feature (2540)..(2540): n is a, c, g, or t
  misc_feature (2543)..(2545): n is a, c, g, or t
  misc_feature (2547)..(2549): n is a, c, g, or t
  misc_feature (2554)..(2559): n is a, c, g, or t
  misc_feature (2561)..(2563): n is a, c, g, or t
  misc_feature (2566)..(2572): n is a, c, g, or t
  misc_feature (2574)..(2576): n is a, c, g, or t
  misc_feature (2580)..(2587): n is a, c, g, or t
  misc_feature (2589)..(2595): n is a, c, g, or t
  misc_feature (2597)..(2601): n is a, c, g, or t
  misc_feature (2603)..(2614): n is a, c, g, or t
  misc_feature (2617)..(2617): n is a, c, g, or t
  misc_feature (2620)..(2622): n is a, c, g, or t
  misc_feature (2624)..(2626): n is a, c, g, or t
  misc_feature (2631)..(2636): n is a, c, g, or t
  misc_feature (2638)..(2640): n is a, c, g, or t
  misc_feature (2643)..(2649): n is a, c, g, or t
  misc_feature (2651)..(2653): n is a, c, g, or t
  misc_feature (2657)..(2657): n is a, c, g, or t
  misc_feature (2659)..(2676): n is a, c, g, or t
  misc_feature (2678)..(2682): n is a, c, g, or t
  misc_feature (2684)..(2687): n is a, c, g, or t
  misc_feature (2689)..(2689): n is a, c, g, or t
  misc_feature (2691)..(2691): n is a, c, g, or t
  misc_feature (2694)..(2694): n is a, c, g, or t
  misc_feature (2697)..(2699): n is a, c, g, or t
  misc_feature (2701)..(2703): n is a, c, g, or t
  misc_feature (2708)..(2713): n is a, c, g, or t
  misc_feature (2715)..(2717): n is a, c, g, or t
  misc_feature (2720)..(2726): n is a, c, g, or t
  misc_feature (2728)..(2730): n is a, c, g, or t
  misc_feature (2734)..(2734): n is a, c, g, or t
  misc_feature (2736)..(2741): n is a, c, g, or t
  misc_feature (2743)..(2755): n is a, c, g, or t
  misc_feature (2757)..(2764): n is a, c, g, or t
  misc_feature (2766)..(2768): n is a, c, g, or t
  misc_feature (2770)..(2771): n is a, c, g, or t
  misc_feature (2773)..(2776): n is a, c, g, or t
  misc_feature (2778)..(2780): n is a, c, g, or t
  misc_feature (2783)..(2783): n is a, c, g, or t
  misc_feature (2785)..(2790): n is a, c, g, or t
  misc_feature (2792)..(2794): n is a, c, g, or t
  misc_feature (2797)..(2803): n is a, c, g, or t
  misc_feature (2805)..(2807): n is a, c, g, or t
  misc_feature (2810)..(2813): n is a, c, g, or t
  misc_feature (2815)..(2819): n is a, c, g, or t
  misc_feature (2821)..(2840): n is a, c, g, or t
  misc_feature (2842)..(2845): n is a, c, g, or t
  misc_feature (2847)..(2848): n is a, c, g, or t
  misc_feature (2850)..(2853): n is a, c, g, or t
  misc_feature (2855)..(2857): n is a, c, g, or t
  misc_feature (2860)..(2860): n is a, c, g, or t
  misc_feature (2862)..(2867): n is a, c, g, or t
  misc_feature (2869)..(2871): n is a, c, g, or t
  misc_feature (2874)..(2880): n is a, c, g, or t
  misc_feature (2882)..(2884): n is a, c, g, or t
  misc_feature (2887)..(2890): n is a, c, g, or t
  misc_feature (2892)..(2921): n is a, c, g, or t
  misc_feature (2924)..(2924): n is a, c, g, or t
  misc_feature (2927)..(2933): n is a, c, g, or t
  misc_feature (2935)..(2935): n is a, c, g, or t
  misc_feature (2939)..(2943): n is a, c, g, or t
  misc_feature (2945)..(2947): n is a, c, g, or t
  misc_feature (2951)..(2956): n is a, c, g, or t
  misc_feature (2959)..(2962): n is a, c, g, or t
  misc_feature (2964)..(2996): n is a, c, g, or t
  misc_feature (2998)..(2998): n is a, c, g, or t
  misc_feature (3001)..(3001): n is a, c, g, or t
  misc_feature (3004)..(3010): n is a, c, g, or t
  misc_feature (3012)..(3012): n is a, c, g, or t
  misc_feature (3016)..(3020): n is a, c, g, or t
  misc_feature (3022)..(3024): n is a, c, g, or t
  misc_feature (3028)..(3033): n is a, c, g, or t
  misc_feature (3036)..(3039): n is a, c, g, or t
  misc_feature (3041)..(3042): n is a, c, g, or t
  misc_feature (3044)..(3057): n is a, c, g, or t
  misc_feature (3059)..(3065): n is a, c, g, or t
  misc_feature (3068)..(3075): n is a, c, g, or t
  misc_feature (3078)..(3078): n is a, c, g, or t
  misc_feature (3081)..(3087): n is a, c, g, or t
  misc_feature (3089)..(3089): n is a, c, g, or t
  misc_feature (3093)..(3097): n is a, c, g, or t
  misc_feature (3099)..(3101): n is a, c, g, or t
  misc_feature (3105)..(3110): n is a, c, g, or t
  misc_feature (3113)..(3116): n is a, c, g, or t
  misc_feature (3118)..(3143): n is a, c, g, or t
  misc_feature (3145)..(3152): n is a, c, g, or t
  misc_feature (3154)..(3155): n is a, c, g, or t
  misc_feature (3157)..(3160): n is a, c, g, or t
  misc_feature (3162)..(3164): n is a, c, g, or t
  misc_feature (3167)..(3167): n is a, c, g, or t
  misc_feature (3169)..(3174): n is a, c, g, or t
  misc_feature (3176)..(3178): n is a, c, g, or t
  misc_feature (3181)..(3187): n is a, c, g, or t
  misc_feature (3189)..(3191): n is a, c, g, or t
  misc_feature (3194)..(3201): n is a, c, g, or t
  misc_feature (3203)..(3210): n is a, c, g, or t
  misc_feature (3212)..(3227): n is a, c, g, or t
  misc_feature (3229)..(3229): n is a, c, g, or t
  misc_feature (3232)..(3232): n is a, c, g, or t
  misc_feature (3235)..(3237): n is a, c, g, or t
  misc_feature (3239)..(3239): n is a, c, g, or t
  misc_feature (3241)..(3241): n is a, c, g, or t
  misc_feature (3246)..(3246): n is a, c, g, or t
  misc_feature (3248)..(3249): n is a, c, g, or t
  misc_feature (3251)..(3251): n is a, c, g, or t
  misc_feature (3253)..(3254): n is a, c, g, or t
  misc_feature (3258)..(3259): n is a, c, g, or t
  misc_feature (3261)..(3263): n is a, c, g, or t
  misc_feature (3266)..(3268): n is a, c, g, or t
  misc_feature (3272)..(3292): n is a, c, g, or t
  misc_feature (3295)..(3296): n is a, c, g, or t
  misc_feature (3298)..(3303): n is a, c, g, or t
  misc_feature (3306)..(3306): n is a, c, g, or t
  misc_feature (3309)..(3309): n is a, c, g, or t
  misc_feature (3312)..(3314): n is a, c, g, or t
  misc_feature (3316)..(3316): n is a, c, g, or t
  misc_feature (3318)..(3318): n is a, c, g, or t
  misc_feature (3323)..(3323): n is a, c, g, or t
  misc_feature (3325)..(3326): n is a, c, g, or t
  misc_feature (3328)..(3328): n is a, c, g, or t
  misc_feature (3330)..(3331): n is a, c, g, or t
  misc_feature (3335)..(3336): n is a, c, g, or t
  misc_feature (3338)..(3340): n is a, c, g, or t
  misc_feature (3343)..(3345): n is a, c, g, or t
  misc_feature (3349)..(3381): n is a, c, g, or t
  misc_feature (3383)..(3383): n is a, c, g, or t
  misc_feature (3386)..(3386): n is a, c, g, or t
  misc_feature (3389)..(3391): n is a, c, g, or t
  misc_feature (3393)..(3393): n is a, c, g, or t
  misc_feature (3395)..(3395): n is a, c, g, or t
  misc_feature (3400)..(3400): n is a, c, g, or t
  misc_feature (3402)..(3403): n is a, c, g, or t
  misc_feature (3405)..(3405): n is a, c, g, or t
  misc_feature (3407)..(3408): n is a, c, g, or t
  misc_feature (3412)..(3413): n is a, c, g, or t
  misc_feature (3415)..(3417): n is a, c, g, or t
  misc_feature (3420)..(3422): n is a, c, g, or t
  misc_feature (3426)..(3445): n is a, c, g, or t
  misc_feature (3447)..(3458): n is a, c, g, or t
  misc_feature (3460)..(3460): n is a, c, g, or t
  misc_feature (3463)..(3463): n is a, c, g, or t
  misc_feature (3466)..(3468): n is a, c, g, or t
  misc_feature (3470)..(3470): n is a, c, g, or t
  misc_feature (3472)..(3472): n is a, c, g, or t
  misc_feature (3477)..(3477): n is a, c, g, or t
  misc_feature (3479)..(3480): n is a, c, g, or t
  misc_feature (3482)..(3482): n is a, c, g, or t
  misc_feature (3484)..(3485): n is a, c, g, or t
  misc_feature (3489)..(3490): n is a, c, g, or t
  misc_feature (3492)..(3494): n is a, c, g, or t
  misc_feature (3497)..(3499): n is a, c, g, or t
  misc_feature (3503)..(3505): n is a, c, g, or t
  misc_feature (3507)..(3533): n is a, c, g, or t
  misc_feature (3535)..(3535): n is a, c, g, or t
  misc_feature (3537)..(3537): n is a, c, g, or t
  misc_feature (3540)..(3540): n is a, c, g, or t
  misc_feature (3543)..(3545): n is a, c, g, or t
  misc_feature (3547)..(3547): n is a, c, g, or t
  misc_feature (3549)..(3549): n is a, c, g, or t
  misc_feature (3554)..(3554): n is a, c, g, or t
  misc_feature (3556)..(3557): n is a, c, g, or t
  misc_feature (3559)..(3559): n is a, c, g, or t
  misc_feature (3561)..(3562): n is a, c, g, or t
  misc_feature (3566)..(3567): n is a, c, g, or t
  misc_feature (3569)..(3571): n is a, c, g, or t
  misc_feature (3574)..(3576): n is a, c, g, or t
  misc_feature (3580)..(3597): n is a, c, g, or t
  misc_feature (3599)..(3612): n is a, c, g, or t
  misc_feature (3614)..(3615): n is a, c, g, or t
  misc_feature (3617)..(3618): n is a, c, g, or t
  misc_feature (3620)..(3624): n is a, c, g, or t
  misc_feature (3626)..(3628): n is a, c, g, or t
  misc_feature (3631)..(3631): n is a, c, g, or t
  misc_feature (3633)..(3634): n is a, c, g, or t
  misc_feature (3636)..(3639): n is a, c, g, or t
  misc_feature (3643)..(3644): n is a, c, g, or t
  misc_feature (3646)..(3648): n is a, c, g, or t
  misc_feature (3651)..(3655): n is a, c, g, or t
  misc_feature (3657)..(3658): n is a, c, g, or t
  misc_feature (3660)..(3682): n is a, c, g, or t
  misc_feature (3684)..(3688): n is a, c, g, or t
  misc_feature (3691)..(3691): n is a, c, g, or t
  misc_feature (3694)..(3694): n is a, c, g, or t
  misc_feature (3697)..(3700): n is a, c, g, or t
  misc_feature (3703)..(3704): n is a, c, g, or t
  misc_feature (3710)..(3710): n is a, c, g, or t
  misc_feature (3713)..(3715): n is a, c, g, or t
  misc_feature (3720)..(3720): n is a, c, g, or t
  misc_feature (3723)..(3724): n is a, c, g, or t
  misc_feature (3728)..(3731): n is a, c, g, or t
  misc_feature (3734)..(3751): n is a, c, g, or t
  misc_feature (3753)..(3756): n is a, c, g, or t
  misc_feature (3758)..(3765): n is a, c, g, or t
  misc_feature (3768)..(3768): n is a, c, g, or t
  misc_feature (3771)..(3771): n is a, c, g, or t
  misc_feature (3774)..(3777): n is a, c, g, or t
  misc_feature (3780)..(3781): n is a, c, g, or t
  misc_feature (3787)..(3787): n is a, c, g, or t
  misc_feature (3790)..(3792): n is a, c, g, or t
  misc_feature (3797)..(3797): n is a, c, g, or t
  misc_feature (3800)..(3801): n is a, c, g, or t
  misc_feature (3805)..(3808): n is a, c, g, or t
  misc_feature (3811)..(3842): n is a, c, g, or t
  misc_feature (3845)..(3845): n is a, c, g, or t
  misc_feature (3848)..(3848): n is a, c, g, or t
  misc_feature (3851)..(3854): n is a, c, g, or t
  misc_feature (3857)..(3858): n is a, c, g, or t
  misc_feature (3864)..(3864): n is a, c, g, or t
  misc_feature (3867)..(3869): n is a, c, g, or t
  misc_feature (3874)..(3874): n is a, c, g, or t
  misc_feature (3877)..(3878): n is a, c, g, or t
  misc_feature (3882)..(3885): n is a, c, g, or t
  misc_feature (3888)..(3900): n is a, c, g, or t
  misc_feature (3903)..(3904): n is a, c, g, or t
  misc_feature (3907)..(3920): n is a, c, g, or t
  misc_feature (3923)..(3923): n is a, c, g, or t
  misc_feature (3926)..(3932): n is a, c, g, or t
  misc_feature (3934)..(3934): n is a, c, g, or t
  misc_feature (3938)..(3942): n is a, c, g, or t
  misc_feature (3944)..(3946): n is a, c, g, or t
  misc_feature (3950)..(3955): n is a, c, g, or t
  misc_feature (3958)..(3961): n is a, c, g, or t
  misc_feature (3963)..(3963): n is a, c, g, or t
  misc_feature (3965)..(3971): n is a, c, g, or t
  misc_feature (3973)..(3973): n is a, c, g, or t
  misc_feature (3975)..(3995): n is a, c, g, or t
  misc_feature (3997)..(3997): n is a, c, g, or t
  misc_feature (4000)..(4000): n is a, c, g, or t
agtgtatgcatgtgtggtccaatgatgtacgtagtggagattccgacaaccttgaagcaagagctgctgcttattattggagaaacgtctttacaacatatccgaactttgtaagagacagagaaggaacacctcctaataacctcttaaattatggttatgctattcttcgtgccataatagcacgagcattagtaggaagtggtttactgccaaccttagggatccatcatcacaataggtataatgcttattgtcttgctgatgatattatggagccttatcgtccttatgtagaccagttagtgttagatatcattcaatgcaacttagaaatatctgatatcacacgagatttaaaaatgcaacttctcggtattccaatgttagatgtagtgataaatggcaaacgaagtcctttaatgattgctgctcaacaaactacagcctcacttgcaaaatgttttgcaggggaatgtaaacgcattagttacccagaaatgtaaacttatatgtcaggatttgagcgcttcagtgagtaccgaattatgtggattcttgtattctttgatctaccaacggaaaccaagaaagagaagaaagcctatacagatttccggaaatcccttataaaggatggattcactatgtttcagttttctatatatgtacgacattgtgcaagtatggagaatgcagaagtacacatgagacgtgttcgtgcattattacctaagataggaaaagtagggatactttgcatcactgacaaacaattcgccaacattcaactcttctatggacaaaagacacaaactccaaatgctgctggacaacaattagaactattttaaaacagcccaatatcattaaaaaagaagaaaggaaatagataattcatagtatcaaaacaatgaaattaattttgattacttttgctgtcattttaacattcgcttctaactcattgtaatcaaggaatttattcatggaggagaaatgacaagaatgacagcaaaattgattatataaaaatttgcatacttatagtgtgctaagagacacacagaaaaaaaattataaatcatagcaccctcatatttactctacaaggcttttcgttgaaacatcatttctttccatttggaaaaataatcttagctttgaaagaattgctgatacagattacgagatgactacagattatggagttgtacacgtagaaaacattctcttccataagcatacaaaggaaaaaagatatctaccataaaacaagaaaaatcacatatcagaataagaccaagaaagggaaaatcagattatatatctctgctgaccaatgattatcagatggcggcagaagatataatagctatctataagaaacgatggctaatagagaacttatttaagcaattaaaacagaattttcctctaagatacttctatggagagagggcgaatgctataaaaatatggattacacttatagccaatctgtttataacacttgtgaagaataaaataaagagaccctggagcttctcaggcttggctacaatgataagaattctacttatgagttatgtatcaatacaaagtttctttgagcagcaacatagagattgggaaagattgattacccaggtaaaagccccgccagaagagctgtcattggtctaggggtggtggtatttgaaattagaactaatcatgagtatttcagcagggttgggagagaatattgcagcatatagtggttttatcggacagcaatatattacaatacagtcgctttaatcaatatacaatacaaaaaatcccattcaaaaggaatgggattttgagttgtggatcaaaatttatttttacaacaactttatatgtcgctaacacacaatgctttaccacatatcagttgttattgataccacaaaggtaagacttttcaagcaaatcacaacnanannnnanttccnnnnnntnnnnnnnnngttgttattgataccacaaaggtaagacttttcaagcaaatcacaacnnnnnntnnnnnntnnnnnnnnnnnnnnnagttgttattgataccacaaaggtaagacttttcaagcaaatcacaacnnnnntnnnnnnnnnnnnnntnnnnnnnnnntnntnntnnnnncnnnaangnnannnntttnnannnaannnnnannnnnnnnannnnnnntnntntnnnntnnnnnnntnntnnnnannncanannnnnnannnttnnnnnnnannncannnnnnnnnntnancgnnnnnnnnnnnnnnnnnngttnttnntnnnacnanannnnnannnnttnnnnannanannacaannnncnnnnnnnnnnngtnannnnnnnnnnnntnntnnnnannncanaannnnnannntttnnnnnnaanncannannnnnnnnnnnnnannntnnannnntnnantnntnntnnnnannncanannnnnnannnttnnnnnnnannncannnnannnnnnnnnngnnnnnnnnnnnnaantgnnnttnttnnnannncaaannnnnnannnttnnnnnnnannncaannnnnnnnannnnnnnannnnnannnnnnnnnnnnttnttnnnannncaaannnnnnannnttnnnnnnnannncaanannnnnnnnnnnnnnnnnntnnnnnannnngntnttnttnnnannncaaannnnnnannnttnnnnnnnannncaanannnnnnannnnnnnnnnnnnannnnnnnngnnntnntnnnnannncanannnnnnannnttnnnnnnnannncannnnannnnnannnnnnnnnnnnnnnnnnnntnnnntnntnnnnannncanannnnnnannnttnnnnnnnannncannnnannnnnnnnnnnnnnnnnnnnnnnnnnnnnnttnttnnnnnnncnaaannnnnannntttnnnnnnaannnnannnnnnnnnnnnnnnnnnnnnnnnnnnnnnnnntnttnttnnnnnnncnaaannnnnannntttnnnnnnaannnnannannnnnnnnnnnnnntnnnnnnnttnnnnnnnnttnttnnnnnnncnaaannnnnannntttnnnnnnaannnnannnnnnnnnnnnnnnnnnnnnnnnnnannnnnnnntnntnnnnannncanannnnnnannnttnnnnnnnannncannnnnnnntnnnnnnnntnnnnnnnnnnnnnnnntnttnttnnnancncaaangnnananntttnnannnaannncaannnnnnnnnnnnnnnnnnnnnaannannnnnnttnttnttnnnancncaaangnnananntttnnannnaannncaannnnnnnnnnnnnnnnnnnnnnnnnnnnnnnnntnttnttnnnancncaaangnnananntttnnannnaannncaannnnnnnnnnnnnnnnnnnncnnnnnnnnnnnntnttnttnnnancncaaangnnananntttnnannnaannncaannntnnnnnnnnnnnnnnnnnnnnnnnnnnngntnttnttnnnancncaaangnnananntttnnannnaannncaannnnnnnnnnnnnnnnnnannnnnnnnnnnnnntnntnntnnnnncnnnaangnnannnntttnnannnaannnnnannannnnnnnnnnnnnnnnnnnnnnntnnnnnttnttnttnnnnccnnaaaggnaannnttttnaannaaannnnaannnnnnnnnnnnnnnnnnannnnannnnnnnnttnttnttnnnnccnnaaaggnaannnttttnaannaaannnnaannnnnnnnnnnnnnnnnnnnnnnnnnnnnnnnttnttnttnnnnccnnaaaggnaannnttttnaannaaannnnaannnnnnnnnnnnnttnntannnnnnnnnnnnnnttnttnnnnnnncnaaannnnnannntttnnnnnnaannnnanannnnnnntnannnnnnnnnnnnnnnnnnnnntnttn

SEQ ID NO: 318 - DNA, 4000 bp, Escherichia coli
  misc_feature (1271)..(1271): n is a, c, g, or t
  misc_feature (1277)..(1277): n is a, c, g, or t
  misc_feature (1295)..(1295): n is a, c, g, or t
  misc_feature (1986)..(1986): n is a, c, g, or t
  misc_feature (2326)..(2326): n is a, c, g, or t
ttcaaccataaaattgcttcttgctttgatacaattttttcttttgaatctggctctaataatacataatgatctgatgctcttattagtggatttgacataatgaaaattcttcttggattaattctttgcttgatttttcaaggaatttttttagaaagttcttttgctctagtagattctaacgtacgagagtttttggaaaatcgtgtaaatcaatggccagaattatatttgccaaattttaaattatcggatacttctaaggatttaatttatcctaaatggttcgaggggaattggcttgttacttctcaagatatagttaatgattcagaagagccagttatttataaagtaaatttctttaagaatgattcagatttaattgttggtaatcgtgcaaaaaattctgaatctattggaaaagcaatatttggtgaaaccttaatcaaggttgtaaatgatcctcaatctattaataatcaaattacttatttaaaagatgatttttatatcgattcaagaattacagggagaaatcagatccaagatgatgatatttttttcgcagatgagctagttatacaaacagcacataagccaggtgcttcaaggattaatcaggtagagaccattagtaaatttcaaaaatgttccgaagaaatattggaagttgataattcaatcaaaccatcaatttgtggagtgcaatatgttgcttcttatggttcaaaagttggtgatccttctattcatgctataaaaacaaataaatataaattgaagtttgaatttattgagagttagcactaaaaagatattcttctaagttgttcctccaaatgaaaagattttctaaataagggttgtttatgtattcttggctcccctctcctgaaagaattggtcctgcagactttggaaatttaagaagggataattgagcagcaattgaaatatctgcaattgataaactatctccaactaaatatttcttgttgatcaaggattttgataaagcttccagtaatttttggagttctaaattatctttagaagacaaaactacattagaaattttactaagattttcaaaaggtaatttatcaacaatacttttaactgaagaaggtatttcatctggaagtaatgcagttcttagctgtggattttctattgcagattttattaaagcttttctacaagttgtagccattgtagtatctgcccagtcttcaattagtttgcattgtgcaaataatattggntcctcnggaaaaagtggattgttntcattttttttatctatatattcgcaaatagttgaagagtcattaataacttgatcattactatcgactattacaggtacttgtttttgacctgataatttaaagatttcaaattggcctattccaggtgttacttcttcaactcgatattgtagtttttttgcatgaagagccattcttgtttttaaacaaaaagcactatgcctaaattgatataatgtaatcatgctgtttaatgtttgttaaaacttagctaaaaaagtaatctatttgtggagctgatgggcgaatttttctctaatgttgcgagatatccaaagtatttgatatctatcattgttgggggacttgttgctttgcttgaacctttattcaagaatagatcaaatccactcacaatagtaggtttgatatcttctgtcttaagtgctttcataactgtttattttgtcttgcaagcgatgacaaacccaataaatttacaaccataatgccaaataattaccgtcttgcaaaagtttcttctcttttgaagaaagaaataacccttattttgcagaatgatttagaaaatgatcttattagagatcatttcgtcaatatttctaagattgatttatcaggtgatttgcaacactgtaaaatttatataacttcaactgctcaagagaaagtgaggaaagagattgtngcaaacttgaatactgctaaaagctctataaggcatagtttaggaaaaagaattgagatgagaagagttccagagataatttttaaagacgatgttgttcttgataaaggattatcagtcttgaaacttctcgatgaattaaaaaataaaaatcaaaatcataatgttgaggacaaggatgccaaaagttgatctaccccttgatcaaagaaatataattattactcgatcaaaagaagggatattggatataaaaaagatattcataagcaagggcgctaatgtatttgatttacctgcaataagtattgctgatcctgatgatttgaatcctcttgangaagcattaaatcaaataaatgattttcattggattattttttccagtagtaatgggatcaaatttgtggataaaagacttagatactttaatagttcattaaaagaatgttctaaaaaaacaaaaatcgccgtagtcggagaaaaaacctcaaaaactcttgatgattttgggattaaggctgatttcatacctccagaatttgttgctgaaagtttaattgataatttcccagtatctggttatggacttcgagtttttgtaccaagagttcaaacaggtggtagggatttaattgcagatcaatttagaaaggctggttctcgtgtatttgaggttgctgcatatgaaactagatgtcctgaatcaattccggaagaaacaattgatattatttctaatcgaaaagtcgatgcaattattttctcaagcggtaaaaccgtagtaaatgctgcttttttactagaaaaaaaacttggtaaacaatggttagaatattttgatcaaattaagttattaactattggacctcagacaacaaaaatatgtaacaagatttttggaagagttgatagtcaggcacaaaaatatacttttgaaggactactagatgtagcaattaatatttttaattagaaaaattttttgtatagttcttttcaactaaatctttgaacctatcaatattggcctgtaattcgtttgtaaccattttgcctaaaatattttcttccataaaccgagcaatcatttttggtagttcataagttattgctaaatttaccgttgtgatttgatcagttttactttcgaaaactactgatccctcagttggtaaacctcctattgatttccatttaagtttgcttttttcaaccctttctgtaatttgagctttccatttaaacctaaagccatttgcagctaaagtccattctgttaaatctggtaacgtattagtttcttcgtcaactgtttttacagattcaatccagctcatccaaagtgacattgagtctaaatcgctccatgtgtcccatacattttcaagaggcgcattaacaactgttattacgtcatgttttagccaagtacccattaattaacttactgcaagattttttgctaattcggctttcttctctaaaattgcggcggcagctaaatgaccactcattgtagctccctccatagagtctatataatcttgttttgtataactaccagccatgaagaaattagatatagatgttttttgatcgggtctgaaaggttccataccgggagcttctctatagagtgattgtggaatttgtaccacgttactccaaagcaatttaaggttttttgaggatgggaatagacggcgaacctctttatcaatttcttttgtaattctttctgtggatcttcccatccatctatcgccaggagttaaaacacattggagaagcgatcccatatctttttttctatagtctgctggacttgctagtgctaaatcagcaaaacaactgaaagaggcatcagcagaataaagaaggttatctagtccaattggttcgtttccagtattatctttttgtaattcagtaacccaaccgtcatatcttaattggattgtggcaacagctacagctctaagtttttttaaaccttcaaattctttaaatt

SEQ ID NO: 319 - DNA, 4000 bp, Escherichia coli
  misc_feature (1940)..(1940): n is a, c, g, or t
  misc_feature (1942)..(1943): n is a, c, g, or t
  misc_feature (1945)..(1946): n is a, c, g, or t
  misc_feature (1951)..(1952): n is a, c, g, or t
  misc_feature (1954)..(1955): n is a, c, g, or t
  misc_feature (1960)..(1961): n is a, c, g, or t
  misc_feature (1963)..(1964): n is a, c, g, or t
  misc_feature (1966)..(1967): n is a, c, g, or t
  misc_feature (1972)..(1973): n is a, c, g, or t
  misc_feature (1981)..(1981): n is a, c, g, or t
  misc_feature (1984)..(1985): n is a, c, g, or t
  misc_feature (1987)..(1987): n is a, c, g, or t
  misc_feature (1990)..(1991): n is a, c, g, or t
  misc_feature (1993)..(1993): n is a, c, g, or t
aattctgtattacagtatcagccaaggcccgaagattggggtttagaattagttcttggtgccgttggtacagaagcgcatggggcgcattcgggaaaaagcctttcaaatccaacagtaaaaccgcaccttcccggccatacctccggtaatgccaatgaagctgttccttcaggcggcggaagtgccagtgaaggcccttccccttttggcttgctccgttgtcgtgaatcatacaggggccatataaaggggtcagaacttcattacaaagggctttgtggatttgtcgatctgtaatatggggtgcatctatgggccgtactttgccccgctcacataaggtgaagtgggtacatttcataggcttccagttttgatccaaaaccttccgccgtctgttggccgttcctgaaaacaggtgtccttcaaagttctgaacactctgtttccaccgtaccccgttacagcacttcttcccatagaagaacattttgcgataggaaaagatcttttccataggcccaagggcattacaccgggcctgttttctcgcttgccgctttgctttgcggcgctggtatcttgcttcatgccgttcttggcttgtcataaaaataagtattcgcctttcgtacagataaattgtagggtgccgtctaatctgctttgcccttgcacatgaaatgggatatggcacgatcccccaccatgcaagaagcgtccgtgtaagggcatcaaagggcagttttagggattggctacccaaggaagtatctctccttttgcgaaggtcgtctttcacctgaaatccaaaagccgggtttctgttactccatttgacctcgcaatcgcaaaatccgggccgcacgccagccgagtagtaagcgttgttattgttgttgttgccgttgttgttgacattgcagaaattgttattgttgttgtaattaggggaacgcaaccaccaccacaccgccgaggtcacattaacagagatacacctaatttttttgaagttaagttttcaatcttgaacctacattcttaatggcccctttcaaaagttcattttctttgtcgatcagttcaccaagattttgcgccatcttatccaatttttccattgcgtcttgtgatttgactgcatttcccttggaagtagtaaaggccccttccgggttctggttcaaaatcagataaacatgggttaggcgaacatcaagcgccatcagggaagcccttgcttcaagcaaatgcgccttccgcaaactcacccgctgttggtctgaaggaaaaatgctgttggccttttccgcatggtctatgatctcaccggccagctttgcgattggctccgcaatcagccgggaataccgggcggaaaggcgggtgagaaagttgatggtttcaacatagatttggttagctgtattgatgaattcagccttacttgtggttcgcttttgcttcagtacggacacggttacacccctcttggtgtgttgtcaatttcaatcgggccttgctctctttctacatcttccaagtgctttagaagcacatattcaatgtagttggttattgaccgatgatcacgggttgcaagcgccccgattttgtcaaatacttcatctgataatcgcaaggtaaaaacccgcttattggtcgccatcctataacctccaaaaattttgcataagattattgtatggcgtttttcggtttgtgtatgcgctctaaagacaggtaagtgatagcactttgaacggaaaaagcaatttttcaaaaatcgcgtcggcgcttacgcgccgaatatttttttattttcctttcacccggcgaagccgcccccttgcgggggcgggatggggccgggataatcctgcgggggattagacagcaaagccgggccgcacgccagccgagtagtaagcgtngnnanngttgnngnngccgnngnngnngacanngcagaaantgnnantgnngntgtaataaggggaacgcaaccaccaccacaccgccgaggtggtgctggtgtgattattggctactttgctgttaccagctttgtaataatcatattgcacctgataattttgttcatagctatttgcatagcttctggaaccgaacacttcatattcagccagtaaaaacaagtaatcggtggtgctggtcacattgctttgggtattgccggtattgttgcccacattatccgtgtacttggttacaggcttcatcacattccgcaaggcggaaggcaaagccgccaacagcgaattggaaggggggcttgtgggtgtgccggtgttgcccaacagcgttttccgcatatagctttctttccaaccaccactattgctattattaggattcatattgaaatagccattgttgttttgattactgttatattggctatcgcaaagggcaaccgctgtggtgccgattttgccaatctggaagtgaattttgttattcccttccttgccgctgttgtggttgaagcccaaaatgaaggtgttgatggtcagattggagaaagtgaagttcccaaccttgccgttgatctgaatggacttcatatcaccaaccgcccaatagctggaacccttaccggaatcactgacttgtttaatggtggcccaatcgttatcattcagggtattcgtgggaagcgtgacattaacggaacaggttttatcagccggggcagtatagttggtatctgcggccacgctgacggtaattgtggcgtttccttttgccttgccggtaacagttaccacattcccggaaacgctcacagaagccacgctgggggcgctggacacggcgctgattacgccggtgccggggcgggtcacggtgattgtgtcagacattttagaaacattcagggaaatggaagatttgttcaaagaaaggcttcctgtggcctttccaatcgtccaagcaacggctttttccgcacttcccccatccgtccattggtaattagaaccgggggtgaaagtggcattatagcttccagcgttggtgccgctggtagtgccgccgatggtcattttagaactgtcataaccggcccaagtcgggctttgagtggaaccggtataagtaaggcttccgctttgagaagggacagaaaccgtggccctgttgattgtccaagttacctgtttgggggtctgcgttccatctgtccacttatactttcctttgggggtgaaggtggcggtataagttcccgcattggtggcggttgtggttccgccaagggtcaaagtttccgggttgtagctgttccaagacgggctttgttccccgccattataggttagggtgccgttctgcgacggaacaacatcaatggtataaatcaaccctgacacagcttccaaggccgaatccgccgtttcctgtgcggtctgtgcggcggaaagggcttttttcacagtttcccgaatatcagcatgggcggaagggctttcattgtgggtgttaatggcttcttcaatcgcttctgtggggtcagaactggaatcgggaagctgttcaggcttcaccttaccatcttccccaagatccgcttttccggccaaggaatcatcatgggcttttagggccgtatcaattttatccatattgcggttctgatcgtccacattgtagaaatcttcttgggctggtttcaccagatcataattaggtgtgaactgtgccatctgtcatttcctttctgatagatttgttttccagccctccaagctgggcatgggtgaagggccgaagtgttttgtgtggggtacattcatgggtttgaagttcttctgttcttacttcagaatgggtgtaccaagcaagttgggcatgggtaaacccgcccaatacttggtgaatattgaacaactgttgaactaccaaaaccaagttgactggggcaactcttttcagcaaggtttgaacatcttggaaatttttctttgcg

SEQ ID NO: 320 - DNA, 4000 bp, Escherichia coli
  misc_feature (121)..(121): n is a, c, g, or t
  misc_feature (132)..(132): n is a, c, g, or t
  misc_feature (232)..(232): n is a, c, g, or t
  misc_feature (307)..(307): n is a, c, g, or t
  misc_feature (441)..(441): n is a, c, g, or t
  misc_feature (457)..(457): n is a, c, g, or t
  misc_feature (509)..(509): n is a, c, g, or t
  misc_feature (583)..(583): n is a, c, g, or t
  misc_feature (604)..(604): n is a, c, g, or t
  misc_feature (775)..(775): n is a, c, g, or t
  misc_feature (964)..(964): n is a, c, g, or t
  misc_feature (1223)..(1223): n is a, c, g, or t
  misc_feature (1277)..(1277): n is a, c, g, or t
  misc_feature (1282)..(1282): n is a, c, g, or t
  misc_feature (1373)..(1373): n is a, c, g, or t
  misc_feature (1781)..(1781): n is a, c, g, or t
  misc_feature (1793)..(1793): n is a, c, g, or t
  misc_feature (1985)..(1985): n is a, c, g, or t
  misc_feature (3771)..(3771): n is a, c, g, or t
gggaaagtaattaatgcgtacagttattataatattgctaattaattttgcttcaaatgcttgggccaataatgttgtttctggaagtgagggtagcaaattagaaggaaaagttgtttcngaattcaacancccttgggcgatgtcttttgttgacagtgacaacctaattatcactacaaaagctggaaagctttggctcgtaaataggagtggtaaaaagtctttagtntctggagttccaaaggtttttgcaggtggtcaaggaggtttaggtgatgtcgtttttcatccaaattttacaaanaataaactagtttatatttcttacataaattcagacaatgcaggaaaaacacgatatgcgaccataatacggggcacgctagagaggttagataaacctcagctgaaaaatattgaaaccatttggaagcaaangcccgctcgatcaggnaaagggcatttttcccacagaattgtatttggccttgaaggaacacaacacnccagaaaaatttttattacgtcgggcgatcggcaagagcaatctcctgcacaaagatgggacatggcattaggnaaaattatccgccttaatgangatggaaccatacctacagacaacccatttcaggacaaaggtgacctcgcaaagactttttggacactcggtcatagaaatgcccttggaattgcatttgccaaaaatggtcaactgtgggcgcacgaaatgggtccaaggcacggagatgagcttaatttaatagttgcnggtaaaaattatgggtggccagtagtatcagaaggcaatcactatagtggagcaaaaattccagttcatgaaacaaggccagaatttatggcgccaaaactttattgggtgcctacggtagctccatcaggattaattttttatgaaggagatgaattttctgaatggaaaggaaatgcatttattggnggattgaaaagtaaggcactggttagaattgactttaataatggagagccgtttgaggctgaacgcttcagttggtctaaaagagtgagagaagtcgaaatagacgataaaggtgcgatttgggtgttagaggatggtcaatctggtaggttaataaaattcacaaaaccaaacaaatagattgagtataagcctgccttggcgttgaattagttttgctacagttatagcaatcgcaaaagatggaaaacttaaatcnaatttttctgagcaaattgcgactaatcttcactggaaacttttaaccgtaganaattnggaaaaactggcgctagactgtgcttggtctcaattagcatatgaagacaagattatagagctagcaaaagcagttcttctaaaaaattanaaaatttgaatgtcagaatctgaagatttttcaattacatagcgtgcgtttggtaaatcattacttaacgtgcgcttctttgcatcttgtgtatccaacccatgcctaagccatctattcagcaaacgctgctctaaggtatctataccaggatttatgaaaattgtttggtcccaagttttttttaatttagtccatggttcttcttcaatgagcaaataatttccttcaacaatcaacaccttgtcttttgttgatatgatgctcgatccagcaatagataaatctttatttctatcaaattctggaataactacatcatcttcaaaattacttagcctgttcattaagtgaataaaacctgcagtatcaaaagtagctggtgcacctttgcgatctaatagattncggtccaccaanattgaattgtccaaatgaaatccgtccatagaaataatttttgcttgaatagatttttcttttaacaataaaagaagcgcctgagcaaatgtagacttacccgctcctggtggccccgcaatagccacgatatagcgttttcgaccttcagaattttcaataatataatcgctgagagcctttggtttcatnttgcagccaaagcttcaggtggtggctccattgctcctgtcatcatggccacagcatcagacatcgaaattatttttggatcaactgtgcaaaggcgtctacccaagcgatgaatgtgaatacgatcacaaacctcaaaaatgtgaggcatattatgcgaaattagtacaatgggaatacctttagattttacatcttgaatcaaatctaaaactcggcgagattcttttacacctaaagctgctgtaggctcatccataattacaactttagaaccaaaggcagcagctcttgctactgctactccctgacgctgcccaccagataaagtttcgactgcctggttaatattttgaattgtaagcagtcccaactctgaaagtttatcacgtgcaaatgtttccatttgtttatgatctaatttgcgaaatagcttgcccattatccctttttcacgaatctcgcggccaagaaacatattatctgcaattgataaggctggcgacaaagccaagttttggtatactgtttcaataccagcattccgagcgtcatctggagtatgaaaatttacaagttttccgtcgagctctataaccccatggtcaggtgcagtagcaccagaaatggcacggatcagagtagttttacctgcaccattgtcacctataactcctaaaacttcatttggataaagatcaaagtctgcaccattcatcgcgacaaccgtgccatatcttttcatcaaacctttagcttgaagtacgggctctaaattatgagtaatattcttcattgtgtagccctccgcagccattgatctaaggcaacagcgattaaaacaagattacccacggcaaacatttgccagtaatcatccacaccagctagcgataatcctgtagtgaatactcccacaattaatgcacctagcacggagccaggtatagatcctcgtcctccaaacaatgatgtgccaccaattacaacggcagtaatggtagccaaattaatttcttcaaatgagattggagaaattgaaccaacgcgtccaatagcaacccaggctccaaaaccacaaattagtccagctacagcataaacagaaattaatgttctatcagttttaatacctgatagggcagcagcttctgggtcgtctccaattgcataaacatgacggccccaagcggtgtgttgcagaatgaaccaaaaaactgcggctaataaaattaatgcaattccaccatatgtaatagtagccccaaaaggacgtgctgctgcttcaccaaaccaaagaagtgaaggtgcatttgcttcaatgtcagaatttcgaatagattctgatccagaataccacaattttagtgctgtaaatacagatagcgttcccagcgttacgatgaacggaggtagtttaatcttagctacaaggaagccattaaaagcacccatcagtgtgccaattgccataccagcggcaatcgcaattggaagtgggaccccatatgacacagaaagccgacccatcacgaatgttgaaagaaccaaaattgcaccaactgaaaggtctatccctgcagttagtattatcaacgtttgtgcgattgcaacaatgccaataacagttacctgttgaaggactaaagacaaaacaccaggacttaagaatctaggtgcaatgataccaaaaattagaatgctaacgattaaaactaatgcagggacaagtgttggataatttcttacagcatttcgcacattcgatagaaacgtccgatcatcncgctcaaatacagcaactgcgctatctgcactgtttaagtttgtttcaaattcagattgactcactacacccgagctccccagcatatattttatttataaactttgaacataaagggcggcaaatgcaccgccctttaattttactttaatcatatattttaaattattcaaattaaccccagcagagttcggtgccttttgtagagtcaattgacggaacaccatca

SEQ ID NO: 321 - DNA, 4000 bp, Escherichia coli
  misc_feature (94)..(94): n is a, c, g, or t
  misc_feature (287)..(287): n is a, c, g, or t
  misc_feature (561)..(561): n is a, c, g, or t
  misc_feature (889)..(889): n is a, c, g, or t
  misc_feature (1132)..(1132): n is a, c, g, or t
  misc_feature (1251)..(1251): n is a, c, g, or t
  misc_feature (1881)..(1881): n is a, c, g, or t
  misc_feature (1929)..(1929): n is a, c, g, or t
  misc_feature (1936)..(1936): n is a, c, g, or t
  misc_feature (1948)..(1948): n is a, c, g, or t
  misc_feature (1963)..(1963): n is a, c, g, or t
  misc_feature (1966)..(1966): n is a, c, g, or t
  misc_feature (1980)..(1980): n is a, c, g, or t
  misc_feature (1984)..(1986): n is a, c, g, or t
  misc_feature (2402)..(2402): n is a, c, g, or t
  misc_feature (2408)..(2408): n is a, c, g, or t
  misc_feature (2627)..(2627): n is a, c, g, or t
  misc_feature (2823)..(2823): n is a, c, g, or t
  misc_feature (3161)..(3161): n is a, c, g, or t
  misc_feature (3260)..(3260): n is a, c, g, or t
  misc_feature (3278)..(3278): n is a, c, g, or t
tatgtcagtgcgcacatcaatatcaagtccaagctcgggtaggctaacgtcaccggcccgggggcttactgctagaagtggacagggctttggnttgcgccgacaaaaatccgcgaaatctccggcgtattgctgggggacgatcactaaattgcattgcacgaaacccggggccataccgctagtaggttcattgaatttgccctgacgtgcagcaagccgcagctgctcgggtgccataagcttaagagggtctccaacgctcacttttatctcctttgctttanctcgctgcgcgctcttgtatagtgggagaaacataccattgcgagagccctgatgccccatatatcaattactgcagctgaaactccacacaaacccgccttcatcatggctaactccggagagatggtcacctatggtgaattagaggctaggagtaatcagatcgcccatttgtttcgtctctgcgggcttaagtctggtgatcacgtcgccattatggtggaaaactgtcggcagtttctcgaaattacgacgggtgccatgcggtctggnattatcttcacgccaatcagcacgcatctcaaagaagacgaaacggcttatatcttagagaactgtggggccaaattgtttgttgcatcgcattctctggcatctgtggcggttcatatgattggtagcgctgctgcgctcaagcatttttatatgataggcggcattgaagatgggtttctctcttgggaggaaaccgttgatacattacctataacggctattgatgaccaatctatgggtacaacgatgttgtattcatcgggaaccacaggaaagcccaagggggtttataacaagccctacaccgaggtttttgatgagccantgcccttgacgttgtctttgggagccgcttttgggtttggtccggagacaacgtacctgtctcctgcgccgctctatcacgccgcgcctttgcactacaacatggttgttctggatacgggtggcacctccatcatcatggaaaagtttaatgcccttcgtgcattggaactaatagaggagcatcgcatcacccacagccaatgggtgcccataatgttcgttcgaatgctcaagctccctnaggcgcagcggacccagttcgatactagctcgatgcagatggctatacacgccgcagcgccgtgtcccattgatgtaaaagagcaaatgattgattggtggggtcctgtgatcctcgantactactcatcgagtgagggggcgggctttaccctgattgactctaatgattggctaaaccacaaaggctcggttggtcgtccgctgtttggcgttcctcacgtattggacgaggagggtaatgagctaccagctggcgaggtcggaggaatctggttttccgatattgcaaataagtttgagtatcacaatgagcctgataaaaccgctgaagcctacaacaaagatggctggacctctgtaggtgacatggggtacctcgatgaagagggttatttgtatcttaccgatcgaaagaacttcacgatcatatcgggtggcgtcaacatttatcctgcagagattgaaaacctactcatcaatcatgccaaagtcgccgatgtggcagtttttggcgttccatgtgatgaatttggtgagactgttcaagccgttgtgcagcccgccaactggggtgatgctaccgacgaaacggccttagagctgaaggaatggttacaagaacggttgtctcacatcaaaattcccagaaatttagatttcatggagcagctgccaagaatggataacggaaagctctacaagcgccacttgatggaggcgtatcgaaacaaaaatacctgatggtantgtctgaagccttggttttagtggctcgggtgttgggctataaatgcntcagtancaatgaataatntagttgcagttaagnttncaagctattgatanatannnatttaaatgaaaataggttgtcggtcgctccgatttttcgagcattaattgtctcagtccatatacccgaaggcccaacagtaataagcttggctctgttcctatagtggtatgaggtgagggtgcggaataaacggaagctcaaagcgttggcacgggacatggccaatagcgagaactacgccgattggttaggtgcagctcgtgatcacgacgaccttacgggaatgacagactggcggcatatagagcacacggacctgtatgactacgcacaaatccgtctgcgactcgatcggctaagaaatctgcgtgctcggtcagaccaccagggcctactttacgcactcaatgaaggtatccatggcaacatgggtggcatgggtaagggcgtgctgtatcgaatggctaaggcnggtacnaagcgcctcatagaagattacattgatgaaatcgacgcctcgctaaaattactggctgaactcgatgacggcattattcctgcgcagcaaaaaatggatttcttctatcgggccaacatttgctttggtcgctcagcgttaatgctcagtggcggtggcgttctaggctttcttcacctgggggtcgttaacgttttactggaacagggcctgcttccnagagtcatttctggctcaagtgcgggggctctcgtcgcaggggtgctggcttgtcacactgatgatgaagtggccgatcttgaagagctcgcgatactacaaaatggcgcgaaagaagataccggcttcctacgcaaattattaacgggcggccctagtatttctctcgatgatcttgagcagcttgttgagcgcntgattcccaattcaacatttgaagaggcttatgcaaaaactggcaggcaggtcagtattaccattgcacccgctgagccacaccagcgatcgcggctgctaaatgcagtgacctcgcctaacgtttacatacgatccgccgttatggcctcttgcgcagttccaggcgtttttcccgctgtgatgttgatggcccgcaatgttcacggtgagcctcagccgtatttgccggggcggcgttggatagacgggtctgtggcggacgatttacctgccaaacggttgtcccgcttgtttggtacgaaccaccacatcgtaagcatggtaaaccctattgcnacagcttttatttccaaagatgaagaccgcggaggcctgtctaaggcagcaggggctttaggtgttggtgttggaagggagtttctcaatttttatagnggtctagctcagaagcgnggagacaagtggccgcgcttcaatatgatgctacacggtctacatgcgctcatggatcaagaatacacgggtgacatcaatattatgccaagctttaggctcgctaacccactgcgcttgttgtcacacctcaatgaagaagagttgattcggctaacccaccatggcgcgcacgcctgttacgaaaaagttgaagctatcaggcgctgcacccaaatttcgcgaacgttggaagatattctttatcgatacgaatacggtgatttgcgtcccgacccggctgcggtcaggaagccccgttcctcgcgtcgcagaccagcccctacccttgcacagcgcgaaaggctcagcggtaggtctgactctacccgtgttcctatgaagcctaggagtggccgcgcaggctcaggcaagtctgcagaggcatctaaggtggcgcaaaagccagtgagaaaggccgtgagagtgacacactgaggctaaacctaaacccatcgggttagtctttcatgtacgacatgcctagttcagcgagtggttgcacgagattacctcggctctctgcctcggcacttgaagccgtgccatcaagtgcacgcttttttacgccctgtacaattgctgcaaggcggaaaaagcaaaacgccaaatagaaattccaatgctttatttcatcgcggccggtccgttcacagtaactcgtgacgtagctgttgtcctct

SEQ ID NO: 322 - DNA, 4000 bp, Escherichia coli
  misc_feature (90)..(90): n is a, c, g, or t
  misc_feature (165)..(165): n is a, c, g, or t
  misc_feature (336)..(336): n is a, c, g, or t
  misc_feature (450)..(450): n is a, c, g, or t
  misc_feature (606)..(606): n is a, c, g, or t
  misc_feature (708)..(708): n is a, c, g, or t
  misc_feature (1119)..(1119): n is a, c, g, or t
  misc_feature (1664)..(1664): n is a, c, g, or t
  misc_feature (1829)..(1829): n is a, c, g, or t
  misc_feature (1985)..(1985): n is a, c, g, or t
  misc_feature (1991)..(1991): n is a, c, g, or t
  misc_feature (2009)..(2009): n is a, c, g, or t
  misc_feature (2054)..(2054): n is a, c, g, or t
  misc_feature (2132)..(2132): n is a, c, g, or t
  misc_feature (2186)..(2186): n is a, c, g, or t
  misc_feature (2189)..(2189): n is a, c, g, or t
  misc_feature (2450)..(2450): n is a, c, g, or t
  misc_feature (2706)..(2706): n is a, c, g, or t
  misc_feature (2709)..(2709): n is a, c, g, or t
  misc_feature (2795)..(2795): n is a, c, g, or t
  misc_feature (2849)..(2849): n is a, c, g, or t
  misc_feature (2888)..(2888): n is a, c, g, or t
  misc_feature (2992)..(2992): n is a, c, g, or t
  misc_feature (3065)..(3065): n is a, c, g, or t
  misc_feature (3092)..(3092): n is a, c, g, or t
  misc_feature (3266)..(3266): n is a, c, g, or t
  misc_feature (3290)..(3290): n is a, c, g, or t
  misc_feature (3431)..(3431): n is a, c, g, or t
  misc_feature (3653)..(3653): n is a, c, g, or t
  misc_feature (3755)..(3755): n is a, c, g, or t
  misc_feature (3965)..(3965): n is a, c, g, or t
gcgatcaaggattcgacggtgtgcggtctctcgcgcgccaacgaccgcgacatcgggcgcgcggccgaggccctgaagggcgccgcccgngggcggatccacaccttcatcgcaacttcgccgcttcacatggaaaagaagctgcgcatgtcgcccgacgaggtncatgagcaggccaggctggccgtgcgcttcgcgcgcaaccagatcggcgacgtggagttcagcccggaagacggctatcgcagcgaccccgacttcctgtgccgcgtgctcgagaccgtgatcaacgagggcgccaccaccatcaacgtgcccgacaccgtcggctacgcnatccccgagctctacggcaacttcatcaagatgctgcgcgagcgcattcccaacagcgacaaggcgatctggtcggtgcactgccacaacgacctgggcatggccgtggcgaantcgctggccggcgtgaagatcggcggcgcgcgccaggtggagtgcaccatcaacggcctgggcgagcgcgcgggcaactgctcgctcgaagaggtcgtgatggctgtgaagacccgcaaggactacttcggtctcgacctgcgcatcgacacgcancacatcgtggccgcgagccgcatggtcagccagaccaccggtttcgtggtgcagcccaacaaggcggtggtgggggccaatgccttcgcgcacgcttcgggnatccaccaggacggtgtgctcaaggcgcgcgacacctacgaaatcatgcgcgccgaggacgtgggctggacggccaacaagatcgtcctgggcaagctcagcggtcgcaacgccttcaagcagcgcctgcaggagctgggcgtggccatggacagcgagggcgagatcaacgccgccttcctgcgcttcaaggagctggccgaccggaagtcggagattttcgacgaggacattcttgcgctcgtcagcgccgaagaggtgtcgaacgttggtgagcagtttgctttcgtctctctctcccagcacagcgaaaccggcgagcgcccccaggcgaaaatcgtgttcaccgtccagggcaaggaagtcaccggcgaatccgacggaaatggcccggttgatgcttccctgaangccatcgagtcgcacgtcaagagcggtgccgaaatggttctttactctgtaaatgccatcagcggctcgacggaaagccagggagaagttacagtccggttacaaaacgcagggcgggtggtcaacggtgtgggtgcagatccggacatcgttgtcgcttcggctaaggcttatttgagtgcgctcaacaagttacagagccaagctgagagagttgcggcacaaggttaggttttcgggcgatccttgatattcgaatgaagaagaggatgcaagtaactgatattgcgtgtcttttttgatttcgatacactgcggtcctcgtttttgccgctggagattttttaatgcctgaagcccgcctacgccgagtttccagccagcggttcctgcccgctttcaaagccatcgccgtcgcgctctgcgccacggcgtttttgctgcctggcgcccaggccgcgaagaaggaaaagcccgccgccgccaagaccgccgtcgcctccaagaaggcgaaggggccggtgccggtcgaagtcaagcgcaangccgcttcctccaagaccgccactgtcgccaagcgcggcggccgtgccgaaaaggccgaacgtgccgagaaggtggttcgcggcggccgcaacgtcgtcgccaccatccacaagaagaacggcaagaccgtggtggccgtgcagcgccgctcggtggttcgcgtngtcgaggcgcccgcgcgccagtccttcggccagatggccgggctgcatggaaccgaagatgcgctcgacctgaagtcgagcgtcgccctggtcatcgaccaggacacccacgaagtgctgttcagcaagaacgaccacgccgtgctgccgatcgcntcgctnaccaagctcatgaccggnctgctcatcagcgaggcccatctgccgaacgacgaactcatcacnatcacccaggacgacgtcgacaccgagaagcgcagcagctcgcgcctgacggtaggcaccacgctctcgcgcggcganctgctgcacctggcgctgatgtcgagcgaaaaccgcgccgcgcacgcgctgggncgnacctacccgggtggcctgacgaccttcgtgagcatcatgaacgccaaggccaagatgctcggcatgaaggacacgcgctacgtggagcccacgggcctctcgagccgcaaccagtcgagcgcgcaagacctggcgctgctggtcaatgccgcctatgccgatgccacggtgcgttcgctgtccacctcgcctgaataccaggtcgaagtcggcaaccgagtgctgcagttcaacaccaccaaccgcctcgtgaagagcccngactgggaaatcggcgtgcagaagaccggctacatctccgaagcgggccagtgcctcgtgatgcaggcgcgggtggcgggccgcaagctgatcatggtgttcctggattcggccggcaagttcagccgtatcgccgatgcggagcgcgtccgccgctgggtggaagccacgcactcggtgggctcgccggcggcttcgtcgcgcaatgctgcttaccaggtggctggctgatcagccgatcgggcaagtcccggcnctncacctccaacgaaaaacaggccctctcggggcctgttttgcttgggggtggctgtttggcccgcttgtcagacgctggccgatggngcagacccccccgagggtgacggcgttgccggcatgccttccttgaaccccagngcacccgagatttcgtttgccgtcgcctgcagcttgggnagccagccctcgtccagccggtcggccggcgcggagatcgacagccccgccaccagcttgccctggtcgtcgtagatgcctgcggccatgcagcgcacacccanctccagttcttcgttgtcgcgggcaatgccgtattggcgcgccttcgacaactcgcgctccagcgccggcagntgggtgatgctgttgcgcgtgtggccngccaggccggtgcgggtggcgtagctgcgcacccgttgcgggtcatcggccgccaggaacagcttgccggtcgaagtcaggtgcagcgcggcgcggccgccgatggcacgcaccacctgcatgcccgagcgctcgctgtaggagcgctcgatgtacacgatctcgtcgccctgncgcatgctgaggttgacgggctgntgcgtcagcttgtgcagctcgcgcatcgggcccagggccgcgtcgcgcacgttgagccggcccttgaccaggttgcccagctccagcaggcgcatgccgagccggtagctgccggcctcggggcggtcgacgaaacggccnacggccaggtcgttgaggatgcggtgcgtggtcgacgggtggagccccgtcttttcgctgatctccttcagcgaaatggcgtcctcgcgagatgccaggacgtcgatcagcgcaaacatgcgctcgatcacctggatcacgggaacggcgggaatgtcggattggttttttctcatggcgctctgcggtgatgaccgagcgccattttaccttgtgaaatcncttggcggctgccagcggccatccaacaacacttcatgaggggagaagcgcgccttgtagttcatcttggggctgtgctcgatccagtagcccaggtagacntgcggcagcccgagcttgcgggcctgctcgatctgccatagcacgctgtaggtgccgtagccggcgctcgaatcgggctcgtagaaggtgtagacggccgagatgccgtcgttgagcacatcgaggatcgacaccatcctgagcgctcccgcgctgccgtcgggctgggtctcgcggaattccaccagccgcgagttgacgcggctttgnagcaggaactgggtgtactggtcgatgctgtcgtg

SEQ ID NO: 323 - DNA, 4000 bp, Escherichia coli
  misc_feature (1)..(3): n is a, c, g, or t
  misc_feature (5)..(6): n is a, c, g, or t
  misc_feature (8)..(24): n is a, c, g, or t
  misc_feature (26)..(34): n is a, c, g, or t
  misc_feature (36)..(41): n is a, c, g, or t
  misc_feature (43)..(44): n is a, c, g, or t
  misc_feature (46)..(69): n is a, c, g, or t
  misc_feature (71)..(80): n is a, c, g, or t
  misc_feature (84)..(84): n is a, c, g, or t
  misc_feature (86)..(97): n is a, c, g, or t
  misc_feature (99)..(104): n is a, c, g, or t
  misc_feature (106)..(114): n is a, c, g, or t
  misc_feature (116)..(119): n is a, c, g, or t
  misc_feature (121)..(125): n is a, c, g, or t
  misc_feature (127)..(129): n is a, c, g, or t
  misc_feature (131)..(133): n is a, c, g, or t
  misc_feature (135)..(142): n is a, c, g, or t
  misc_feature (144)..(144): n is a, c, g, or t
  misc_feature (150)..(150): n is a, c, g, or t
  misc_feature (152)..(153): n is a, c, g, or t
  misc_feature (155)..(156): n is a, c, g, or t
  misc_feature (158)..(162): n is a, c, g, or t
  misc_feature (164)..(171): n is a, c, g, or t
  misc_feature (174)..(174): n is a, c, g, or t
  misc_feature (176)..(181): n is a, c, g, or t
  misc_feature (185)..(185): n is a, c, g, or t
  misc_feature (187)..(193): n is a, c, g, or t
  misc_feature (195)..(203): n is a, c, g, or t
  misc_feature (207)..(213): n is a, c, g, or t
  misc_feature (215)..(220): n is a, c, g, or t
  misc_feature (222)..(229): n is a, c, g, or t
  misc_feature (233)..(233): n is a, c, g, or t
  misc_feature (237)..(237): n is a, c, g, or t
  misc_feature (242)..(244): n is a, c, g, or t
  misc_feature (247)..(249): n is a, c, g, or t
  misc_feature (251)..(251): n is a, c, g, or t
  misc_feature (254)..(258): n is a, c, g, or t
  misc_feature (260)..(262): n is a, c, g, or t
  misc_feature (264)..(264): n is a, c, g, or t
  misc_feature (266)..(271): n is a, c, g, or t
  misc_feature (273)..(274): n is a, c, g, or t
  misc_feature (276)..(276): n is a, c, g, or t
  misc_feature (278)..(279): n is a, c, g, or t
  misc_feature (281)..(282): n is a, c, g, or t
  misc_feature (286)..(286): n is a, c, g, or t
  misc_feature (288)..(291): n is a, c, g, or t
  misc_feature (293)..(294): n is a, c, g, or t
  misc_feature (298)..(299): n is a, c, g, or t
  misc_feature (301)..(303): n is a, c, g, or t
  misc_feature (305)..(309): n is a, c, g, or t
  misc_feature (311)..(312): n is a, c, g, or t
  misc_feature (314)..(314): n is a, c, g, or t
  misc_feature (316)..(317): n is a, c, g, or t
  misc_feature (319)..(328): n is a, c, g, or t
  misc_feature (331)..(333): n is a, c, g, or t
  misc_feature (335)..(337): n is a, c, g, or t
  misc_feature (339)..(349): n is a, c, g, or t
  misc_feature (351)..(361): n is a, c, g, or t
  misc_feature (363)..(368): n is a, c, g, or t
  misc_feature (370)..(371): n is a, c, g, or t
  misc_feature (373)..(374): n is a, c, g, or t
  misc_feature (376)..(385): n is a, c, g, or t
  misc_feature (387)..(387): n is a, c, g, or t
  misc_feature (389)..(395): n is a, c, g, or t
  misc_feature (397)..(398): n is a, c, g, or t
  misc_feature (400)..(404): n is a, c, g, or t
  misc_feature (406)..(409): n is a, c, g, or t
  misc_feature (411)..(411): n is a, c, g, or t
  misc_feature (413)..(415): n is a, c, g, or t
  misc_feature (417)..(417): n is a, c, g, or t
  misc_feature (420)..(426): n is a, c, g, or t
  misc_feature (428)..(432): n is a, c, g, or t
  misc_feature (436)..(441): n is a, c, g, or t
  misc_feature (443)..(443): n is a, c, g, or t
  misc_feature (445)..(445): n is a, c, g, or t
  misc_feature (447)..(449): n is a, c, g, or t
  misc_feature (451)..(453): n is a, c, g, or t
  misc_feature (456)..(461): n is a, c, g, or t
  misc_feature (463)..(480): n is a, c, g, or t
  misc_feature (482)..(482): n is a, c, g, or t
  misc_feature (484)..(489): n is a, c, g, or t
  misc_feature (491)..(493): n is a, c, g, or t
  misc_feature (495)..(497): n is a, c, g, or t
  misc_feature (499)..(502): n is a, c, g, or t
  misc_feature (504)..(507): n is a, c, g, or t
  misc_feature (509)..(527): n is a, c, g, or t
  misc_feature (529)..(537): n is a, c, g, or t
  misc_feature (539)..(545): n is a, c, g, or t
  misc_feature (547)..(547): n is a, c, g, or t
  misc_feature (549)..(549): n is a, c, g, or t
  misc_feature (551)..(562): n is a, c, g, or t
  misc_feature (564)..(565): n is a, c, g, or t
  misc_feature (567)..(571): n is a, c, g, or t
  misc_feature (573)..(581): n is a, c, g, or t
  misc_feature (583)..(597): n is a, c, g, or t
  misc_feature (599)..(599): n is a, c, g, or t
  misc_feature (601)..(618): n is a, c, g, or t
  misc_feature (620)..(621): n is a, c, g, or t
  misc_feature (623)..(623): n is a, c, g, or t
  misc_feature (625)..(644): n is a, c, g, or t
  misc_feature (646)..(648): n is a, c, g, or t
  misc_feature (650)..(651): n is a, c, g, or t
  misc_feature (653)..(656): n is a, c, g, or t
  misc_feature (658)..(668): n is a, c, g, or t
  misc_feature (670)..(675): n is a, c, g, or t
  misc_feature (677)..(683): n is a, c, g, or t
  misc_feature (685)..(709): n is a, c, g, or t
  misc_feature (711)..(719): n is a, c, g, or t
  misc_feature (721)..(729): n is a, c, g, or t
  misc_feature (732)..(735): n is a, c, g, or t
  misc_feature (737)..(743): n is a, c, g, or t
  misc_feature (745)..(748): n is a, c, g, or t
  misc_feature (750)..(756): n is a, c, g, or t
  misc_feature (758)..(765): n is a, c, g, or t
  misc_feature (767)..(767): n is a, c, g, or t
  misc_feature (769)..(772): n is a, c, g, or t
  misc_feature (774)..(776): n is a, c, g, or t
  misc_feature (778)..(781): n is a, c, g, or t
  misc_feature (783)..(783): n is a, c, g, or t
  misc_feature (787)..(790): n is a, c, g, or t
  misc_feature (792)..(793): n is a, c, g, or t
  misc_feature (795)..(801): n is a, c, g, or t
  misc_feature (803)..(817): n is a, c, g, or t
  misc_feature (819)..(824): n is a, c, g, or t
  misc_feature (827)..(831): n is a, c, g, or t
  misc_feature (833)..(838): n is a, c, g, or t
  misc_feature (840)..(845): n is a, c, g, or t
  misc_feature (848)..(848): n is a, c, g, or t
  misc_feature (851)..(855): n is a, c, g, or t
  misc_feature (857)..(877): n is a, c, g, or t
  misc_feature (879)..(897): n is a, c, g, or t
  misc_feature (899)..(906): n is a, c, g, or t
  misc_feature (908)..(910): n is a, c, g, or t
  misc_feature (912)..(924): n is a, c, g, or t
  misc_feature (926)..(932): n is a, c, g, or t
  misc_feature (934)..(952): n is a, c, g, or t
  misc_feature (954)..(996): n is a, c, g, or t
  misc_feature (999)..(1000): n is a, c, g, or t
  misc_feature (1002)..(1002): n is a, c, g, or t
  misc_feature (1004)..(1010): n is a, c, g, or t
  misc_feature (1013)..(1021): n is a, c, g, or t
  misc_feature (1023)..(1028): n is a, c, g, or t
  misc_feature (1030)..(1033): n is a, c, g, or t
  misc_feature (1035)..(1037): n is a, c, g, or t
  misc_feature (1040)..(1047): n is a, c, g, or t
  misc_feature (1049)..(1055): n is a, c, g, or t
  misc_feature (1060)..(1065): n is a, c, g, or t
  misc_feature (1068)..(1068): n is a, c, g, or t
  misc_feature (1070)..(1072): n is a, c, g, or t
  misc_feature (1075)..(1075): n is a, c, g, or t
  misc_feature (1077)..(1077): n is a, c, g, or t
  misc_feature (1079)..(1080): n is a, c, g, or t
  misc_feature (1083)..(1084): n is a, c, g, or t
  misc_feature (1086)..(1086): n is a, c, g, or t
  misc_feature (1089)..(1089): n is a, c, g, or t
  misc_feature (1092)..(1093): n is a, c, g, or t
  misc_feature (1095)..(1096): n is a, c, g, or t
  misc_feature (1100)..(1101): n is a, c, g, or t
  misc_feature (1103)..(1103): n is a, c, g, or t
  misc_feature (1105)..(1107): n is a, c, g, or t
  misc_feature (1112)..(1113): n is a, c, g, or t
  misc_feature (1284)..(1284): n is a, c, g, or t
  misc_feature (1288)..(1290): n is a, c, g, or t
  misc_feature (1300)..(1300): n is a, c, g, or t
  misc_feature (1308)..(1309): n is a, c, g, or t
  misc_feature (1313)..(1315): n is a, c, g, or t
  misc_feature (1983)..(1983): n is a, c, g, or t
  misc_feature (1997)..(1997): n is a, c, g, or t
  misc_feature (2486)..(2486): n is a, c, g, or t
  misc_feature (2501)..(2501): n is a, c, g, or t
  misc_feature (2510)..(2510): n is a, c, g, or t
  misc_feature (2529)..(2529): n is a, c, g, or t
  misc_feature (2532)..(2532): n is a, c, g, or t
  misc_feature (2680)..(2680): n is a, c, g, or t
  misc_feature (2781)..(2781): n is a, c, g, or t
  misc_feature (2976)..(2976): n is a, c, g, or t
  misc_feature (2982)..(2982): n is a, c, g, or t
  misc_feature (3057)..(3060): n is a, c, g, or t
  misc_feature (3062)..(3062): n is a, c, g, or t
  misc_feature (3064)..(3064): n is a, c, g, or t
  misc_feature (3068)..(3068): n is a, c, g, or t
  misc_feature (3070)..(3070): n is a, c, g, or t
  misc_feature (3072)..(3073): n is a, c, g, or t
  misc_feature (3076)..(3077): n is a, c, g, or t
  misc_feature (3079)..(3085): n is a, c, g, or t
  misc_feature (3087)..(3087): n is a, c, g, or t
  misc_feature (3089)..(3089): n is a, c, g, or t
  misc_feature (3092)..(3102): n is a, c, g, or t
  misc_feature (3104)..(3117): n is a, c, g, or t
  misc_feature (3119)..(3127): n is a, c, g, or t
  misc_feature (3129)..(3133): n is a, c, g, or t
  misc_feature (3135)..(3142): n is a, c, g, or t
  misc_feature (3144)..(3147): n is a, c, g, or t
  misc_feature (3149)..(3149): n is a, c, g, or t
  misc_feature (3151)..(3151): n is a, c, g, or t
  misc_feature (3153)..(3153): n is a, c, g, or t
  misc_feature (3155)..(3162): n is a, c, g, or t
  misc_feature (3164)..(3166): n is a, c, g, or t
  misc_feature (3168)..(3171): n is a, c, g, or t
  misc_feature (3173)..(3175): n is a, c, g, or t
  misc_feature (3178)..(3181): n is a, c, g, or t
  misc_feature (3183)..(3184): n is a, c, g, or t
  misc_feature (3186)..(3187): n is a, c, g, or t
  misc_feature (3189)..(3193): n is a, c, g, or t
  misc_feature (3195)..(3195): n is a, c, g, or t
  misc_feature (3197)..(3198): n is a, c, g, or t
  misc_feature (3200)..(3200): n is a, c, g, or t
  misc_feature (3202)..(3213): n is a, c, g, or t
  misc_feature (3215)..(3224): n is a, c, g, or t
  misc_feature (3226)..(3226): n is a, c, g, or t
  misc_feature (3228)..(3228): n is a, c, g, or t
  misc_feature (3230)..(3230): n is a, c, g, or t
  misc_feature (3232)..(3237): n is a, c, g, or t
  misc_feature (3239)..(3244): n is a, c, g, or t
  misc_feature (3246)..(3253): n is a, c, g, or t
  misc_feature (3256)..(3260): n is a, c, g, or t
  misc_feature (3262)..(3262): n is a, c, g, or t
  misc_feature (3264)..(3265): n is a, c, g, or t
  misc_feature (3268)..(3269): n is a, c, g, or t
  misc_feature (3271)..(3271): n is a, c, g, or t
  misc_feature (3273)..(3273): n is a, c, g, or t
  misc_feature (3276)..(3300): n is a, c, g, or t
  misc_feature (3304)..(3304): n is a, c, g, or t
  misc_feature (3306)..(3306): n is a, c, g, or t
  misc_feature (3308)..(3309): n is a, c, g, or t
  misc_feature (3311)..(3313): n is a, c, g, or t
  misc_feature (3315)..(3321): n is a, c, g, or t
  misc_feature (3323)..(3323): n is a, c, g, or t
  misc_feature (3325)..(3326): n is a, c, g, or t
  misc_feature (3328)..(3332): n is a, c, g, or t
  misc_feature (3335)..(3335): n is a, c, g, or t
  misc_feature (3337)..(3340): n is a, c, g, or t
  misc_feature (3342)..(3345): n is a, c, g, or t
  misc_feature (3348)..(3351): n is a, c, g, or t
  misc_feature (3354)..(3372): n is a, c, g, or t
  misc_feature (3375)..(3375): n is a, c, g, or t
  misc_feature (3377)..(3377): n is a, c, g, or t
  misc_feature (3379)..(3380): n is a, c, g, or t
  misc_feature (3384)..(3387): n is a, c, g, or t
  misc_feature (3390)..(3390): n is a, c, g, or t
  misc_feature (3393)..(3399): n is a, c, g, or t
  misc_feature (3401)..(3406): n is a, c, g, or t
  misc_feature (3408)..(3410): n is a, c, g, or t
  misc_feature (3412)..(3412): n is a, c, g, or t
  misc_feature (3414)..(3418): n is a, c, g, or t
  misc_feature (3421)..(3422): n is a, c, g, or t
  misc_feature (3425)..(3426): n is a, c, g, or t
  misc_feature (3428)..(3429): n is a, c, g, or t
  misc_feature (3431)..(3431): n is a, c, g, or t
  misc_feature (3433)..(3433): n is a, c, g, or t
  misc_feature (3435)..(3435): n is a, c, g, or t
  misc_feature (3437)..(3443): n is a, c, g, or t
  misc_feature (3447)..(3450): n is a, c, g, or t
  misc_feature (3452)..(3452): n is a, c, g, or t
  misc_feature (3454)..(3455): n is a, c, g, or t
  misc_feature (3457)..(3457): n is a, c, g, or t
  misc_feature (3459)..(3459): n is a, c, g, or t
  misc_feature (3461)..(3462): n is a, c, g, or t
  misc_feature (3464)..(3467): n is a, c, g, or t
  misc_feature (3469)..(3469): n is a, c, g, or t
  misc_feature (3471)..(3473): n is a, c, g, or t
  misc_feature (3475)..(3475): n is a, c, g, or t
  misc_feature (3477)..(3484): n is a, c, g, or t
  misc_feature (3486)..(3486): n is a, c, g, or t
  misc_feature (3488)..(3488): n is a, c, g, or t
  misc_feature (3491)..(3497): n is a, c, g, or t
  misc_feature (3499)..(3499): n is a, c, g, or t
  misc_feature (3501)..(3503): n is a, c, g, or t
  misc_feature (3505)..(3508): n is a, c, g, or t
  misc_feature (3511)..(3513): n is a, c, g, or t
  misc_feature (3515)..(3523): n is a, c, g, or t
  misc_feature (3526)..(3530): n is a, c, g, or t
  misc_feature (3534)..(3540): n is a, c, g, or t
  misc_feature (3542)..(3549): n is a, c, g, or t
  misc_feature (3551)..(3551): n is a, c, g, or t
  misc_feature (3553)..(3558): n is a, c, g, or t
  misc_feature (3560)..(3564): n is a, c, g, or t
  misc_feature (3567)..(3567): n is a, c, g, or t
  misc_feature (3569)..(3573): n is a, c, g, or t
  misc_feature (3576)..(3577): n is a, c, g, or t
  misc_feature (3579)..(3579): n is a, c, g, or t
  misc_feature (3581)..(3581): n is a, c, g, or t
  misc_feature (3585)..(3585): n is a, c, g, or t
  misc_feature (3589)..(3593): n is a, c, g, or t
  misc_feature (3595)..(3610): n is a, c, g, or t
  misc_feature (3612)..(3614): n is a, c, g, or t
  misc_feature (3616)..(3620): n is a, c, g, or t
  misc_feature (3622)..(3622): n is a, c, g, or t
  misc_feature (3624)..(3624): n is a, c, g, or t
  misc_feature (3626)..(3629): n is a, c, g, or t
  misc_feature (3632)..(3636): n is a, c, g, or t
  misc_feature (3638)..(3644): n is a, c, g, or t
  misc_feature (3646)..(3650): n is a, c, g, or t
  misc_feature (3652)..(3656): n is a, c, g, or t
  misc_feature (3658)..(3668): n is a, c, g, or t
  misc_feature (3671)..(3682): n is a, c, g, or t
  misc_feature (3684)..(3684): n is a, c, g, or t
  misc_feature (3686)..(3690): n is a, c, g, or t
  misc_feature (3692)..(3694): n is a, c, g, or t
  misc_feature (3696)..(3696): n is a, c, g, or t
  misc_feature (3698)..(3713): n is a, c, g, or t
  misc_feature (3716)..(3719): n is a, c, g, or t
  misc_feature (3721)..(3721): n is a, c, g, or t
  misc_feature (3723)..(3724): n is a, c, g, or t
  misc_feature (3726)..(3735): n is a, c, g, or t
  misc_feature (3737)..(3737): n is a, c, g, or t
  misc_feature (3739)..(3741): n is a, c, g, or t
  misc_feature (3743)..(3743): n is a, c, g, or t
  misc_feature (3747)..(3750): n is a, c, g, or t
  misc_feature (3753)..(3756): n is a, c, g, or t
  misc_feature (3758)..(3759): n is a, c, g, or t
  misc_feature (3761)..(3764): n is a, c, g, or t
  misc_feature (3766)..(3783): n is a, c, g, or t
  misc_feature (3785)..(3791): n is a, c, g, or t
  misc_feature (3793)..(3794): n is a, c, g, or t
  misc_feature (3796)..(3804): n is a, c, g, or t
  misc_feature (3807)..(3820): n is a, c, g, or t
  misc_feature (3822)..(3825): n is a, c, g, or t
  misc_feature (3828)..(3828): n is a, c, g, or t
  misc_feature (3830)..(3834): n is a, c, g, or t
  misc_feature (3837)..(3838): n is a, c, g, or t
  misc_feature (3840)..(3841): n is a, c, g, or t
  misc_feature (3843)..(3849): n is a, c, g, or t
  misc_feature (3851)..(3862): n is a, c, g, or t
  misc_feature (3864)..(3867): n is a, c, g, or t
  misc_feature (3869)..(3872): n is a, c, g, or t
  misc_feature (3874)..(3875): n is a, c, g, or t
  misc_feature (3877)..(3878): n is a, c, g, or t
  misc_feature (3880)..(3893): n is a, c, g, or t
  misc_feature (3895)..(3896): n is a, c, g, or t
  misc_feature (3898)..(3900): n is a, c, g, or t
  misc_feature (3902)..(3902): n is a, c, g, or t
  misc_feature (3905)..(3909): n is a, c, g, or t
  misc_feature (3911)..(3916): n is a, c, g, or t
  misc_feature (3918)..(3919): n is a, c, g, or t
  misc_feature (3921)..(3923): n is a, c, g, or t
  misc_feature (3925)..(3926): n is a, c, g, or t
  misc_feature (3928)..(3929): n is a, c, g, or t
  misc_feature (3931)..(3932): n is a, c, g, or t
  misc_feature (3934)..(3945): n is a, c, g, or t
  misc_feature (3947)..(3949): n is a, c, g, or t
  misc_feature (3953)..(3954): n is a, c, g, or t
  misc_feature (3956)..(3960): n is a, c, g, or t
  misc_feature (3962)..(3965): n is a, c, g, or t
  misc_feature (3967)..(3973): n is a, c, g, or t
  misc_feature (3976)..(3980): n is a, c, g, or t
  misc_feature (3984)..(3985): n is a, c, g, or t
  misc_feature (3988)..(3990): n is a, c, g, or t
  misc_feature (3993)..(3998): n is a, c, g, or t
  misc_feature (4000)..(4000): n is a, c, g, or t
nnntnnannnnnnnnnnnnnnnnnannnnnnnnnannnnnnannannnnnnnnnnnnnnnnnnnnnnnnannnnnnnnnnatgnannnnnnnnnnnntnnnnnntnnnnnnnnntnnnntnnnnnannnannnannnnnnnnantttatnannannannnnnannnnnnnnatnannnnnnaaanannnnnnntnnnnnnnnnatannnnnnntnnnnnnannnnnnnntttnttangatannnttnnntntannnnntnnntngnnnnnntnntntnntnntttntnnnntnnttannannnannnnnannantnnannnnnnnnnnttnnntnnnannnnnnnnnnnannnnnnnnnnntnnnnnnanntnntnnnnnnnnnnantnnnnnnnanntnnnnntnnnnanannntnttnnnnnnntnnnnnaatnnnnnntntntnnnannntannnnnntnnnnnnnnnnnnnnnnnntntnnnnnntnnntnnntnnnnannnnannnnnnnnnnnnnnnnnnnannnnnnnnntnnnnnnnananannnnnnnnnnnntnnannnnnannnnnnnnntnnnnnnnnnnnnnnnanannnnnnnnnnnnnnnnnnanntnannnnnnnnnnnnnnnnnnnnannntnntnnnntnnnnnnnnnnnannnnnntnnnnnnnannnnnnnnnnnnnnnnnnnnnnnnnannnnnnnnnannnnnnnnnaannnnannnnnnnannnnannnnnnntnnnnnnnnantnnnnannntnnnnanaaannnnannannnnnnnannnnnnnnnnnnnnntnnnnnnttnnnnnannnnnnannnnnnttnttnnnnntnnnnnnnnnnnnnnnnnnnnnannnnnnnnnnnnnnnnnnnannnnnnnnannnannnnnnnnnnnnnannnnnnnannnnnnnnnnnnnnnnnnnannnnnnnnnnnnnnnnnnnnnnnnnnnnnnnnnnnnnnnnnnnaannanannnnnnnaannnnnnnnnannnnnntnnnnannnaannnnnnnnannnnnnnaaaannnnnnaanannnaananannaannanaanaanntnnaaannanannnatgannaatgcaaatgtcgtataggactgaagcctatcgaatcagcataacatcgagcagaaactcagcggatcgcaatgtggcggttgctctcacgtgtacgttactctgttactgaagaaagtcgtttacaatcgattctagccattagtgttgtttcgactaaaaatgcatcgntgcnnncacaatctcntttcgatnntgannnagcaacaatacggtagcttcattcatatgttcacttgatcaacagtttgaacatatataaatgtgctgacgacaaccaatgtgccaaaaaatcattgagtctagatcggattccaacttagaggcgttcagttgtaagccgtcggatggtagcttcgcatcattgtcctttcgaacaaatacgtaaaccaaatgtccgaacgtacggttcctctcgtactaagtacgattcctatatcaatgacaaaatccaatgtagggtaaaactaacctgtctcacgacggtctaaacccagctcacgttccctattggtgggtgaacaatccaacactttgcgaagtctgcttcgcaatgataggaagagccgacatcgaaggatcaaaaagcgacgtcgctatgaacgcttggccgccacaagccagttatccctgtggtaacttttctgtcacctcttgcaaaaaactcgttaaatcaaaaggatcgataggcccggatttctccgtctgtattcgtactgaaaatctaaatcaagctgacttatgcccttttactcaatgtgtggtttctgtccgcactgagtcaacttttggacacctacgttaacatttgatagatgtaccgccccagccaaactccccacctgtctctttccttgaagcagatcacgntgatacaagtatcnacgtttgtcactcaaacactggatataaaatccaatctctgtataaccaagtaagtaaagaaacaatgaaaataatggtgtttcattgacgtgttgccactcccatctacgctacacttttcaagtctctttacgaagacagattagagtcaagctcaacagggtcttctttccccgcattgaagtccaagcccgttcccttggctgtggtttcgctagatagtagacagggacagtgggaatctcgttaatccattcatgcgcgtcactaattagatgacgaggcatttggctaccagaagagagtcatagttactcccgccgtttacccgcgcttatttgaatttcttcacgttaacattcagagcactgggcagaaatcactttgcgtcaacaccaagttttccggccaatcgcaaagctctgttttaattagacagtcggattcccctagacgcagcgagttctaagtttgctattaaacgatgnccgaagtaatacganccgcaagcnaaccgcataccgtagcaanacnattccacagcaagacaagccactagtccgaacgatcagacacattgctgcatccgaaagctcagctccaatagcaagtctactgctttatcatcaagcccgaacaccctagcacttagagccaatcgttatcccgaagttgccgatcnattttgccgacttcccttgtgctaccttgttctaattgactagaggcttttcaccttggagacctgatgcggtttagagtacagataagtgcgaaattgantatctcgctcaaattttcaaggatcacaaatgatgcaccgaggaagtagcaagaacggctactctttaccttcatttgaaccctatctccagttgaactgattccagggtcgtctgatgaagtaacaaagaagagaaaactctttccaggaccacttgtgatgtatttgagcttgtttgtgttaccacatatgtntgacangaaatcaaacaatctccgacacttagtacaagaatattaacttgtttccctttcgatttgatggaatataaatannnnananaaanantnntcnntnnnnnnncncnttnnnnnnnnnnntnnnnnnnnnnnnnncnnnnnnnnnannnnntnnnnnnnnannnntntncncnnnnnnnntnnnannnntnnnttnnnnanntnntnnnnncncnnanannnnnnnnnnnnannnnnnnnnncncncncnnnnnntnnnnnncnnnnnnnncannnnnancnnccnncntnttnnnnnnnnnnnnnnnnnnnnnnnnngttntntnntnnnannnnnnnanannannnnngcncnnnngnnnnccnnnnttnnnnnnnnnnnnnnnnnnnggngngnngttnnnnacnccnnnnnnnannnnnncnnncntnnnnnccnnccnncnntntntntnnnnnnncacnnnntntnntntntnntnnnngngnnnancnnnnnnnntntnttnnnnnnntntnnntnnnncannncnnnnnnnnnttnnnnnaaannnnnnncnnnnnnnncncnnnnnntnnnnnttntnnnnnaannananaaanaaannnnntnnnnnnnnnnnnnnnntnnntnnnnngngngnnnnttnnnnncnnnnnnncnnnnnannnnntnnnnnnnnnnnaannnnnnnnnnnnantnnnnncnnncntnnnnnnnnnnnnnnnnggnnnnancnncnnnnnnnnnngntnnntntttnnnnccnnnntnnannnntnnnnnnnnnnnnnnnnnncnnnnnnncnncnnnnnnnnnccnnnnnnnnnnnnnncnnnnttntnnnnncannanntnnnnnnncnnnnnnnnnnnntnnnntnnnntnntnntnnnnnnnnnnnnnncnncnnnanaannnnncnnnnnngnntnnntnntnntnntnnnnnnnnnnnnannnaaannannnnnannnnannnnnnnaannnnntttnnttnnnttnnnnnnan

SEQ ID NO: 324 - DNA, 4000 bp, Escherichia coli
  misc_feature (1933)..(1933): n is a, c, g, or t
  misc_feature (1935)..(1936): n is a, c, g, or t
  misc_feature (1941)..(1942): n is a, c, g, or t
  misc_feature (1945)..(1945): n is a, c, g, or t
  misc_feature (1947)..(1947): n is a, c, g, or t
  misc_feature (1962)..(1963): n is a, c, g, or t
  misc_feature (1969)..(1969): n is a, c, g, or t
  misc_feature (1974)..(1974): n is a, c, g, or t
  misc_feature (1989)..(1990): n is a, c, g, or t
  misc_feature (1999)..(1999): n is a, c, g, or t
  misc_feature (2002)..(2002): n is a, c, g, or t
  misc_feature (2007)..(2007): n is a, c, g, or t
ttaatggcggatgagtttgtgaaaaacttaccctccgtaccgttctgcgtgaacttaatgagataccgaccttccccgtgttgtgttttcattccggggataaagtcgataacttctatttcgctgttcagaacgtccgtgatagacacctgttggcagttgaaaatcttgcggtcgtcctgctgcttgataccgagttcgctgaaacgctttgccatattactggatatttagggttgcacaatcgtcgtcgatttgacgtttgatagctgcccgctcggataaaaaggctttgtatgcagcgattttcggctgggcatcggtactcgatttagccccgtatatccccattgtcgcagcgttgtactcgttgataagtttctgctcgtaatccctcggccataaatggttgattacggcctcggtcagtttgtcgctcgttaccgtaccccacacgacaacctcctgacactcccatttcgttgtggtttcctccgtgtcagctccggcgggtatttcgacttctttaatgtcccaacggtaggtgtaagaaccgtccccgtttgcctcgtagatagagggctttttgtcatagattgccatagaaactcggtttaattatggttttcaataaatgtttggaattgctgtgttttgcccagccgagccaactgcacactccctgtttgtagtctttggcagataggttgggctgcttgttaagccgggcaacggcacggcaaaaattcttcttgatgctcttgcggattagcttgtgttcgtggtagaaaacgaacccgacgaaatccagcccccgcccgtgcttatcgctgcgatttttagcgatagggaatacctggtaatttgcctttatcgtcaaatgcaggttgtcacggagataggcatctatctgtgtgagtaaatcatgcaggaacgccttgtccttgtgcagaaaaaccatgtcgtcggcatacctgaaataatatttgacaccgacctcctcttttatccaatggtcaaagtatgcgaggaacaggttggcgaaatattgcgacaggtaattgccgatagggacaccggcggcactatctatgatttggtcgagtagagccagcgtgtccgggcatttgattttacggcgcacgatttgtttcagcacatcatggtcgatactcggatagaatttcttaacgtcgattttcaggcaatatcgggtgttctccacgtctttcaacgctttatctactttcagcatacacccgtttatacccctatttttgatgcaagaaaacgtgtccgtcgtgaacaccgaaacccatattggttcgagaatgttcattatagcgtgatgaacgattctgtcggggaaatacggcagccgatatatctcccgctctttggggtctttgatgataaatgtttcgtactttgatgttttgaacgtcttatttttgagtgcttcgtgcaaagcgagggtattggcttccctgtttttgtcgtggcgacgtaccccgtaagaacgcagttttccccgtctcgctttttggtcggcgagttggaggttttctactgcgataatcctttcgtataaattccctatccgtttcattgctttgcttttcatacttggagccgtcggtttccctaccagcacctttttgtggttcgtgtttttttgccaagaggcacggtcgtcgttctatattttgtttcttattaacctatgaaaatcagaggtgagagccgatgttcgcattcgtattcgagggggtgttattcgaattcgcatagctgaagcctgcattcgcaccgttattcgcattaccgctgaacaggacaccacgaagaacgaccaaccttttctatcttacgtcataactatctattattaaattatttacaaattgggtataaagcaaaggcgagagccgangnncgcanncgnantcgagggggcgttanncgaatncgcanagccgaagcccgcanncgcaccgtnatncgcanaaccgccgaacaggacaccacgaagaactgtacccgatgcaggaatgttggtatagtggtagtccgcccaataggttgttgaaccgccgcccaccaccgctggcatgatgtcgccgaactcaccgaagacaagttctttgacgtatgcttcggttcgggcttcttctcctcgcagagtgtagccgttgtagttgctgtcgttgtagtttgtggggtcgtcagcaacatatacttttgatgtcccgccgtcagcagccgaggcgatttgaatattgatgccgtccgtccatttccaaatgtgtccgaacggattttcaatacctcggtagcgaggaacatataccgttccgtgtgtacctccctcggcgttctgcatgacgtatgcaacctcgcccgaagcgttgccgagttcatcggtataaccgcaagggacaaacggataataaccgttaaatccgttccaatccggggtgttggttactccgttgccgaggccgccttgtgcaaagccgtttgtgtccttttgggcgttgaatgccgtctgacagttacggttggcgtactccacatagtaaagccaaaatacggccttgtatgcgttgtagtcaaggcaattccattcgttcgtcgccgatgcgttacggaggcgggctgcattgcggaaagccgtgcggctcttgactgtaaccggacgcccaagaacagaacgatacgttccgtcccaatccgcctgattgtttccacccctgtaatctgttcccatattgacgacagaacagagtttgcccgtgctgcgttccatagcggcctcatacgccgaaatatacattttgggaacggcgtgatagcccggcaacgggtattccgatagtttgcaccggcgtattgttccctctgtctcgaacttgcgataatgtgctgggatttcgaccatgacctgacctttggagccgtcgagggtatgcgccctccaatttgtcgggttcaggtactcaacgaccgttccgttatcgctcaacaagcaaccccgcatccggttttgaatggggaggcttttatggagagcgatactgccgatacgggtacacgtcggcgtcgatacggtcgtgtcccattggatgccgtaggcgcattgatcttcgaggtatgggagcatggttgcgagtttagcttgtttgctctctccgtccgtgtccataacctctacgatgagttcgagaggatttacctccccgatatgggggagttcattcaaccgcttcccgttatcgaaagctgtgataatttgaagcacttttgcttcctgttcaggtgttaatgccataattgtcttgttattaagttaatctaaaactaccgttgcccatgagccgcaatgagtttgattttactcgtcgaagttccggttccgccaccgtaatttgtatggttcggtaaattgacgtattctcggtcgggataacgtggattttgctgatacctgtccgattgactgtgaggcttccgtcgggttgaaccgaaacggcattatcatcgccgagaaacagcacattgcgtcccgtgttcgtcgggagcagttcgtatgttatacgtctcggcacggtgtttcggaatgttatgcgaggcggatagtcgaggttcatgcctgtcggaatcattttgtactgcccgacgagcgattcttccaattcctccaaccttacgattgtggctcgtgcttcctctgcggtctccccggcgagatttgcggcgttgtcggcggctgtggccttttggtctgcgagggcggctttggaattggcggtgttcgctgctgtcgttgctgccccggcagctttgtccgctgcatcggcttttgtgttcgcatttttggctgccgtgtctgctgctgttgctttatccgtagcatttttagcggctgtattggccgcctccgttgcggtattggcattttttgtggctgtttttgccgcttctgtcgccgtctctgcgg

SEQ ID NO: 325 - DNA, 4000 bp, Escherichia coli
  misc_feature (2)..(2): n is a, c, g, or t
  misc_feature (4)..(5): n is a, c, g, or t
  misc_feature (7)..(8): n is a, c, g, or t
  misc_feature (11)..(13): n is a, c, g, or t
  misc_feature (15)..(16): n is a, c, g, or t
  misc_feature (18)..(22): n is a, c, g, or t
  misc_feature (26)..(26): n is a, c, g, or t
  misc_feature (30)..(31): n is a, c, g, or t
  misc_feature (35)..(35): n is a, c, g, or t
  misc_feature (37)..(37): n is a, c, g, or t
  misc_feature (40)..(40): n is a, c, g, or t
  misc_feature (45)..(46): n is a, c, g, or t
  misc_feature (51)..(51): n is a, c, g, or t
  misc_feature (56)..(60): n is a, c, g, or t
  misc_feature (62)..(62): n is a, c, g, or t
  misc_feature (64)..(64): n is a, c, g, or t
  misc_feature (69)..(69): n is a, c, g, or t
  misc_feature (71)..(71): n is a, c, g, or t
  misc_feature (77)..(78): n is a, c, g, or t
  misc_feature (81)..(83): n is a, c, g, or t
  misc_feature (85)..(86): n is a, c, g, or t
  misc_feature (88)..(88): n is a, c, g, or t
  misc_feature (92)..(93): n is a, c, g, or t
  misc_feature (96)..(99): n is a, c, g, or t
  misc_feature (101)..(103): n is a, c, g, or t
  misc_feature (106)..(107): n is a, c, g, or t
  misc_feature (109)..(112): n is a, c, g, or t
  misc_feature (114)..(116): n is a, c, g, or t
  misc_feature (118)..(124): n is a, c, g, or t
  misc_feature (126)..(126): n is a, c, g, or t
  misc_feature (129)..(134): n is a, c, g, or t
  misc_feature (137)..(138): n is a, c, g, or t
  misc_feature (141)..(142): n is a, c, g, or t
  misc_feature (145)..(145): n is a, c, g, or t
  misc_feature (147)..(148): n is a, c, g, or t
  misc_feature (151)..(153): n is a, c, g, or t
  misc_feature (155)..(155): n is a, c, g, or t
  misc_feature (160)..(161): n is a, c, g, or t
  misc_feature (167)..(167): n is a, c, g, or t
  misc_feature (169)..(172): n is a, c, g, or t
  misc_feature (175)..(176): n is a, c, g, or t
  misc_feature (179)..(179): n is a, c, g, or t
  misc_feature (181)..(184): n is a, c, g, or t
  misc_feature (186)..(188): n is a, c, g, or t
  misc_feature (190)..(190): n is a, c, g, or t
  misc_feature (192)..(193): n is a, c, g, or t
  misc_feature (195)..(195): n is a, c, g, or t
  misc_feature (205)..(207): n is a, c, g, or t
  misc_feature (210)..(210): n is a, c, g, or t
  misc_feature (212)..(212): n is a, c, g, or t
  misc_feature (214)..(215): n is a, c, g, or t
  misc_feature (217)..(220): n is a, c, g, or t
  misc_feature (223)..(224): n is a, c, g, or t
  misc_feature (226)..(226): n is a, c, g, or t
  misc_feature (230)..(231): n is a, c, g, or t
  misc_feature (234)..(234): n is a, c, g, or t
  misc_feature (241)..(241): n is a, c, g, or t
  misc_feature (244)..(247): n is a, c, g, or t
  misc_feature (249)..(249): n is a, c, g, or t
  misc_feature (255)..(258): n is a, c, g, or t
  misc_feature (264)..(264): n is a, c, g, or t
  misc_feature (267)..(267): n is a, c, g, or t
  misc_feature (274)..(275): n is a, c, g, or t
  misc_feature (277)..(285): n is a, c, g, or t
  misc_feature (287)..(290): n is a, c, g, or t
  misc_feature (293)..(295): n is a, c, g, or t
  misc_feature (298)..(298): n is a, c, g, or t
  misc_feature (300)..(300): n is a, c, g, or t
  misc_feature (304)..(304): n is a, c, g, or t
  misc_feature (308)..(308): n is a, c, g, or t
  misc_feature (311)..(312): n is a, c, g, or t
  misc_feature (314)..(314): n is a, c, g, or t
  misc_feature (318)..(318): n is a, c, g, or t
  misc_feature (321)..(321): n is a, c, g, or t
  misc_feature (323)..(324): n is a, c, g, or t
  misc_feature (327)..(328): n is a, c, g, or t
  misc_feature (331)..(331): n is a, c, g, or t
  misc_feature (334)..(339): n is a, c, g, or t
  misc_feature (341)..(341): n is a, c, g, or t
  misc_feature (343)..(343): n is a, c, g, or t
  misc_feature (345)..(347): n is a, c, g, or t
  misc_feature (349)..(349): n is a, c, g, or t
  misc_feature (351)..(351): n is a, c, g, or t
  misc_feature (353)..(353): n is a, c, g, or t
  misc_feature (356)..(356): n is a, c, g, or t
  misc_feature (358)..(363): n is a, c, g, or t
  misc_feature (365)..(367): n is a, c, g, or t
  misc_feature (369)..(373): n is a, c, g, or t
  misc_feature (375)..(376): n is a, c, g, or t
  misc_feature (379)..(379): n is a, c, g, or t
  misc_feature (386)..(388): n is a, c, g, or t
  misc_feature (391)..(391): n is a, c, g, or t
  misc_feature (394)..(394): n is a, c, g, or t
  misc_feature (399)..(399): n is a, c, g, or t
  misc_feature (401)..(401): n is a, c, g, or t
  misc_feature (403)..(406): n is a, c, g, or t
  misc_feature (409)..(410): n is a, c, g, or t
  misc_feature (412)..(419): n is a, c, g, or t
  misc_feature (422)..(422): n is a, c, g, or t
  misc_feature (424)..(424): n is a, c, g, or t
  misc_feature (426)..(429): n is a, c, g, or t
  misc_feature (431)..(437): n is a, c, g, or t
  misc_feature (439)..(441): n is a, c, g, or t
  misc_feature (444)..(444): n is a, c, g, or t
  misc_feature (447)..(448): n is a, c, g, or t
  misc_feature (451)..(452): n is a, c, g, or t
  misc_feature (454)..(454): n is a, c, g, or t
  misc_feature (456)..(456): n is a, c, g, or t
  misc_feature (458)..(458): n is a, c, g, or t
  misc_feature (460)..(460): n is a, c, g, or t
  misc_feature (462)..(462): n is a, c, g, or t
  misc_feature (466)..(466): n is a, c, g, or t
  misc_feature (470)..(471): n is a, c, g, or t
  misc_feature (478)..(478): n is a, c, g, or t
  misc_feature (480)..(482): n is a, c, g, or t
  misc_feature (484)..(488): n is a, c, g, or t
  misc_feature (490)..(491): n is a, c, g, or t
  misc_feature (494)..(494): n is a, c, g, or t
  misc_feature (497)..(499): n is a, c, g, or t
  misc_feature (501)..(502): n is a, c, g, or t
  misc_feature (504)..(505): n is a, c, g, or t
  misc_feature (507)..(507): n is a, c, g, or t
  misc_feature (512)..(513): n is a, c, g, or t
  misc_feature (515)..(515): n is a, c, g, or t
  misc_feature (517)..(521): n is a, c, g, or t
  misc_feature (524)..(526): n is a, c, g, or t
  misc_feature (530)..(530): n is a, c, g, or t
  misc_feature (532)..(532): n is a, c, g, or t
  misc_feature (534)..(534): n is a, c, g, or t
  misc_feature (536)..(536): n is a, c, g, or t
  misc_feature (539)..(539): n is a, c, g, or t
  misc_feature (541)..(541): n is a, c, g, or t
  misc_feature (549)..(560): n is a, c, g, or t
  misc_feature (562)..(564): n is a, c, g, or t
  misc_feature (567)..(567): n is a, c, g, or t
  misc_feature (569)..(574): n is a, c, g, or t
  misc_feature (576)..(577): n is a, c, g, or t
  misc_feature (579)..(581): n is a, c, g, or t
  misc_feature (583)..(583): n is a, c, g, or t
  misc_feature (585)..(586): n is a, c, g, or t
  misc_feature (594)..(597): n is a, c, g, or t
  misc_feature (599)..(599): n is a, c, g, or t
  misc_feature (601)..(604): n is a, c, g, or t
  misc_feature (607)..(608): n is a, c, g, or t
  misc_feature (612)..(614): n is a, c, g, or t
  misc_feature (616)..(616): n is a, c, g, or t
  misc_feature (618)..(624): n is a, c, g, or t
  misc_feature (626)..(628): n is a, c, g, or t
  misc_feature (631)..(638): n is a, c, g, or t
  misc_feature (640)..(642): n is a, c, g, or t
  misc_feature (644)..(645): n is a, c, g, or t
  misc_feature (647)..(648): n is a, c, g, or t
  misc_feature (653)..(653): n is a, c, g, or t
  misc_feature (655)..(660): n is a, c, g, or t
  misc_feature (663)..(664): n is a, c, g, or t
  misc_feature (666)..(667): n is a, c, g, or t
  misc_feature (670)..(670): n is a, c, g, or t
  misc_feature (673)..(673): n is a, c, g, or t
  misc_feature (676)..(676): n is a, c, g, or t
  misc_feature (681)..(682): n is a, c, g, or t
  misc_feature (684)..(684): n is a, c, g, or t
  misc_feature (686)..(688): n is a, c, g, or t
  misc_feature (695)..(698): n is a, c, g, or t
  misc_feature (700)..(702): n is a, c, g, or t
  misc_feature (705)..(706): n is a, c, g, or t
  misc_feature (708)..(709): n is a, c, g, or t
  misc_feature (711)..(712): n is a, c, g, or t
  misc_feature (714)..(714): n is a, c, g, or t
  misc_feature (718)..(723): n is a, c, g, or t
  misc_feature (731)..(731): n is a, c, g, or t
  misc_feature (734)..(734): n is a, c, g, or t
  misc_feature (740)..(740): n is a, c, g, or t
  misc_feature (743)..(748): n is a, c, g, or t
  misc_feature (750)..(751): n is a, c, g, or t
  misc_feature (753)..(754): n is a, c, g, or t
  misc_feature (756)..(758): n is a, c, g, or t
  misc_feature (760)..(760): n is a, c, g, or t
  misc_feature (762)..(763): n is a, c, g, or t
  misc_feature (766)..(766): n is a, c, g, or t
  misc_feature (770)..(771): n is a, c, g, or t
  misc_feature (773)..(773): n is a, c, g, or t
  misc_feature (775)..(780): n is a, c, g, or t
  misc_feature (783)..(783): n is a, c, g, or t
  misc_feature (786)..(789): n is a, c, g, or t
  misc_feature (791)..(792): n is a, c, g, or t
  misc_feature (794)..(794): n is a, c, g, or t
  misc_feature (796)..(796): n is a, c, g, or t
  misc_feature (798)..(799): n is a, c, g, or t
  misc_feature (801)..(801): n is a, c, g, or t
  misc_feature (803)..(804): n is a, c, g, or t
  misc_feature (807)..(807): n is a, c, g, or t
  misc_feature (809)..(809): n is a, c, g, or t
  misc_feature (811)..(811): n is a, c, g, or t
  misc_feature (813)..(813): n is a, c, g, or t
  misc_feature (815)..(815): n is a, c, g, or t
  misc_feature (820)..(821): n is a, c, g, or t
  misc_feature (823)..(827): n is a, c, g, or t
  misc_feature (829)..(829): n is a, c, g, or t
  misc_feature (831)..(833): n is a, c, g, or t
  misc_feature (835)..(836): n is a, c, g, or t
  misc_feature (838)..(838): n is a, c, g, or t
  misc_feature (840)..(841): n is a, c, g, or t
  misc_feature (846)..(856): n is a, c, g, or t
  misc_feature (859)..(860): n is a, c, g, or t
  misc_feature (862)..(864): n is a, c, g, or t
  misc_feature (866)..(866): n is a, c, g, or t
  misc_feature (868)..(868): n is a, c, g, or t
  misc_feature (870)..(872): n is a, c, g, or t
  misc_feature (875)..(875): n is a, c, g, or t
  misc_feature (877)..(878): n is a, c, g, or t
  misc_feature (881)..(882): n is a, c, g, or t
  misc_feature (886)..(891): n is a, c, g, or t
  misc_feature (893)..(906): n is a, c, g, or t
  misc_feature (908)..(909): n is a, c, g, or t
  misc_feature (911)..(912): n is a, c, g, or t
  misc_feature (914)..(914): n is a, c, g, or t
  misc_feature (916)..(916): n is a, c, g, or t
  misc_feature (918)..(920): n is a, c, g, or t
  misc_feature (922)..(924): n is a, c, g, or t
  misc_feature (929)..(929): n is a, c, g, or t
  misc_feature (932)..(932): n is a, c, g, or t
  misc_feature (934)..(935): n is a, c, g, or t
  misc_feature (939)..(939): n is a, c, g, or t
  misc_feature (944)..(946): n is a, c, g, or t
  misc_feature (948)..(948): n is a, c, g, or t
  misc_feature (950)..(951): n is a, c, g, or t
  misc_feature (955)..(956): n is a, c, g, or t
  misc_feature (960)..(960): n is a, c, g, or t
  misc_feature (963)..(963): n is a, c, g, or t
  misc_feature (966)..(972): n is a, c, g, or t
  misc_feature (974)..(974): n is a, c, g, or t
  misc_feature (977)..(980): n is a, c, g, or t
  misc_feature (983)..(985): n is a, c, g, or t
  misc_feature (987)..(988): n is a, c, g, or t
  misc_feature (990)..(991): n is a, c, g, or t
  misc_feature (994)..(997): n is a, c, g, or t
  misc_feature (1000)..(1000): n is a, c, g, or t
  misc_feature (1002)..(1005): n is a, c, g, or t
  misc_feature (1007)..(1007): n is a, c, g, or t
  misc_feature (1009)..(1016): n is a, c, g, or t
  misc_feature (1018)..(1019): n is a, c, g, or t
  misc_feature (1021)..(1021): n is a, c, g, or t
  misc_feature (1023)..(1025): n is a, c, g, or t
  misc_feature (1027)..(1030): n is a, c, g, or t
  misc_feature (1032)..(1032): n is a, c, g, or t
  misc_feature (1034)..(1034): n is a, c, g, or t
  misc_feature (1039)..(1040): n is a, c, g, or t
  misc_feature (1042)..(1043): n is a, c, g, or t
  misc_feature (1045)..(1045): n is a, c, g, or t
  misc_feature (1047)..(1048): n is a, c, g, or t
  misc_feature (1050)..(1052): n is a, c, g, or t
  misc_feature (1054)..(1054): n is a, c, g, or t
  misc_feature (1056)..(1056): n is a, c, g, or t
  misc_feature (1058)..(1058): n is a, c, g, or t
  misc_feature (1060)..(1061): n is a, c, g, or t
  misc_feature (1063)..(1063): n is a, c, g, or t
  misc_feature (1066)..(1067): n is a, c, g, or t
  misc_feature (1069)..(1071): n is a, c, g, or t
  misc_feature (1076)..(1078): n is a, c, g, or t
  misc_feature (1083)..(1083): n is a, c, g, or t
  misc_feature (1087)..(1087): n is a, c, g, or t
  misc_feature (1089)..(1089): n is a, c, g, or t
  misc_feature (1091)..(1094): n is a, c, g, or t
  misc_feature (1098)..(1100): n is a, c, g, or t
  misc_feature (1103)..(1103): n is a, c, g, or t
  misc_feature (1105)..(1105): n is a, c, g, or t
  misc_feature (1107)..(1108): n is a, c, g, or t
  misc_feature (1111)..(1113): n is a, c, g, or t
  misc_feature (1116)..(1116): n is a, c, g, or t
  misc_feature (1118)..(1118): n is a, c, g, or t
  misc_feature (1121)..(1124): n is a, c, g, or t
  misc_feature (1126)..(1127): n is a, c, g, or t
  misc_feature (1131)..(1131): n is a, c, g, or t
  misc_feature (1135)..(1136): n is a, c, g, or t
  misc_feature (1139)..(1140): n is a, c, g, or t
  misc_feature (1142)..(1142): n is a, c, g, or t
  misc_feature (1144)..(1145): n is a, c, g, or t
  misc_feature (1147)..(1152): n is a, c, g, or t
  misc_feature (1155)..(1157): n is a, c, g, or t
  misc_feature (1159)..(1159): n is a, c, g, or t
  misc_feature (1161)..(1166): n is a, c, g, or t
  misc_feature (1168)..(1168): n is a, c, g, or t
  misc_feature (1170)..(1171): n is a, c, g, or t
  misc_feature (1173)..(1175): n is a, c, g, or t
  misc_feature (1178)..(1178): n is a, c, g, or t
  misc_feature (1180)..(1180): n is a, c, g, or t
  misc_feature (1183)..(1184): n is a, c, g, or t
  misc_feature (1186)..(1189): n is a, c, g, or t
  misc_feature (1194)..(1195): n is a, c, g, or t
  misc_feature (1197)..(1198): n is a, c, g, or t
  misc_feature (1200)..(1200): n is a, c, g, or t
  misc_feature (1203)..(1205): n is a, c, g, or t
  misc_feature (1207)..(1207): n is a, c, g, or t
  misc_feature (1210)..(1210): n is a, c, g, or t
  misc_feature (1213)..(1213): n is a, c, g, or t
  misc_feature (1215)..(1216): n is a, c, g, or t
  misc_feature (1219)..(1221): n is a, c, g, or t
  misc_feature (1224)..(1225): n is a, c, g, or t
  misc_feature (1227)..(1227): n is a, c, g, or t
  misc_feature (1229)..(1229): n is a, c, g, or t
  misc_feature (1231)..(1232): n is a, c, g, or t
  misc_feature (1234)..(1234): n is a, c, g, or t
  misc_feature (1237)..(1242): n is a, c, g, or t
  misc_feature (1244)..(1246): n is a, c, g, or t
  misc_feature (1248)..(1248): n is a, c, g, or t
  misc_feature (1258)..(1258): n is a, c, g, or t
  misc_feature (1264)..(1265): n is a, c, g, or t
  misc_feature (1267)..(1267): n is a, c, g, or t
  misc_feature (1269)..(1272): n is a, c, g, or t
  misc_feature (1274)..(1279): n is a, c, g, or t
  misc_feature (1281)..(1282): n is a, c, g, or t
  misc_feature (1286)..(1287): n is a, c, g, or t
  misc_feature (1293)..(1294): n is a, c, g, or t
  misc_feature (1296)..(1296): n is a, c, g, or t
  misc_feature (1300)..(1301): n is a, c, g, or t
  misc_feature (1303)..(1303): n is a, c, g, or t
  misc_feature (1305)..(1306): n is a, c, g, or t
  misc_feature (1310)..(1310): n is a, c, g, or t
  misc_feature (1314)..(1315): n is a, c, g, or t
  misc_feature (1319)..(1319): n is a, c, g, or t
  misc_feature (1321)..(1322): n is a, c, g, or t
  misc_feature (1325)..(1325): n is a, c, g, or t
  misc_feature (1327)..(1329): n is a, c, g, or t
  misc_feature (1331)..(1331): n is a, c, g, or t
  misc_feature (1334)..(1336): n is a, c, g, or t
  misc_feature (1338)..(1338): n is a, c, g, or t
  misc_feature (1341)..(1341): n is a, c, g, or t
  misc_feature (1343)..(1343): n is a, c, g, or t
  misc_feature (1349)..(1355): n is a, c, g, or t
  misc_feature (1357)..(1357): n is a, c, g, or t
  misc_feature (1359)..(1359): n is a, c, g, or t
  misc_feature (1365)..(1367): n is a, c, g, or t
  misc_feature (1371)..(1373): n is a, c, g, or t
  misc_feature (1379)..(1380): n is a, c, g, or t
  misc_feature (1384)..(1384): n is a, c, g, or t
  misc_feature (1388)..(1388): n is a, c, g, or t
  misc_feature (1390)..(1392): n is a, c, g, or t
  misc_feature (1395)..(1395): n is a, c, g, or t
  misc_feature (1399)..(1400): n is a, c, g, or t
  misc_feature (1402)..(1403): n is a, c, g, or t
  misc_feature (1405)..(1405): n is a, c, g, or t
  misc_feature (1407)..(1407): n is a, c, g, or t
  misc_feature (1409)..(1411): n is a, c, g, or t
  misc_feature (1413)..(1413): n is a, c, g, or t
  misc_feature (1418)..(1420): n is a, c, g, or t
  misc_feature (1422)..(1426): n is a, c, g, or t
  misc_feature (1429)..(1429): n is a, c, g, or t
  misc_feature (1431)..(1431): n is a, c, g, or t
  misc_feature (1434)..(1435): n is a, c, g, or t
  misc_feature (1442)..(1442): n is a, c, g, or t
  misc_feature (1445)..(1446): n is a, c, g, or t
  misc_feature (1448)..(1448): n is a, c, g, or t
  misc_feature (1450)..(1450): n is a, c, g, or t
  misc_feature (1452)..(1452): n is a, c, g, or t
  misc_feature (1456)..(1459): n is a, c, g, or t
  misc_feature (1464)..(1464): n is a, c, g, or t
  misc_feature (1466)..(1466): n is a, c, g, or t
  misc_feature (1468)..(1469): n is a, c, g, or t
  misc_feature (1471)..(1471): n is a, c, g, or t
  misc_feature (1473)..(1473): n is a, c, g, or t
  misc_feature (1475)..(1478): n is a, c, g, or t
  misc_feature (1480)..(1480): n is a, c, g, or t
  misc_feature (1482)..(1482): n is a, c, g, or t
  misc_feature (1485)..(1485): n is a, c, g, or t
  misc_feature (1487)..(1487): n is a, c, g, or t
  misc_feature (1489)..(1489): n is a, c, g, or t
  misc_feature (1491)..(1491): n is a, c, g, or t
  misc_feature (1497)..(1499): n is a, c, g, or t
  misc_feature (1504)..(1511): n is a, c, g, or t
  misc_feature (1516)..(1517): n is a, c, g, or t
  misc_feature (2990)..(2990): n is a, c, g, or t
  misc_feature (3140)..(3140): n is a, c, g, or t
  misc_feature (3155)..(3155): n is a, c, g, or t
  misc_feature (3197)..(3197): n is a, c, g, or t
  misc_feature (3425)..(3425): n is a, c, g, or t
  misc_feature (3429)..(3429): n is a, c, g, or t
  misc_feature (3893)..(3893): n is a, c, g, or t
  misc_feature (3923)..(3923): n is a, c, g, or t
tncnncnntannnannannnnngggnattnnaacncnggngagannatttnaaaannnnncngnaggangnaaaaannatnnnanntnaatnnagnnnntnnngtnnannnnannngnnnnnnnanttnnnnnnaannctnnatnannggnnncnggggnntgaaantnnnnggnngangnnnntnnngnanngnaaaaaacagnnnagnangnntnnnntgnnanaaannaanttttttnacnnnngnaaaaannnnagtttngangaaaaanngnnnnnnnnnannnngannntgntnacgnaaantannanaaangancnnaannagntgnnnnnntntntnnngnancnatnannnnnnannntnnnnntnncangggaaannnagnagnaaaantngnnnnacnnannnnnnnngtntnannnnannnnnnncnnnaanttnnaanntntncngnancctnaaannaaaaaantnnngnnnnngnnacngannntnntnnanttaannantnnnnnaannntttncntnanttnanaaaaaaannnnnnnnnnnnannnttnannnnnntnnannngnannaaaaaacnnnncngnnnncanncaannncntnnnnnnnannnaannnnnnnngnnnannannaaaangnnnnnnaannannttnaanggnaaaanncnannnggctttnnnncnnngannanntnntncacnnnnnnaaaagttnaangaattnatnnnnnntnntnntnnnantnntgncagnngngnnnnnnacnctnnnnanntnananntngnnttnangntngntacanntnnnnnangnnngnnantnnttttnnnnnnnnnnntgnngnnntntncnnnttntnnaannatgnnnnnnannnnnnnnnnnnnnanntnngngnannnannngcaantangnnaatnctttnnntnannaagnnaaanttnaannnnnnnantannnngannncnntnnatnnnnccngnnnnangnnnnnnnnannangnnntnnnnantnaaatnngnngngnnannntnanangnntncanngnnngaacnnnaaaantatnancnnnnaaannnggntntnnaannnttnantgnnnnannggtncggnnatnnancnngnnnnnnttnnntnannnnnngntnngnnncangnagnnannnnccctnntnnanccnnngnaantgntnnagnnnaannangncnngntcnnnnnnannnanaaattaaggnatcggnngnannnnannnnnnannaaannaaaaannanaggnngnanncatnaaanntttntnnaangnnngnaannntnaancnacaaannnnnnngntnatcaannnaatnnnccggtnnatgnaaangnnntangttnntnncngntnnntnaggtnnncnnnnntantnttnnatttgantanntngngntatnnnnagaantntnngnanannnngnanaantncngnaggggnnnattgnnnnnnnnatttnnttcatgctaatagaatgcaaaatgttgtttgtgacaacaagccggcttgcagaacatgcagtctatttgccacatcccagatcaaattccgggttgcacatataaaagtttttgctgtcaagttcttcctgaaccaggcggaggccttcaccgaaacgctggaaatgcacgatttcgcgctggcgcagaaaacggatcggttcacagacttccggatctttgacaagacgtaaaatattatcgtaggtggtgcgggctttctgctccgcagccatatcttcaaaaagatccgtgatcgcatcgcctttgctctggaattcacaggcattaaacggaataccgccggctgcctgcggccagatcccggccgtgtgatcgacatagtaaggagcgaaaccggcggcctcaagttcttcagcacttaagcctttggtgagctggcggacgatggcggcaatcatttcgaggtgggctaattcctccgtcccaatatccgtcaacagtcccgctactttattatatggcatactatacctctgtgacagataacggaacgatgcggccgcctctccatctggtcctccatactgactgatgatgatctgtgcgattttggcattgggtcttgtaatgttgactgggaattgtaaacgtttttcataattccacattaacagtcacctccttcccatggccatggatccgatgcccaacgccagtaattatcaggatttgcggtgtcgatggtaagcggagtataattttgcgcatatgcacgcagtgcagtgcgtcttaagtcagcatagtgattgaaatattttaaagcttcttcatcgtcaggatgcgtgtcgagatattctgtgatttctacgacagcaaagctgaccatatcgatccagtggaggagttgggactgattcatctgactgatcatcatcggcatctacctccgtttgcggctaaaaatggtttatccagttctggaaaaatagtcccggcactgagtgaacgatccggttcataaacagtagaaaaatgctgccaggggacgtatgccatggcgagtacataatcagaaatggttcttatattttctgaacaggaaacagaatctgcacaggatgcagattctgtgcaaaagtccagacctgcacggtgtgcaggatgtgaaacagataaacggtcgcaggaacgattgctgttcccggacataggataaggtctcataataagttattcctttcaatatcaggtttacaataagatatgtaaaaatgatgattttggttcatttagcagacatcatataaaaaggtaaaaaatgcgtattatcaaatcgaaaaagagcgtaaaaaatgttgaaaaatatcaaaatgagtataaaataaaagatattggtattaaaacagcagaagacagagaaggggaataagaatgaataaaagaattgttgcaggtatgctgtttacgacngttgtgtgtatgacgttaggaggctgcggcttcacagctgataaagaaaatgtaaagaatagtggtgctgtggaatcggtaatgccgggagcagaagtatctacggagatgacagaaagagatgctgaggcggataatggtgtggtacancttaaagtatggtcngaagaagacaattttgacatgttaaaccagatgatagacagntttgaacagaaatatgcaggacaggcaaagtttgagattacattggaacaaaatgctgattctgatacaaaggatattcttttgggagatattcataacggggcggatgttttcccgtttgcggatgatcagctttctgcaatggttgccgctggtgcattatatccggtgccaaatgcagaagaagtaaagagtgcgaatttagaagagtcggtttctgctgcatcnattnatgatatcttatatgcttatccaatgacggcagataacggatacttcctctattatgataaaaatgttctttccgatgaagatgtccagacgatggatggcatgttagaggcactgaatgctgcaggcagatcattttccatggagcttaattcgggctggtatctgtatacattttttggtaatacgggtctggagtttggtattaatgatgatggcgtgacaaattactgtaactggaacgccacagatggagcaattaaaggcgttgatgtggcacaggccattttaaatatcacaaccaatccggcatttatcagccagccggatggagatttcattacaggagtacagaatggtacggttagtgcgggaatcagtggcgtatggaatgcagtttcagtcagggaagcatggggcgataattacggagccgtaaaacttccaacttacacggtggcaggncagcaggtacagatgtcttcttttaccggntataaaatgatgggcgtgaatgcatattccaaatatccggaatgggcagcaaaacttgcagactggcttacaaatga

SEQ ID NO: 326 - DNA, 4000 bp, Escherichia coli
  misc_feature (1937)..(1938): n is a, c, g, or t
  misc_feature (1941)..(1941): n is a, c, g, or t
  misc_feature (1943)..(1944): n is a, c, g, or t
  misc_feature (1949)..(1950): n is a, c, g, or t
  misc_feature (1958)..(1959): n is a, c, g, or t
  misc_feature (1965)..(1965): n is a, c, g, or t
  misc_feature (1971)..(1971): n is a, c, g, or t
  misc_feature (1991)..(1992): n is a, c, g, or t
  misc_feature (2001)..(2001): n is a, c, g, or t
  misc_feature (2003)..(2003): n is a, c, g, or t
  misc_feature (2010)..(2010): n is a, c, g, or t
  misc_feature (2012)..(2013): n is a, c, g, or t
caagtgcacatgtggggatgctttcttgattttgtctttttcggctttcgtgaaactaaaaacctcatccactgtgtttactataacagcaggctgaagaggcagcttcacgccgtcaggcacagaaacaaatgtctcaccgtttatggtgcatagttcagtgatccgggcctcgccctcctgaacatccggttccttgagtgagtgcgttgtaaatttgtctataacctttcggtatttgtagatctttggcattttgggcctccttaatgattctcagtaaatatggtaacgagttagttttctttgcatggccaagcaacgaaacgattgattcctgttttcctcttttgagagagcgtttgaatttataaagactatatttccggataaaacgtttatcctgccacgttctgtatcctacaaaattgacaccttttttaattttttggattgtcgatttggaaagacctaagcacagattccgtttcagaaattccacaataattcctttgtattttaaacacccttccctggttaatccgatcaaaataaaatcatccacatatctgacatagtgctttattttaagcacccgcttcacgaagtgatcaagcggattcagatagatcagcgcatatatctggctcaatagatttccgatcgggatccctaccggacctgctttttctgcgaaaatcatcataacatcaacgagttgtttatccttaattttgcgctcaatcaacatccgtaatatcatacgatcgatagagtagaaaaacttcctgatatccagtttcaacgtatagagatctgcgtcaaaagcccggagggtcttctgcgtatagtcactcgccccatgggtcccatatccaaccctgcacgcaaaactcgttgaaataaaactcctgtcaaaaatgtcatagatcactctgtaaattgcatgttgaaccactatatccctgaacgctggggcgtgaatcaatctctctttcggttcgtaaacggtaaactgaaaatatggatccggcttatatgaaccattgtgtatcctatcgtaaagatccatcaaattagccccaaggtttatctcaaattcaaagcaggctcgtttctttctcttccctttccgtgcatcgagataggcagaatataaattttccttactgaaggctttttcaaacaagttcccgtatcttttcaatttattgataccccctggtcttcggtttccctaccaaaaagaaggtttctgttgatttcgcttaaagctggataatgcatccctgtaattccactattccgtttccggatttgaggtgaaattgtagtcgcaacgcaacctgacattgttgttcgaattcgtccgattgttgttaagattcgaataccaaaccccggcattcgacgtgttgttccaattgttgcacgataggacgcatattgaggcattacccatttaccaattcttttgttctttaacttttttaatccaaccgcctatcatttttcctaattcatcattcaacctgctaattgcagcaaagcgatgcttttctaattcttcgggcttttcattactttgctttccatctttaaagcaaaaatatcccaattcgtaagctaaaaacaattgcatcctcagcttttcatgcgtgacatccaagttagtcaaggtggtttttttgaaataccgcttttggccttcggaaacataatcataaacttcataagccgtgctccttattctgtttgccaaagcgtacttctcgtgtttcggaaaatggttcaaatatatatttaacaattttgcaaattctataaactttctatttaatccggcttcactatgtatccccattttagcgaccttcttaaaaccgccgggttatcacccggctactcagggtaacaggcgcaacgcaacccgacanngtngnncgaanncgtccganngttgtnaagatncgaagaccaaaccccggcanncgacgtgtngntccaatngnngcacgatcggacgcatagctcatttcgaatatattgatagaaataatctttcccgaattgattagttccggttacgtcaatcccgtccgcatcctgtggaaagcctaaagcggtgagaatccagccatccccgcttacggcttcgcccaaaacttgattggcccctgatccgtatcgttgcgcaaatgccccggcggggtcaaacggcagcgaagccatggtaattgcgtccatcatggcggctacaccggtagcgccccagtggtcagtcgcgcccgcactgccgctatcaaagtccttcatggccgtggcttccttggcgacataaaaatccccataggtcacagtgcctgcactggaataggtggtgtatccggtagagtcaatcccgtccaaactgaaggtcgtgccattaatgacggtaaccttatacagtttatcgttaagttgggtcataccaaccacagcggttatcatgatccagtccccagtggtaagcgccgctgtgctcgccaccgtaatcacgcatggatctgcctccgatgccccggtaatggacatcgtggacgcaatacaggtgatcccgatagagacctcatacatcaaaccattcagatcagccacgccgcatgcctggccgttatgcgttgacttggcaaacggaacccctgatcctgttttcccgcaattactgtagccatcggtcacatagagcaaatcgtctcccgacccggcaccattgctcacctcatcatagtcctttagggcgttgttattgcaacccttggggtagttgtaagtggcgtcataccacgcgcagtacgtggtagcgctcaccgcttgagcatgggccagcgagagcagtgccagtgcggcatattgaaatttgctggcgcaatgaaaaatactactggcgttcaccgccccatctacaccgtcacgggcatgggctgcgtcaatggcctcgaaataggcatttgaaccacaggccgtcagatcagcaataggattgtgcgcagccgctgtactcaatggcagaccgcttttaatgctgctcgcgatatacccggttccccaggcagtttttgagcacatatacttatcagcaaaaaatccctgctgatttattccgccgtcgataaatgccctatgcatagcataactgtccgcattggcctcagcctcagttgaataggtgtccatcccctcgatggtcaccgtgttggtcgcgattagataataaaagcgggggatccagcacataatagacccatccgcatactgatagttaccgtagttgtccgatgcagggtcactgtatccggacattggggtcatatccgccggtaatatatcagccggacatatccctacgccgaacccggcgcgtcccgcagtcccgatacaattgacctcggcgccggcttgcatgtatcgcggatctgtaaaatatttccccgcccgggcgacccatcgcgtgtcaccgccgttctctgtgctgaggatttccaggtgatccaccgtatacgccgagcccgccgccacatactcataaagcgtctcggtttccgcgcagtagcacacctcccccggccggcctgcagcttccgccgcggtcaccgtatcaaacactaaatcctttatttgtcgctgattgagcatatccctcctccttttccgaccaggcccttttcaggtccatagctcgttacgatttcattttcccctgtctacgaggccggcacctcgatctccaccacatcgtttatgtccataatataattgatgtgaaacgtggtcgcgctgtcccagtggacttcatcgtcgcggatcaactgtactccattcaaccggatccggttctggtcgttggcgttaaacaaggcctcgctggcatccagcgttaccgtgtccccggtgtcatccgatgtcccggtcccggcgcctgctcccccggcgatcgtgattacctcattggccgcaaact

SEQ ID NO: 327 - DNA, 4000 bp, Escherichia coli
  misc_feature (810)..(811): n is a, c, g, or t
  misc_feature (814)..(814): n is a, c, g, or t
  misc_feature (829)..(829): n is a, c, g, or t
  misc_feature (836)..(836): n is a, c, g, or t
  misc_feature (843)..(843): n is a, c, g, or t
  misc_feature (1985)..(1985): n is a, c, g, or t
  misc_feature (1992)..(1992): n is a, c, g, or t
  misc_feature (1999)..(1999): n is a, c, g, or t
  misc_feature (2279)..(2279): n is a, c, g, or t
  misc_feature (2315)..(2317): n is a, c, g, or t
  misc_feature (2319)..(2319): n is a, c, g, or t
  misc_feature (2323)..(2323): n is a, c, g, or t
  misc_feature (2325)..(2326): n is a, c, g, or t
  misc_feature (2328)..(2329): n is a, c, g, or t
  misc_feature (2332)..(2336): n is a, c, g, or t
  misc_feature (2340)..(2340): n is a, c, g, or t
  misc_feature (2342)..(2345): n is a, c, g, or t
  misc_feature (2348)..(2348): n is a, c, g, or t
  misc_feature (2351)..(2356): n is a, c, g, or t
  misc_feature (2358)..(2361): n is a, c, g, or t
  misc_feature (2363)..(2373): n is a, c, g, or t
  misc_feature (2375)..(2375): n is a, c, g, or t
  misc_feature (2378)..(2378): n is a, c, g, or t
  misc_feature (2380)..(2381): n is a, c, g, or t
  misc_feature (2384)..(2385): n is a, c, g, or t
  misc_feature (2388)..(2388): n is a, c, g, or t
  misc_feature (2392)..(2392): n is a, c, g, or t
  misc_feature (2394)..(2394): n is a, c, g, or t
  misc_feature (2396)..(2401): n is a, c, g, or t
  misc_feature (2403)..(2404): n is a, c, g, or t
  misc_feature (2406)..(2407): n is a, c, g, or t
  misc_feature (2409)..(2418): n is a, c, g, or t
  misc_feature (2420)..(2422): n is a, c, g, or t
  misc_feature (2424)..(2425): n is a, c, g, or t
  misc_feature (2427)..(2429): n is a, c, g, or t
  misc_feature (2431)..(2432): n is a, c, g, or t
  misc_feature (2434)..(2436): n is a, c, g, or t
  misc_feature (2438)..(2438): n is a, c, g, or t
  misc_feature (2441)..(2443): n is a, c, g, or t
  misc_feature (2445)..(2446): n is a, c, g, or t
  misc_feature (2451)..(2454): n is a, c, g, or t
  misc_feature (2457)..(2457): n is a, c, g, or t
  misc_feature (2460)..(2460): n is a, c, g, or t
  misc_feature (2462)..(2465): n is a, c, g, or t
  misc_feature (2467)..(2469): n is a, c, g, or t
  misc_feature (2471)..(2472): n is a, c, g, or t
  misc_feature (2474)..(2477): n is a, c, g, or t
  misc_feature (2479)..(2481): n is a, c, g, or t
  misc_feature (2483)..(2491): n is a, c, g, or t
  misc_feature (2494)..(2494): n is a, c, g, or t
  misc_feature (2496)..(2496): n is a, c, g, or t
  misc_feature (2498)..(2498): n is a, c, g, or t
  misc_feature (2501)..(2502): n is a, c, g, or t
  misc_feature (2504)..(2514): n is a, c, g, or t
  misc_feature (2516)..(2518): n is a, c, g, or t
  misc_feature (2520)..(2520): n is a, c, g, or t
  misc_feature (2523)..(2524): n is a, c, g, or t
  misc_feature (2526)..(2526): n is a, c, g, or t
  misc_feature (2529)..(2529): n is a, c, g, or t
  misc_feature (2531)..(2535): n is a, c, g, or t
  misc_feature (2539)..(2541): n is a, c, g, or t
  misc_feature (2546)..(2546): n is a, c, g, or t
  misc_feature (2550)..(2552): n is a, c, g, or t
  misc_feature (2555)..(2556): n is a, c, g, or t
  misc_feature (2558)..(2558): n is a, c, g, or t
  misc_feature (2565)..(2565): n is a, c, g, or t
  misc_feature (2567)..(2567): n is a, c, g, or t
  misc_feature (2569)..(2571): n is a, c, g, or t
  misc_feature (2573)..(2575): n is a, c, g, or t
  misc_feature (2577)..(2577): n is a, c, g, or t
  misc_feature (2579)..(2579): n is a, c, g, or t
  misc_feature (2581)..(2581): n is a, c, g, or t
  misc_feature (2583)..(2584): n is a, c, g, or t
  misc_feature (2587)..(2592): n is a, c, g, or t
  misc_feature (2594)..(2594): n is a, c, g, or t
  misc_feature (2596)..(2600): n is a, c, g, or t
  misc_feature (2602)..(2604): n is a, c, g, or t
  misc_feature (2606)..(2606): n is a, c, g, or t
  misc_feature (2608)..(2611): n is a, c, g, or t
  misc_feature (2614)..(2614): n is a, c, g, or t
  misc_feature (2617)..(2619): n is a, c, g, or t
  misc_feature (2622)..(2622): n is a, c, g, or t
  misc_feature (2624)..(2625): n is a, c, g, or t
  misc_feature (2628)..(2628): n is a, c, g, or t
  misc_feature (2634)..(2634): n is a, c, g, or t
  misc_feature (2637)..(2641): n is a, c, g, or t
  misc_feature (2643)..(2645): n is a, c, g, or t
  misc_feature (2647)..(2648): n is a, c, g, or t
  misc_feature (2650)..(2650): n is a, c, g, or t
  misc_feature (2653)..(2655): n is a, c, g, or t
  misc_feature (2657)..(2657): n is a, c, g, or t
  misc_feature (2660)..(2662): n is a, c, g, or t
  misc_feature (2664)..(2664): n is a, c, g, or t
  misc_feature (2667)..(2674): n is a, c, g, or t
  misc_feature (2677)..(2677): n is a, c, g, or t
  misc_feature (2680)..(2680): n is a, c, g, or t
  misc_feature (2685)..(2688): n is a, c, g, or t
  misc_feature (2690)..(2695): n is a, c, g, or t
  misc_feature (2697)..(2702): n is a, c, g, or t
  misc_feature (2704)..(2707): n is a, c, g, or t
  misc_feature (2709)..(2714): n is a, c, g, or t
  misc_feature (2716)..(2719): n is a, c, g, or t
  misc_feature (2721)..(2721): n is a, c, g, or t
  misc_feature (2724)..(2729): n is a, c, g, or t
  misc_feature (2732)..(2734): n is a, c, g, or t
  misc_feature (2736)..(2740): n is a, c, g, or t
  misc_feature (2742)..(2745): n is a, c, g, or t
  misc_feature (2747)..(2749): n is a, c, g, or t
  misc_feature (2751)..(2755): n is a, c, g, or t
  misc_feature (2758)..(2758): n is a, c, g, or t
  misc_feature (2761)..(2764): n is a, c, g, or t
  misc_feature (2769)..(2779): n is a, c, g, or t
  misc_feature (2781)..(2781): n is a, c, g, or t
  misc_feature (2783)..(2788): n is a, c, g, or t
  misc_feature (2791)..(2794): n is a, c, g, or t
  misc_feature (2796)..(2798): n is a, c, g, or t
  misc_feature (2800)..(2803): n is a, c, g, or t
  misc_feature (2806)..(2806): n is a, c, g, or t
  misc_feature (2808)..(2819): n is a, c, g, or t
  misc_feature (2821)..(2821): n is a, c, g, or t
  misc_feature (2824)..(2826): n is a, c, g, or t
  misc_feature (2828)..(2837): n is a, c, g, or t
  misc_feature (2839)..(2840): n is a, c, g, or t
  misc_feature (2842)..(2861): n is a, c, g, or t
  misc_feature (2864)..(2864): n is a, c, g, or t
  misc_feature (2867)..(2869): n is a, c, g, or t
  misc_feature (2871)..(2876): n is a, c, g, or t
  misc_feature (2878)..(2880): n is a, c, g, or t
  misc_feature (2882)..(2887): n is a, c, g, or t
  misc_feature (2889)..(2891): n is a, c, g, or t
  misc_feature (2893)..(2893): n is a, c, g, or t
  misc_feature (2895)..(2897): n is a, c, g, or t
  misc_feature (2899)..(2901): n is a, c, g, or t
  misc_feature (2903)..(2903): n is a, c, g, or t
  misc_feature (2905)..(2905): n is a, c, g, or t
  misc_feature (2908)..(2916): n is a, c, g, or t
  misc_feature (2918)..(2922): n is a, c, g, or t
  misc_feature (2925)..(2928): n is a, c, g, or t
  misc_feature (2931)..(2931): n is a, c, g, or t
  misc_feature (2933)..(2934): n is a, c, g, or t
  misc_feature (2936)..(2937): n is a, c, g, or t
  misc_feature (2939)..(2939): n is a, c, g, or t
  misc_feature (2941)..(2941): n is a, c, g, or t
  misc_feature (2944)..(2951): n is a, c, g, or t
  misc_feature (2955)..(2959): n is a, c, g, or t
  misc_feature (2961)..(2961): n is a, c, g, or t
  misc_feature (2963)..(2963): n is a, c, g, or t
  misc_feature (2965)..(2965): n is a, c, g, or t
  misc_feature (2967)..(2973): n is a, c, g, or t
  misc_feature (2975)..(2979): n is a, c, g, or t
  misc_feature (2981)..(2981): n is a, c, g, or t
  misc_feature (2983)..(2984): n is a, c, g, or t
  misc_feature (2988)..(2988): n is a, c, g, or t
  misc_feature (2990)..(2992): n is a, c, g, or t
  misc_feature (2994)..(2995): n is a, c, g, or t
  misc_feature (2997)..(2999): n is a, c, g, or t
  misc_feature (3002)..(3002): n is a, c, g, or t
  misc_feature (3004)..(3009): n is a, c, g, or t
  misc_feature (3011)..(3017): n is a, c, g, or t
  misc_feature (3019)..(3022): n is a, c, g, or t
  misc_feature (3024)..(3027): n is a, c, g, or t
  misc_feature (3029)..(3029): n is a, c, g, or t
  misc_feature (3032)..(3033): n is a, c, g, or t
  misc_feature (3036)..(3038): n is a, c, g, or t
  misc_feature (3041)..(3044): n is a, c, g, or t
  misc_feature (3046)..(3047): n is a, c, g, or t
  misc_feature (3049)..(3049): n is a, c, g, or t
  misc_feature (3051)..(3055): n is a, c, g, or t
  misc_feature (3057)..(3059): n is a, c, g, or t
  misc_feature (3061)..(3062): n is a, c, g, or t
  misc_feature (3064)..(3066): n is a, c, g, or t
  misc_feature (3068)..(3073): n is a, c, g, or t
  misc_feature (3075)..(3076): n is a, c, g, or t
  misc_feature (3079)..(3082): n is a, c, g, or t
  misc_feature (3085)..(3085): n is a, c, g, or t
  misc_feature (3087)..(3092): n is a, c, g, or t
  misc_feature (3094)..(3095): n is a, c, g, or t
  misc_feature (3098)..(3101): n is a, c, g, or t
  misc_feature (3104)..(3110): n is a, c, g, or t
  misc_feature (3112)..(3115): n is a, c, g, or t
  misc_feature (3118)..(3118): n is a, c, g, or t
  misc_feature (3122)..(3122): n is a, c, g, or t
  misc_feature (3126)..(3126): n is a, c, g, or t
  misc_feature (3129)..(3130): n is a, c, g, or t
  misc_feature (3132)..(3134): n is a, c, g, or t
  misc_feature (3137)..(3138): n is a, c, g, or t
  misc_feature (3140)..(3141): n is a, c, g, or t
  misc_feature (3144)..(3145): n is a, c, g, or t
  misc_feature (3148)..(3148): n is a, c, g, or t
  misc_feature (3150)..(3150): n is a, c, g, or t
  misc_feature (3152)..(3155): n is a, c, g, or t
  misc_feature (3157)..(3158): n is a, c, g, or t
  misc_feature (3160)..(3160): n is a, c, g, or t
  misc_feature (3167)..(3167): n is a, c, g, or t
  misc_feature (3169)..(3173): n is a, c, g, or t
  misc_feature (3176)..(3176): n is a, c, g, or t
  misc_feature (3178)..(3183): n is a, c, g, or t
  misc_feature (3185)..(3191): n is a, c, g, or t
  misc_feature (3193)..(3193): n is a, c, g, or t
  misc_feature (3195)..(3196): n is a, c, g, or t
  misc_feature (3198)..(3201): n is a, c, g, or t
  misc_feature (3204)..(3205): n is a, c, g, or t
  misc_feature (3208)..(3214): n is a, c, g, or t
  misc_feature (3218)..(3224): n is a, c, g, or t
  misc_feature (3226)..(3228): n is a, c, g, or t
  misc_feature (3230)..(3231): n is a, c, g, or t
  misc_feature (3234)..(3234): n is a, c, g, or t
  misc_feature (3237)..(3237): n is a, c, g, or t
  misc_feature (3239)..(3242): n is a, c, g, or t
  misc_feature (3246)..(3248): n is a, c, g, or t
  misc_feature (3250)..(3254): n is a, c, g, or t
  misc_feature (3256)..(3256): n is a, c, g, or t
  misc_feature (3259)..(3260): n is a, c, g, or t
  misc_feature (3262)..(3262): n is a, c, g, or t
  misc_feature (3265)..(3266): n is a, c, g, or t
  misc_feature (3269)..(3270): n is a, c, g, or t
  misc_feature (3272)..(3273): n is a, c, g, or t
  misc_feature (3275)..(3275): n is a, c, g, or t
  misc_feature (3279)..(3280): n is a, c, g, or t
  misc_feature (3283)..(3285): n is a, c, g, or t
  misc_feature (3287)..(3288): n is a, c, g, or t
  misc_feature (3290)..(3290): n is a, c, g, or t
  misc_feature (3294)..(3297): n is a, c, g, or t
  misc_feature (3300)..(3300): n is a, c, g, or t
  misc_feature (3302)..(3304): n is a, c, g, or t
  misc_feature (3307)..(3308): n is a, c, g, or t
  misc_feature (3310)..(3310): n is a, c, g, or t
  misc_feature (3312)..(3312): n is a, c, g, or t
  misc_feature (3314)..(3316): n is a, c, g, or t
  misc_feature (3318)..(3318): n is a, c, g, or t
  misc_feature (3320)..(3324): n is a, c, g, or t
  misc_feature (3326)..(3326): n is a, c, g, or t
  misc_feature (3328)..(3330): n is a, c, g, or t
  misc_feature (3332)..(3338): n is a, c, g, or t
  misc_feature (3340)..(3343): n is a, c, g, or t
  misc_feature (3345)..(3345): n is a, c, g, or t
  misc_feature (3349)..(3360): n is a, c, g, or t
  misc_feature (3362)..(3364): n is a, c, g, or t
  misc_feature (3367)..(3367): n is a, c, g, or t
  misc_feature (3370)..(3371): n is a, c, g, or t
  misc_feature (3373)..(3374): n is a, c, g, or t
  misc_feature (3376)..(3377): n is a, c, g, or t
  misc_feature (3379)..(3380): n is a, c, g, or t
  misc_feature (3383)..(3392): n is a, c, g, or t
  misc_feature (3396)..(3399): n is a, c, g, or t
  misc_feature (3401)..(3401): n is a, c, g, or t
  misc_feature (3403)..(3403): n is a, c, g, or t
  misc_feature (3405)..(3406): n is a, c, g, or t
  misc_feature (3408)..(3410): n is a, c, g, or t
  misc_feature (3413)..(3415): n is a, c, g, or t
  misc_feature (3418)..(3423): n is a, c, g, or t
  misc_feature (3425)..(3427): n is a, c, g, or t
  misc_feature (3432)..(3435): n is a, c, g, or t
  misc_feature (3437)..(3447): n is a, c, g, or t
  misc_feature (3449)..(3451): n is a, c, g, or t
  misc_feature (3453)..(3456): n is a, c, g, or t
  misc_feature (3461)..(3465): n is a, c, g, or t
  misc_feature (3467)..(3469): n is a, c, g, or t
  misc_feature (3471)..(3471): n is a, c, g, or t
  misc_feature (3473)..(3475): n is a, c, g, or t
  misc_feature (3480)..(3484): n is a, c, g, or t
  misc_feature (3486)..(3490): n is a, c, g, or t
  misc_feature (3492)..(3495): n is a, c, g, or t
  misc_feature (3497)..(3498): n is a, c, g, or t
  misc_feature (3500)..(3503): n is a, c, g, or t
  misc_feature (3505)..(3505): n is a, c, g, or t
  misc_feature (3508)..(3508): n is a, c, g, or t
  misc_feature (3510)..(3510): n is a, c, g, or t
  misc_feature (3513)..(3514): n is a, c, g, or t
  misc_feature (3522)..(3522): n is a, c, g, or t
  misc_feature (3525)..(3527): n is a, c, g, or t
  misc_feature (3530)..(3531): n is a, c, g, or t
  misc_feature (3534)..(3534): n is a, c, g, or t
  misc_feature (3536)..(3536): n is a, c, g, or t
  misc_feature (3539)..(3539): n is a, c, g, or t
  misc_feature (3542)..(3543): n is a, c, g, or t
  misc_feature (3545)..(3545): n is a, c, g, or t
  misc_feature (3547)..(3547): n is a, c, g, or t
  misc_feature (3549)..(3549): n is a, c, g, or t
  misc_feature (3551)..(3557): n is a, c, g, or t
  misc_feature (3559)..(3559): n is a, c, g, or t
  misc_feature (3561)..(3563): n is a, c, g, or t
  misc_feature (3565)..(3567): n is a, c, g, or t
  misc_feature (3569)..(3572): n is a, c, g, or t
  misc_feature (3574)..(3581): n is a, c, g, or t
  misc_feature (3583)..(3585): n is a, c, g, or t
  misc_feature (3587)..(3591): n is a, c, g, or t
  misc_feature (3594)..(3594): n is a, c, g, or t
  misc_feature (3596)..(3596): n is a, c, g, or t
  misc_feature (3598)..(3598): n is a, c, g, or t
  misc_feature (3601)..(3603): n is a, c, g, or t
  misc_feature (3605)..(3607): n is a, c, g, or t
  misc_feature (3609)..(3612): n is a, c, g, or t
  misc_feature (3614)..(3621): n is a, c, g, or t
  misc_feature (3623)..(3624): n is a, c, g, or t
  misc_feature (3626)..(3628): n is a, c, g, or t
  misc_feature (3631)..(3636): n is a, c, g, or t
  misc_feature (3639)..(3640): n is a, c, g, or t
  misc_feature (3642)..(3642): n is a, c, g, or t
  misc_feature (3646)..(3646): n is a, c, g, or t
  misc_feature (3648)..(3649): n is a, c, g, or t
  misc_feature (3651)..(3651): n is a, c, g, or t
  misc_feature (3654)..(3656): n is a, c, g, or t
  misc_feature (3658)..(3658): n is a, c, g, or t
  misc_feature (3660)..(3661): n is a, c, g, or t
  misc_feature (3663)..(3669): n is a, c, g, or t
  misc_feature (3671)..(3671): n is a, c, g, or t
  misc_feature (3673)..(3679): n is a, c, g, or t
  misc_feature (3681)..(3683): n is a, c, g, or t
  misc_feature (3686)..(3689): n is a, c, g, or t
  misc_feature (3691)..(3691): n is a, c, g, or t
  misc_feature (3693)..(3693): n is a, c, g, or t
  misc_feature (3695)..(3695): n is a, c, g, or t
  misc_feature (3697)..(3701): n is a, c, g, or t
  misc_feature (3703)..(3703): n is a, c, g, or t
  misc_feature (3706)..(3706): n is a, c, g, or t
  misc_feature (3708)..(3714): n is a, c, g, or t
  misc_feature (3716)..(3722): n is a, c, g, or t
  misc_feature (3724)..(3728): n is a, c, g, or t
  misc_feature (3730)..(3730): n is a, c, g, or t
  misc_feature (3732)..(3735): n is a, c, g, or t
  misc_feature (3738)..(3744): n is a, c, g, or t
  misc_feature (3748)..(3752): n is a, c, g, or t
  misc_feature (3754)..(3754): n is a, c, g, or t
  misc_feature (3756)..(3759): n is a, c, g, or t
  misc_feature (3761)..(3763): n is a, c, g, or t
  misc_feature (3765)..(3765): n is a, c, g, or t
  misc_feature (3767)..(3771): n is a, c, g, or t
  misc_feature (3773)..(3775): n is a, c, g, or t
  misc_feature (3777)..(3778): n is a, c, g, or t
  misc_feature (3780)..(3785): n is a, c, g, or t
  misc_feature (3787)..(3787): n is a, c, g, or t
  misc_feature (3789)..(3790): n is a, c, g, or t
  misc_feature (3792)..(3792): n is a, c, g, or t
  misc_feature (3794)..(3795): n is a, c, g, or t
  misc_feature (3797)..(3798): n is a, c, g, or t
  misc_feature (3801)..(3801): n is a, c, g, or t
  misc_feature (3803)..(3803): n is a, c, g, or t
  misc_feature (3806)..(3807): n is a, c, g, or t
  misc_feature (3810)..(3815): n is a, c, g, or t
  misc_feature (3817)..(3817): n is a, c, g, or t
  misc_feature (3819)..(3824): n is a, c, g, or t
  misc_feature (3827)..(3827): n is a, c, g, or t
  misc_feature (3829)..(3829): n is a, c, g, or t
  misc_feature (3831)..(3831): n is a, c, g, or t
  misc_feature (3833)..(3840): n is a, c, g, or t
  misc_feature (3842)..(3845): n is a, c, g, or t
  misc_feature (3847)..(3847): n is a, c, g, or t
  misc_feature (3849)..(3851): n is a, c, g, or t
  misc_feature (3854)..(3854): n is a, c, g, or t
  misc_feature (3856)..(3859): n is a, c, g, or t
  misc_feature (3861)..(3863): n is a, c, g, or t
  misc_feature (3865)..(3869): n is a, c, g, or t
  misc_feature (3872)..(3880): n is a, c, g, or t
  misc_feature (3883)..(3883): n is a, c, g, or t
  misc_feature (3885)..(3886): n is a, c, g, or t
  misc_feature (3888)..(3895): n is a, c, g, or t
  misc_feature (3897)..(3899): n is a, c, g, or t
  misc_feature (3901)..(3903): n is a, c, g, or t
  misc_feature (3905)..(3908): n is a, c, g, or t
  misc_feature (3910)..(3914): n is a, c, g, or t
  misc_feature (3916)..(3917): n is a, c, g, or t
  misc_feature (3919)..(3919): n is a, c, g, or t
  misc_feature (3921)..(3925): n is a, c, g, or t
  misc_feature (3927)..(3932): n is a, c, g, or t
  misc_feature (3934)..(3934): n is a, c, g, or t
  misc_feature (3936)..(3947): n is a, c, g, or t
  misc_feature (3949)..(3950): n is a, c, g, or t
  misc_feature (3952)..(3957): n is a, c, g, or t
  misc_feature (3959)..(3962): n is a, c, g, or t
  misc_feature (3964)..(3964): n is a, c, g, or t
  misc_feature (3966)..(3968): n is a, c, g, or t
  misc_feature (3971)..(3972): n is a, c, g, or t
  misc_feature (3974)..(3974): n is a, c, g, or t
  misc_feature (3978)..(3985): n is a, c, g, or t
  misc_feature (3989)..(3995): n is a, c, g, or t
  misc_feature (3998)..(4000): n is a, c, g, or t
atgtgtaatatatgtaataattaatatttattaaatatatcaaagatatttttttatattaataattctgttattttaataatttataattgttaaataggttttaattatataaatattgttaaatataatcaattattaattattataatattttgaaatatatgtatatttaatttattattttgttttattaatgtgaaaaaaataattattttaaaactaaaagtttggaataaattttataatattaatgataagagtagtttaattttctatattaattgttgaacatattcatacttttttttattagtattaaattataattattttttttattccatgttttattccataatacaaatctaacatataaaagaaaagaaatataccattcttcttataaaatgaagatttgttggccttgaatcaatttcagtcatttttactttttactaatgttctgtattaatttaatgggttgttattttttatagtcgaaaattaatattaaattatattcctcgataaaattttatttttaaatgtaatagataaattaatattatgtatttctcaaaattgttttatctttttttttatattgaaaaaattttcaaaaatttatatattgatattgatattgttataaataatagctgtaaaaaattaaattaaaagtgttaataaaatgtgattaggatgaagatatattaatataattttctttttaataattaaattttatatatacatctcttttttcataattggtatatatatataatatttctttttttttaaaannaanaaaaaaaaaaaaaanaaaaaanaaaaaanaattaaaattttgaaagaatgtaatattattaatattaactataaaaaaatatggttttctaaattgtatttaaattaattaattaattattgctcttaaataacaggttaaatcataatttaaattcaaatttaaaaattcaaaaacgtttttaattatgaaatattattttactctattatttaaaattataataataatttaaatttctttttacttatcgagtattaaaaccatgattttaaaattgattaataagaattaaaattttgattgaaaaataaaataaaaaattaaaaaaattttatatccattacagtatgaaagataatgattattggtagtcattaataatgatttttggttttataataattaaatatttatgaaattgaattattatattcattatactttattatttatataaaagtatggataattattagaataattattaaactttttataataatttttttttaaaaaattaagataaatttttctaaatgaaattagtattatcagtatataattaacaattatatatatatatgcatttatatattacatatttgaaattgcatattaacatttatacattgttaacggttatacaatttcttttattatttctttgcagagtttatagatgtaattagttaatctcaataaataatcataaactattattacaatattcatatttattaataaatttttaaatatatatataattatataaataatatttttatgataaaaagtaaaatgtatcattaatattttttttttaaaaaactttattctattaaattataattatatatatataattatatttattaatatttatataatgataattagtataattactatcctattattgaaataatattaattttattattactattatataataaaaatttatagcattattttgtaaaccaaaggtaaacataatttctaattattaatttcattttaaaaattatttattaattaaaagatttattttatgttattaggtatcattgtaattgattttattattataatatttattataattgttataattatttaattattattacttttttataatatttttttataaaaaaaaaaaaaaaanaatattnaaaatanataagtttattattttattaaaacatatatttatttaaactttaatgaaattaacaaactataatttactattatattatatataaaatatataatatatattattatgtaaaaaaacctatattgcaaagtattgtaaaagataaacataattaaaaaattaaataagtatttatttaaatattttaaatgtttattttttttttcttttttttttttttttttttttttttttttttttttttttttttttttttttttttttttttttttttttttntttttttttttttttttttttttttttttttttttnnnantttntnntnnaannnnntttntnnnntantgnnnnnnannnnannnnnnnnnnntnttntnnttnnttntttntntnnnnnnannanntnnnnnnnnnnannntnntnnntnnannntntannnannttaannnntantanannnnannntnnannnntnnnannnnnnnnntanangnaannannnnnnnnnnnannnanaanntntanannnnntaannnttatnatannnaannanaaaaatntntnnntnnntntntnanngtnnnnnntntnnnnntnnntnannnnttntannntangnnaantttatnatnnnnnannnannanatnnntnttnnntnttnnnnnnnntgntgntgttnnnntnnnnnntnnnnnntnnnntnnnnnnannnnancannnnnnaannntnnnnnannnntnnnannnnnatnaannnnatgannnnnnnnnnnantnnnnnnatnnnnannnannnntanannnnnnnnnnnnanttnnntnnnnnnnnnnannannnnnnnnnnnnnnnnnnnnacnatnnntnnnnnnannntnnnnnnannntntnnntnnnananttnnnnnnnnntnnnnntcnnnnatngnntnntntngannnnnnnnaatnnnnntntnanannnnnnnannnnntntnnattnannnanntnnnatncnnnnnntnnnnnnntnnnntnnnntnganntgnnnaannnnanntntnnnnntnnntnntnnnannnnnntnnatnnnnatntnnnnnncnntannnnaannnnnnntnnnntgnattnggtnaanngnnnttnntnnttnntantntnnnnannanttatatnannnnnttnannnnnntnnnnnnnananntnnnnatnnaannnnnnnaaannnnnnnannnannatnaanannnntatnnntnnnnnantanntntannttnntnntnattnntannntnnantaannnnatnannnatnnananannnanannnnnanannntnnnnnnntnnnntnaatnnnnnnnnnnnnannnttnttnnannanntnnatnnnnnnnnnnattnnnntnantnnannnttnnntannnnnntnnntaatnnnntnnnnnnnnnnnannntnnnnttcannnnntnnntnannnatgcnnnnntnnnnngnnnnanntnnnntncantnttnnctaatatnttnnnagnnttntnttntannantnantnnnnnnntnannnannngnnnntnnnnnnnntnnntnnnnnttnantnttnnntnnnannnntnnnnnnnngnntnnnatnnnnnnttnnanatangnntnacnnnananngnnnnnnntntnnnnnnntnnnatnnnnantntnannnnnantantnnnnnnnannnnnnntnnnnnanannnntannnnnnnagannnnntnannnntnnncntnnnnnannnanncnnnnnnantnntnanntnnttnanatnncannnnnnancnnnnnnagntntnannnnnnnntnnnncntnnncantnnnnannnannnnnaannnnnnnnnaantnntnnnnnnnncnnnannnannnntnnnnntnntnannnnngnnnnnnanannnnnnnnnnnnanntnnnnnnannnntnannnaannantagnnnnnnnngtannnnnnnatnnn

SEQ ID NO: 328 - DNA, 4000 bp, Escherichia coli
  misc_feature (1)..(3): n is a, c, g, or t
  misc_feature (5)..(10): n is a, c, g, or t
  misc_feature (14)..(15): n is a, c, g, or t
  misc_feature (17)..(17): n is a, c, g, or t
  misc_feature (19)..(19): n is a, c, g, or t
  misc_feature (23)..(28): n is a, c, g, or t
  misc_feature (30)..(32): n is a, c, g, or t
  misc_feature (34)..(34): n is a, c, g, or t
  misc_feature (36)..(36): n is a, c, g, or t
  misc_feature (39)..(48): n is a, c, g, or t
  misc_feature (50)..(55): n is a, c, g, or t
  misc_feature (57)..(59): n is a, c, g, or t
  misc_feature (63)..(64): n is a, c, g, or t
  misc_feature (66)..(67): n is a, c, g, or t
  misc_feature (70)..(73): n is a, c, g, or t
  misc_feature (75)..(77): n is a, c, g, or t
  misc_feature (79)..(79): n is a, c, g, or t
  misc_feature (83)..(87): n is a, c, g, or t
  misc_feature (89)..(89): n is a, c, g, or t
  misc_feature (91)..(98): n is a, c, g, or t
  misc_feature (100)..(103): n is a, c, g, or t
  misc_feature (105)..(110): n is a, c, g, or t
  misc_feature (112)..(120): n is a, c, g, or t
  misc_feature (124)..(127): n is a, c, g, or t
  misc_feature (129)..(134): n is a, c, g, or t
  misc_feature (137)..(139): n is a, c, g, or t
  misc_feature (141)..(143): n is a, c, g, or t
  misc_feature (149)..(149): n is a, c, g, or t
  misc_feature (151)..(158): n is a, c, g, or t
  misc_feature (160)..(162): n is a, c, g, or t
  misc_feature (165)..(166): n is a, c, g, or t
  misc_feature (168)..(173): n is a, c, g, or t
  misc_feature (178)..(181): n is a, c, g, or t
  misc_feature (185)..(195): n is a, c, g, or t
  misc_feature (198)..(200): n is a, c, g, or t
  misc_feature (202)..(203): n is a, c, g, or t
  misc_feature (208)..(210): n is a, c, g, or t
  misc_feature (212)..(220): n is a, c, g, or t
  misc_feature (223)..(225): n is a, c, g, or t
  misc_feature (228)..(231): n is a, c, g, or t
  misc_feature (234)..(243): n is a, c, g, or t
  misc_feature (245)..(251): n is a, c, g, or t
  misc_feature (253)..(253): n is a, c, g, or t
  misc_feature (255)..(255): n is a, c, g, or t
  misc_feature (261)..(262): n is a, c, g, or t
  misc_feature (264)..(269): n is a, c, g, or t
  misc_feature (271)..(272): n is a, c, g, or t
  misc_feature (274)..(274): n is a, c, g, or t
  misc_feature (277)..(280): n is a, c, g, or t
  misc_feature (282)..(282): n is a, c, g, or t
  misc_feature (285)..(286): n is a, c, g, or t
  misc_feature (288)..(288): n is a, c, g, or t
  misc_feature (290)..(290): n is a, c, g, or t
  misc_feature (292)..(293): n is a, c, g, or t
  misc_feature (295)..(298): n is a, c, g, or t
  misc_feature (300)..(301): n is a, c, g, or t
  misc_feature (304)..(307): n is a, c, g, or t
  misc_feature (309)..(309): n is a, c, g, or t
  misc_feature (311)..(311): n is a, c, g, or t
  misc_feature (313)..(315): n is a, c, g, or t
  misc_feature (317)..(323): n is a, c, g, or t
  misc_feature (326)..(332): n is a, c, g, or t
  misc_feature (336)..(341): n is a, c, g, or t
  misc_feature (343)..(344): n is a, c, g, or t
  misc_feature (346)..(351): n is a, c, g, or t
  misc_feature (353)..(357): n is a, c, g, or t
  misc_feature (359)..(360): n is a, c, g, or t
  misc_feature (364)..(366): n is a, c, g, or t
  misc_feature (368)..(369): n is a, c, g, or t
  misc_feature (371)..(371): n is a, c, g, or t
  misc_feature (373)..(373): n is a, c, g, or t
  misc_feature (375)..(375): n is a, c, g, or t
  misc_feature (379)..(382): n is a, c, g, or t
  misc_feature (384)..(386): n is a, c, g, or t
  misc_feature (388)..(388): n is a, c, g, or t
  misc_feature (392)..(392): n is a, c, g, or t
  misc_feature (395)..(398): n is a, c, g, or t
  misc_feature (400)..(400): n is a, c, g, or t
  misc_feature (402)..(407): n is a, c, g, or t
  misc_feature (409)..(409): n is a, c, g, or t
  misc_feature (411)..(411): n is a, c, g, or t
  misc_feature (413)..(413): n is a, c, g, or t
  misc_feature (419)..(420): n is a, c, g, or t
  misc_feature (422)..(427): n is a, c, g, or t
  misc_feature (430)..(431): n is a, c, g, or t
  misc_feature (433)..(434): n is a, c, g, or t
  misc_feature (437)..(439): n is a, c, g, or t
  misc_feature (441)..(445): n is a, c, g, or t
  misc_feature (448)..(448): n is a, c, g, or t
  misc_feature (451)..(451): n is a, c, g, or t
  misc_feature (590)..(590): n is a, c, g, or t
  misc_feature (593)..(593): n is a, c, g, or t
  misc_feature (677)..(677): n is a, c, g, or t
  misc_feature (692)..(692): n is a, c, g, or t
  misc_feature (701)..(701): n is a, c, g, or t
  misc_feature (725)..(725): n is a, c, g, or t
  misc_feature (813)..(813): n is a, c, g, or t
  misc_feature (898)..(898): n is a, c, g, or t
  misc_feature (1295)..(1295): n is a, c, g, or t
  misc_feature (1451)..(1451): n is a, c, g, or t
  misc_feature (1991)..(1991): n is a, c, g, or t
  misc_feature (2051)..(2051): n is a, c, g, or t
  misc_feature (2057)..(2057): n is a, c, g, or t
  misc_feature (2234)..(2234): n is a, c, g, or t
  misc_feature (2366)..(2366): n is a, c, g, or t
  misc_feature (2494)..(2494): n is a, c, g, or t
  misc_feature (2496)..(2496): n is a, c, g, or t
  misc_feature (2540)..(2540): n is a, c, g, or t
  misc_feature (2566)..(2567): n is a, c, g, or t
  misc_feature (2572)..(2572): n is a, c, g, or t
  misc_feature (2576)..(2576): n is a, c, g, or t
  misc_feature (2597)..(2597): n is a, c, g, or t
  misc_feature (3040)..(3041): n is a, c, g, or t
  misc_feature (3131)..(3131): n is a, c, g, or t
  misc_feature (3184)..(3184): n is a, c, g, or t
  misc_feature (3268)..(3268): n is a, c, g, or t
  misc_feature (3272)..(3272): n is a, c, g, or t
  misc_feature (3352)..(3354): n is a, c, g, or t
  misc_feature (3356)..(3357): n is a, c, g, or t
  misc_feature (3360)..(3360): n is a, c, g, or t
  misc_feature (3362)..(3364): n is a, c, g, or t
  misc_feature (3366)..(3380): n is a, c, g, or t
  misc_feature (3383)..(3383): n is a, c, g, or t
  misc_feature (3385)..(3385): n is a, c, g, or t
  misc_feature (3388)..(3397): n is a, c, g, or t
  misc_feature (3399)..(3401): n is a, c, g, or t
  misc_feature (3403)..(3405): n is a, c, g, or t
  misc_feature (3407)..(3407): n is a, c, g, or t
  misc_feature (3413)..(3414): n is a, c, g, or t
  misc_feature (3417)..(3418): n is a, c, g, or t
  misc_feature (3421)..(3421): n is a, c, g, or t
  misc_feature (3428)..(3428): n is a, c, g, or t
  misc_feature (3432)..(3434): n is a, c, g, or t
  misc_feature (3439)..(3439): n is a, c, g, or t
  misc_feature (3444)..(3445): n is a, c, g, or t
  misc_feature (3447)..(3447): n is a, c, g, or t
  misc_feature (3451)..(3452): n is a, c, g, or t
  misc_feature (3455)..(3455): n is a, c, g, or t
  misc_feature (3458)..(3462): n is a, c, g, or t
  misc_feature (3467)..(3468): n is a, c, g, or t
  misc_feature (3473)..(3473): n is a, c, g, or t
  misc_feature (3481)..(3483): n is a, c, g, or t
  misc_feature (3488)..(3488): n is a, c, g, or t
  misc_feature (3490)..(3493): n is a, c, g, or t
  misc_feature (3497)..(3498): n is a, c, g, or t
  misc_feature (3502)..(3502): n is a, c, g, or t
  misc_feature (3505)..(3505): n is a, c, g, or t
  misc_feature (3507)..(3507): n is a, c, g, or t
  misc_feature (3509)..(3510): n is a, c, g, or t
  misc_feature (3512)..(3514): n is a, c, g, or t
  misc_feature (3516)..(3516): n is a, c, g, or t
  misc_feature (3520)..(3520): n is a, c, g, or t
  misc_feature (3522)..(3522): n is a, c, g, or t
  misc_feature (3524)..(3524): n is a, c, g, or t
  misc_feature (3526)..(3526): n is a, c, g, or t
  misc_feature (3534)..(3534): n is a, c, g, or t
  misc_feature (3536)..(3536): n is a, c, g, or t
  misc_feature (3539)..(3539): n is a, c, g, or t
  misc_feature (3542)..(3543): n is a, c, g, or t
  misc_feature (3549)..(3549): n is a, c, g, or t
  misc_feature (3551)..(3568): n is a, c, g, or t
  misc_feature (3570)..(3570): n is a, c, g, or t
  misc_feature (3572)..(3575): n is a, c, g, or t
  misc_feature (3577)..(3580): n is a, c, g, or t
  misc_feature (3583)..(3586): n is a, c, g, or t
  misc_feature (3588)..(3592): n is a, c, g, or t
  misc_feature (3594)..(3608): n is a, c, g, or t
  misc_feature (3610)..(3617): n is a, c, g, or t
  misc_feature (3619)..(3626): n is a, c, g, or t
  misc_feature (3628)..(3634): n is a, c, g, or t
  misc_feature (3641)..(3641): n is a, c, g, or t
  misc_feature (3643)..(3646): n is a, c, g, or t
  misc_feature (3648)..(3650): n is a, c, g, or t
  misc_feature (3652)..(3655): n is a, c, g, or t
  misc_feature (3657)..(3659): n is a, c, g, or t
  misc_feature (3661)..(3662): n is a, c, g, or t
  misc_feature (3664)..(3673): n is a, c, g, or t
  misc_feature (3675)..(3680): n is a, c, g, or t
  misc_feature (3682)..(3684): n is a, c, g, or t
  misc_feature (3686)..(3686): n is a, c, g, or t
  misc_feature (3688)..(3693): n is a, c, g, or t
  misc_feature (3695)..(3695): n is a, c, g, or t
  misc_feature (3697)..(3698): n is a, c, g, or t
  misc_feature (3700)..(3706): n is a, c, g, or t
  misc_feature (3708)..(3709): n is a, c, g, or t
  misc_feature (3711)..(3713): n is a, c, g, or t
  misc_feature (3715)..(3734): n is a, c, g, or t
  misc_feature (3736)..(3737): n is a, c, g, or t
  misc_feature (3739)..(3743): n is a, c, g, or t
  misc_feature (3745)..(3747): n is a, c, g, or t
  misc_feature (3749)..(3767): n is a, c, g, or t
  misc_feature (3769)..(3769): n is a, c, g, or t
  misc_feature (3772)..(3781): n is a, c, g, or t
  misc_feature (3783)..(3789): n is a, c, g, or t
  misc_feature (3791)..(3803): n is a, c, g, or t
  misc_feature (3806)..(3806): n is a, c, g, or t
  misc_feature (3808)..(3809): n is a, c, g, or t
  misc_feature (3811)..(3815): n is a, c, g, or t
  misc_feature (3817)..(3823): n is a, c, g, or t
  misc_feature (3827)..(3839): n is a, c, g, or t
  misc_feature (3841)..(3843): n is a, c, g, or t
  misc_feature (3846)..(3846): n is a, c, g, or t
  misc_feature (3849)..(3853): n is a, c, g, or t
  misc_feature (3856)..(3860): n is a, c, g, or t
  misc_feature (3862)..(3874): n is a, c, g, or t
  misc_feature (3876)..(3880): n is a, c, g, or t
  misc_feature (3883)..(3890): n is a, c, g, or t
  misc_feature (3892)..(3894): n is a, c, g, or t
  misc_feature (3896)..(3896): n is a, c, g, or t
  misc_feature (3898)..(3898): n is a, c, g, or t
  misc_feature (3902)..(3919): n is a, c, g, or t
  misc_feature (3921)..(3923): n is a, c, g, or t
  misc_feature (3925)..(3926): n is a, c, g, or t
  misc_feature (3929)..(3929): n is a, c, g, or t
  misc_feature (3931)..(3931): n is a, c, g, or t
  misc_feature (3933)..(3938): n is a, c, g, or t
  misc_feature (3940)..(3940): n is a, c, g, or t
  misc_feature (3942)..(3950): n is a, c, g, or t
  misc_feature (3952)..(3952): n is a, c, g, or t
  misc_feature (3954)..(3956): n is a, c, g, or t
  misc_feature (3960)..(3962): n is a, c, g, or t
  misc_feature (3964)..(3978): n is a, c, g, or t
  misc_feature (3980)..(3986): n is a, c, g, or t
  misc_feature (3989)..(3989): n is a, c, g, or t
  misc_feature (3991)..(3994): n is a, c, g, or t
  misc_feature (3998)..(4000): n is a, c, g, or t
nnncnnnnnncccnncncncacnnnnnncnnncncncgnnnnnnnnnncnnnnnncnnnctanntnngtnnnngnnngngggnnnnngnannnnnnnngnnnngnnnnnncnnnnnnnnnagcnnnncnnnnnngtnnntnnntttttntnnnnnnnntnnncgnncnnnnnnttgtnnnnactnnnnnnnnnnnttnnntnnacacnnncnnnnnnnnncgnnnatnnnntgnnnnnnnnnngnnnnnnngngngggcgnngnnnnnntnncncgnnnngngcnncncncnngnnnncnncgnnnngngngnnnannnnnnnggnnnnnnncccnnnnnngnngnnnnnnannnnngnngcgnnnanngngngngggnnnncnnngngggnggnnnngncnnnnnngngngnttcttnncnnnnnntcnnanntcnnntnnnnnccncgngtgaagaggcaattagactgaaccgacgccgcgtttcgtttacgtttacaggaaattcatcgtgggctccgccgagctgtcggtgcccctcgcgcccgaccagttcgacgggtacgtgttcttcgacatcggcagtganctnaagagcgggtcgcaggtgctcggggacccggcgctggcgaggggtaagcccggccagggctacgggtacggcgccggcatcgcnatgcacacgccggtnggaccgatncggttcgaatacgcgttttcgganaagggcgccggtcgcatgcactgcgggcttgcgaggtcgttctaactgaaccttttaataacttaagagtactcgtaagtggttccgntcgtcgacagacagactcgctcgcgatgatcatatcatattgcgtcaatttgcaattaaaaatactggtacacgacggcggggtncgatatcccatccacgagcgctattcgcccgagacgtgaatcaccaccccaccgtctctccacctctcctctaggttattactcttacttgcgcccgcgcgtcggggcatccgggttcttcaagtcgaacatatcctcgagcgcgtgcatgttgacgagcgtttgggacacctgcgccggatccgtcccgtcggatcgaagcgcctgcatgggcccgtgcaggagcttgttcacgatcccgcggctcagctcctccaccgccttcatctgcttcttggtgagcccgtcgccgagcttgcccatcgccttctcgagctccgtcgcgcggatggtctcagccttaccgcgcagccgcttaatcgtgggcaccgtctccaacgagtccctccacgcctcnaagccagcctgctcctgcgcgagcagctcccgggcctcgtcagccgcgcgctcacgcgcctccttgttcgcctccaccagctccttcaggtcgtcgacgttgtacgcgatcgtgttggcgtcgtcgccgcaatccgcgtcgacgttgcgtggcacngcgatgtccaccagcctgcgcttcccgtcgacgcacgccgacgccacgggcatggacgcgaggtcatctttggtgacgatgacgccggtggacgccgcggtgaagatgacgtcgtgctcggcggcgaggggcaggaactcatccatcagcgccagcttgatgttcgcctcggggaaatccgccgcgagttcctcgacccgtccggcgcttctgttcacgatggtcatctcggtgcaccgcttggacacgaggtgcttgacgaggaggcgggacatcgtacccgcgcccacgatcatcacccggcacccgtcgaaggagttggacgggagcttcatctgcaccagctcggcggcggcggaggacacggaaacggcgcccgacgcgatggaagtctccgatcgcacgcgcttaccagcggtgatcgcagccttgaagaggccggagaggtgccgcccgaacccttccacgttctcgcccagcgcgaagacgttcttaacctgcgccaggatctggccctcgcccatgaccaccgagtctagncctccggaaaccttgagaaggtgcgaggtggcgtcttggtcccggagcagaaagaggtgntcgcgnagttcgtcgagcgggatgccgctgtactggctcatccactcctccacctcgcgcacgccgcggtgccagctcagggccaccacgtagatctccatgcggttgcacgtggagaggataccagcctcctcgacgtgcgggaaggacgtcagctgtttgatggcatcctcccacttgtcntcgggcaccgccatcttctcgcgcacctcgacggggcacgtgtggatggacagaccgatggacacgatcgaggacttggcctcggatgcgtagcctgcggattggggtaatgaagggtggatgtcggtgagngtgaagtggatagatatgggcggcgagtgccgggtgagggggaaaaaatatacggagtttgccacggtggcaccgggcgatacgcatgccgaaagtggcgtcgcacggcgcgttctcgcgggttccgngncgtcgcgacggtggaaaccacccgtggacgttcgcgacgtgctnaaacccggttcgaaacggtcgcgcgnncttcntgangcgcgtcaccgggtggtattnggggcggtcaggaaatgaaacttacgggaagcgccgcccatgctgcggaactgctcgagcgccttgctgctgtcgaccgcagccgcggagacgggccggagggtggtgtccggacgagcgttgtcgtgcgtcgtcggcggggtcaccacggccctggtcaccgtgttgcgcgcggtgcggaaggtcgcgcgcctcgcgccggcgcactttccgccggtggcgaaggcgctggatttcgccgaggatcgcttaggttccatcgcgcggacgcgaccggaaagcgccatcgcgggcgcggcgacggagtgagcgcccatcgctgagtcgttgaactaagccgcggtgttgttgcggaaacgcgccggactgttagaaccggtgcggtgcgtcgggacgcgtcacgggacgtgcgcgagctcgacggcgtgaacgggaatggttgnngattaccgatagcgaggacgtaaacgagcatgtaaagcgagatcctcggccaatcaggaggcgtgaaattggagatccacgatcgagcanttcaagaatctactcgaccaaatcttgctaaatcacatttttcaagactggtnttcatacgttccgaggtattttttgaccccgaaatcggatgcgtgtccacccgggaaaggagaataaacgccagtgtcatctgnttcngagcttcccgcatcaccagtttgacgcaccgaatcgcgggaagatatttttgagagagttcccaaaaagcagattcattnnnannggnannngnnnnnnnnnnnnnnnccngnccnnnnnnnnnngnnncnnnanaaaccnnacnnggnggaaccnattnnnggttnggccnngngggnnccnggnnnnnggggnnggttnggggtttnnnatttnannnnaaannaaanggncncnnannntnaaanantntntgtttttntnttnttnnaaaccncnnnnnnnnnnnnnnnnnncncnnnncnnnncannnnannnnnannnnnnnnnnnnnnngnnnnnnnncnnnnnnnncnnnnnnnccccccngnnnnannncnnnnannncnngnnnnnnnnnnannnnnncnnncncnnnnnncncnncnnnnnnncnncnnncnnnnnnnnnnnnnnnnnnnncnngnnnnngnnngnnnnnnnnnnnnnnnnnnncnccnnnnnnnnnnannnnnnnannnnnnnnnnnnngananngnnnnngnnnnnnncccnnnnnnnnnnnnncnnnagnccnnnnnccnnnnncnnnnnnnnnnnnncnnnnnccnnnnnnnngnnncncngggnnnnnnnnnnnnnnnnnngnnncnnggncncnnnnnngnannnnnnnnngngnnngggnnngnnnnnnnnnnnnnnngnnnnnnnttngnnnntttnnn

SEQ ID NO: 329 - DNA, 4000 bp, Escherichia coli
  misc_feature (1990)..(1990): n is a, c, g, or t
gaaaccaccacaccgcccacagtcacgggtgtcagacgtgcaacgggcgataatgcgcctgtgcgccccacctgaatgtcgatgccggccaatgtggtccatgccagttctgcggggaatttatgcgcaatcgcccaacgtggcgtggtagcgcggaaccccaaacgcgattgcagcgccaagtcattgactttgtagaccacaccatcaatgtcatagcccaacgtggcacgctgttcctcgatcatgcgatagtggtctaacagatcctcaaccctgtcacacagtcgggtcaacggattggttttgaaccccatttccgccaaccgttcaatcgcgcccatttgcgtatccgccaagggctgtgacaattccccccaagaataggcgaaaaaacacaaggggcgatccgccgttatcgcagcatccaactggcgcaacgatcctgctgccgcatttcgggggttggcaaacaccttgcctccgcggctggtgtggcgtgcatttagatcggcgaaatcacgatgcgacatgtacacttcgccgcgcacctctaggacatcgggggcgttttcgatggtatggggaatatcggcaatcgtgcgtgcgttggcggtgacgttttcgcccacctgaccatcgccacgcgttgcggcagagactagctgaccctgttcatagcgcaggctaagtgaaagcccgtcaattttcggctcagccgtaaaggcgatgggatcgccatcctcttgacccaaataccgtttgatccggtcgcgaaaatcgaacaattcatcatcgtcaaacgcattggccagcgacatcatgcgcacagtatgggttattttactaaacccatccgcagccggcgcgcccacctgcaaactggggctgtcgtcacggaccaaatcgggaaacgcggcctcaatcgcggcattgcgttgctttagccggtcatattctgcatcgctgatatctggcgcgtcattttggtggtatgctaggtttgccccccccaaaatcgcggccaagcgcgccaattcctgccgcgcctgttctggtgtcaaatctttcggttcggttgcctctgtcacgcgtagatgtcctatcactatcgtttatcccagtgatagttcccgcaccccgttgcgtccagtgacaaatcgcaatttaacgcgatatccgcgccctaggccgataccgcgaatgtatcaacgcctgtgccaattggcattggatcctttaacacatagccccggccccaaacggtttggatataggagtcgtcccctgtcgccacagccaattttttgcgcaatttgcagataaacacatcaataattttcaactcgggttcgtccattccaccgtaaaggtgattcaaaaacatttccttggtcaatgtcgttcccttgcgcagggacagcaattccaacatctgatattctttgcccgtcaaatgcacaggtgcgccgtcaacttcgaccgtcttggcatccaaattcaccgcaattcggcccgttttaataattgactgcgaatgccctttgctgcggcggatgatggcgtgaatgcgggcgaccaattcttcgcggtggaatggtttggtcaaataatcatcggccccaaatccaaagccacgtattttcgcctcggtatcgtcgttgcctgacaatatcaagatgggcgttgaaatgcgcgccaaacgcagctggcgcaacacgtcatagcccgtcatatcgggcagattcaaatccaataaaatcagatcgtaatcatatagtttcgctaaatcgataccctcttcgcccagatcggtggaatagacattcagattcgcatgggtcagcatcatttcaatgcttttcgctgtgtttggatcgtcctctaccaataatacacgcattcaagcctcctgctttacactcttgctgtaatttgcaccgaattggttaacgcaaggttaccgcttgataacttttaccaccacaanctatggttgtcgatacgctttgagcttggtgcatttcaatccatcgtgaccatgatccaaaaaatgcttgatccaactggtaaattcttcttcactcaggccatagcgctccaacgcttcgcgttgggtcaacaggccatagacaacggatcgcacgacgaccaatttccgcgacgcagtccagcgtgataaattcgcgtgtggtaaatcggcgaccgacagaatttgcccatcgggcaactttgcaaccctaggcctgcttgataactccttcattgtgaccctcatacttgtgaacggggtaaaaatgccgcgcttgggttaacagccgcttaaatcgtggggttgtgaatatttcaaattttcctatatttcagccaaacttgtaaccaaaggccaacgacatggatcaccccgtcaattcactgggatttgcaaaaccccccgccgatacgcgcgtcgttgtcgcgatgtccggcggcgtggacagttctgtcgtcgcagcccaactgaaatctcaaggctatgatgtcattggcgtgacattgcagctgtatgatcatggggcagccctggccaagaaaggcgcgtgttgcgcaggcatcgacattcacgatgcgcgccgcgtggccgaggatatggggtttccccattatgttctggattatgaaaacatttttcgcgatgccgttatcgaagaattcgccgacagctatctggcgggtgcaacgcctgtcccctgcatccgttgcaatgaacgggtaaaattcaaggatctgttggaaacggccaaagatctggatgccgattgcatggcaacggggcattatattcaacgcaaatccggcccgcatgggtccgaattacacagcgccacggatgccaaccgcgatcaaagctattttttgttttccacaacccaagatcaactggatttcctgcgctttcctttggggcatttggcgtccaaagctgaaacgcgtgaactggcggcgcaatatgggttggtcgtcgccgataaacccgatagccaagacatttgtttcgtacccgatggaaattacgccggtgttatcgaaaaattgcgccctggtgcggttgaacccggtgatattgtggatatggacggcactgttttgggccagcacaatggcgtgatccattacacaatcggccagcggcgcggtttagggatcggtggactggcaacaccgctgtatgttgttgggctggacgtggacaaaaaacacgtgatcgtgggcgaaaaagaacatctaaaaacccgccatgtcccgattaagcaggtcaactggttgggtgatacccccctgacatcgaaaagcgaatggcacatttccgtcaaagtccggtccacccgccccccgcgcgaagcgattttgcgccccatcaacgacaccgaagctgtggttgaattgctaaacccggaagagggcgtggcccccggtcaggcctgtgtattttatgaaacgggtggcagccgcatttttggaggcggttggatcaccaaacgcgcctagggtttttccgctaaaaacgcgtcaaaggcggccaaggttgccttggacacatgatgttcgatcccttcggcatccaattcggcggtttctggcggaacgccaactgcgatcaacaattgcaccacggtccgatggcgcgcgcgcacccgatcggccaatgcagccccttggtcggttaagaacaccccgcgataggggcgcgatgttgccaaaccttcgcgttttaggcgcgcaatcgctttggtcgcggtgggctgggccacgcccatgcgttcggcaatatcggcaacacgcgcttcgcccatctcagcgatcagatcgccaatcagctcgacataatcctcaagcaaagcgaccgcctgtttttcgcgggcacgggcaaatcgatcggcttgatcgtggggctgttcggggtggtctgtcattgatctgtaattatgcctttgtttgcatggcttgcccgccaactgcg

SEQ ID NO: 330 - DNA, 4000 bp, Escherichia coli
  misc_feature (1926)..(1926): n is a, c, g, or t
  misc_feature (1944)..(1944): n is a, c, g, or t
  misc_feature (1960)..(1960): n is a, c, g, or t
  misc_feature (1965)..(1965): n is a, c, g, or t
  misc_feature (1972)..(1972): n is a, c, g, or t
  misc_feature (1977)..(1977): n is a, c, g, or t
  misc_feature (1989)..(1989): n is a, c, g, or t
gacaactcgactacgctatggcatttaccggcaagctcacaatcgctgatttggcgatagaggagggggatgaaggcaatcaagaggccaatttagttgtccgtctcgacttcagtgattcactgggttcgaccaacgagaccacggtcacagtggactatgcaaccgaagatggtaccggagaggcggacgtggactacctaagtagcagtggaaccctcaccttctctccgggagagaccacaaagaccattccgctcaccattatcggtgatcttatcgatgaggcagatgaagcctttacccttaccctctctgatgcaagtcaggcccggttacccgtaggccatacagccatcaccattgaagatcaggatccggaacctgtcgtgatattcagtttcaccacagggcagtatctctatgaggaccagcagccactgtcactaaacttcaacctctcacagccctcaggtaaggagattgtcatcccctataccttgagcggaaccgccagtagccagcttgactataccctggccccgtcagcggagattcgcttgttgccgggggaaaccgctgcggcgctaaccctcacaccactggaagagagtcaatcggagaccaacgagacactctctatatcgataggatccccaactcatgccagctttgagggagaacagacccacaccgtgcgactggtggatgcgctggcaaccgtgattgagggagttgatgagatcacagcaggagtggactatgtgcctggtagactctacgccttaagttcggagtggaatccactcgtctgtggtgatgagagtgtcagtgaccaagctaactttgtattggccaaagccaatggcgcgggtcgtatagcggttgctgcacatgaggggatcttattgcgtgatgaactcgataacatgcgcttcaacacccagttgctggattggctcgcaacgcaagaggggggggtgggctataccaccggccaccgagagtgggtcaacacaaccaatgttaacccgctaatcaccgtacttgaggcggaaggtggctctctgcaagaggtaagtggaatagtcacagagcaacaacttgaagagctctcggtgttgattgtgggaaatagctgggagcagtttacgtccgatgagaagagtttgattgatttatggaaccaacagggaggagggttgctgcttgtaggattaggttggtcatggcccatgtataacagttcaacactgcctgaatacccgattaatcaacttgcagaaccgtttgagataatgtggttaggtggtacggtcaccgataccgatgcggccaatgaagtgcgctactccgagtttacctctagctgtgcgttgagcagagttccacttaatgatactggcatcacttggggagggagctatccaagtggaaataacgaatcctgtactggtgagaccattgaggcacaagactgctcccatggcagagatgtcacccataacgatgatagtgatggccatgcgggtttcagcttcaccaagctggactccagtggccatgagttggcagcaagtgccacggagtggggctgtgtcaaagacaatgtcaccgacttgatctgggaggtgaagacggatgatggtggtgttcacgataaggacaacgcctatcgctgggggggtatcagtgcaattggaagagctcatgctgatgtgaaaggaacctactacgatgattggaatgagttggtcaatggaaccaatagtgaaagcctctgtggctatagtgactggcgagtgccaactttggaagagttacgctcgatttccaataaatacagctacagacccgcaattgatacaaactacttccctaacacccctgcggcgtggttttggtcgtcttcgccctatgcctatnatagttactacgcatggntattgagtttcgatgncgggnacgatancaacnataaccggaacnatagctatcatgttcggttagtgcgtagtggacagtgattttgacttttttcttttcctttatgagaaagtgagatgagtgccaaatttccaatctatcgggatgccaataccctactactgcagatcgaacaggcggtgcggacctttcctcgctaccataaatataccattggtagtgaacttcgcagagccacaatggagctggtccgccagctctcgcgctctattaagtacgctgatcagcgtttgcgttgggttacagaggctcatgatacgctggatgacctcaaggtacagattcagttagccaaagagctcaaggccttccacagttttcggcagtatgagtccatcgcagcactggcgttcggggtctctaaacaggcctggggctggaaaaagaaattgcaacgcacgtcctctgaaaaggggatgcggggcctgaatggagttcagtcgtgaacttcagcgtgcctacttcactgtgcaccctgcacacctgtcaaagtccccctctcccgatgtcgtttatccgttggggggcactctacatcacaggtatttcagagcaatcggggtaccgtttacggatccccgtgcgtggaccaagggcagggaaactggcgtggttttggtcgtcttcgcccaatgccaataatagtaacaacgcatggaaattgagtttcgataacggaaacgataacaacaataaccggaacaataacaatcatgttcggttagtgcgtagtggaaagtgaagatggagtgtgtcaattaccaggacctctatcaggcagccatgcgctgcaaacaggggaagtccggtagtggtcaggcgcaggcgtatcatagccagctgattgaccgtctttttaccacactcgctgcgttgcaatcctatcaatggcgtccgggtccgatgcgctgctttatcgccaacaacggggtcaagccgcgtgagatccatgccccctactatgcggaccgtgtggtgcaccactggctggtccccagactggccgtactgattgagcccaaatttatccatcacagctgtgccaaccaggtgggtaaggggacccactttgccgtgaatgcattgcagaaaatgatgcggcaatatgatcgcccgtcacagagctactatctgcagctcgatatctacaacttcttctacacgatagatcgtgccacgctctaccagctactgcagcgtcatctgcaacaggcagttgtacgaggcaggctggagccagaccttggaaaagcatatctttggttggttcacaggcttctcttctcaccaatccaggtgatggtgcgcactcaaggttacaccattccgcctcataaacagtggctcaatacaccacctgagaaggggttgcccatcggcaatctcaccagccagttctttgctaacgtctatctcaatgaactggaccagtttgttaaacaccagcttaactgtcgccactatatccgttatgtggatgatatggtgttgctctcggagagtcgcgatcagctcgtcggctatcagcagaagattgcccaattcctccaccagcatctacagttgcggcttaaaccgggtgagaaactgcaaagggtgagccatggtgtcgactttctcggttatatcactcgaccccactaccgtttagtacgccgtagagtggtccacaaccttaagaacaagctgacagccatggagcgaaatatcattcagtataaagggagggggaagcagattaacggcaaggcggtggagccgctacgcgccctgctggcgagctattgggggcacctcagtcatgccagaagtacccacctgctgcagaaaattcttcgtcaattcccttggcttgagtggctgtttgaatttggaggtgaagggcttcgatgtcgctatcgtgcacccaggctcatctcaatgcaggagcagtggaactactacagtcagcgctatccgggttttgtactactgatgcagaaagggcattgct

SEQ ID NO: 331 - DNA, 4000 bp, Escherichia coli
  misc_feature (214)..(214): n is a, c, g, or t
  misc_feature (244)..(244): n is a, c, g, or t
  misc_feature (284)..(284): n is a, c, g, or t
  misc_feature (376)..(376): n is a, c, g, or t
  misc_feature (559)..(559): n is a, c, g, or t
  misc_feature (891)..(891): n is a, c, g, or t
  misc_feature (1276)..(1276): n is a, c, g, or t
  misc_feature (1990)..(1990): n is a, c, g, or t
  misc_feature (1992)..(1992): n is a, c, g, or t
  misc_feature (2005)..(2005): n is a, c, g, or t
  misc_feature (2168)..(2168): n is a, c, g, or t
  misc_feature (3120)..(3120): n is a, c, g, or t
  misc_feature (3149)..(3149): n is a, c, g, or t
  misc_feature (3719)..(3719): n is a, c, g, or t
  misc_feature (3981)..(3981): n is a, c, g, or t
cggcctgggccaaggcgttaatactagggaagcgggctataaatcgattgaagtaggggatgaccgtttgcacttgggtctgttgcagcatgatttcagaaatccagaccgggtaaggcgtcagcgacttttgccagggcaagtcatggcggccaaaaacgtcaaaccaagccagaaccttatccgcgaacccgtgtttcatgatcccaagagnccttttaaaagatctttcaacgcctctggngccttgttctcgatcgtttggtcgaggcgctgcttgactntatcctgcaatgccttgcgcgcaatctcagtgagcaggctttgcgctttatctcgatcgataccgcaatcgcttggtgacagcgctgctagngcgccttggcaacgagcgggccaggcgacgctggttaatgggccctttaccggtagcggtccatcggtcgcggcggccaagcgcagtgtcacctcgtagtcgaaatcggattcaaataggtcaaagccgccggtcgcgccaacggtcatgttctcgtaatttaaggtcgcaagttgcgcgctngacaggccggcgtgaaaggcatgggcgccgtttaacgtgtcaatcacgagatcatccggccaatcggcagcacccgatgactgctgagtcatctgatccagccttagtaggccctgtttgagtgtccggatatcgaccagggcctcctggatggaaaattggctggctccttttattgtctttgacagcgaagcgaggctcgcccccgcaaaggagagcgaggaagacacgctcagtttgcctaaggtttgttctgggacgagttgattgagatcgatttgcgtgaggttggcggcaagcgtcgtaaaggcctgttgttcataatcagagancatttcaagctggataccgccagaggccagttgaccggttaggcgggttgttagttttgattgcgcattgtttagatgcaggtgtgcatccgtcagagtccactgctttgctttgagtgatttaatccgcagatcgatcatcgcctgcgcactgcccagtgtctcaacgggtaatacgactgtgtcgggatcaagcggggtcgagggggatggctgtgcggcatcgcctccggcaagggggccgcctgggtttaattctaaacgactcagcctgagcgtcaggtcaattgacggggtcgtcaggtcgatcattgcctcgccattaaagtcgccgccgttgattcggcctgaaatgctcgatagctcgggtgccacatcggtgccntgcgccatggcggcaatcgtaagctcggtaatcggtgcaaggggcgacagttgaccggcaaaagcggtgttaaaaacattggtgttggtcaaggtgctactgatttcgagcgccagtctgatttttggctgcgtgatcgcggacacctcgccggttaatgtggttgtgagcccgagatggtcaatgcgcatttgctcgaaaacgaagacgtccgtttcaacctgataaacaccggagaggtcgctagcaaatgcgctcgcgtcttgaatagccgttgataaatcaccctgaagggaaaagccctcgagcacaacttgctgggtttcgaaatcataaagggcggtgccatcggactggccctcaaagacaatgcctaggtcggtatccgaataggcgagttcgtttttgagcaacaggctgagccgctcattggcataagtgcccgttactggacccaaagaggccgtaatctcaccagaaattgacgcgtcgacgtactcaatttcgatcgattcaactgtaaaagatgataacgccaggctgcggatcggggttgttgcggggtcagttgtttgcgttgtttcggggctctcgccggtatcgcctgcagcataattcgtttggccattggcatcgacaaagagatagagctttacagcgcccaatgtcacagcatcgatggttaatgcgcctgagcgcaagaggggcatgagntntacgtcaatggcnagggtatcgatgacggccgcgggctggttgcccagtccggctgaaacggcaacgccatccacacgaatcgcaagatccggccaaagttgccattcaaggttttcaaatcggatcgcgtagcccgtattagcggctaatcgctcggtgagtgcttcacgatatnggtctgggtctgccagtagcatgcgaacgccggcataggccgccccggccagtagggtaaggacgatgaggatgctgagggcaaattttgaaatgtgactcaagaggtgcattcctttgttcaggcaacgaagagtttaagcgctgttgcgcgtacggccaatgtttacgccgcggcttactgtgcgacggggctttattctgctatcttttgcctcgaatcaataggcaattggatacttctatgtcagctgttggaacagagtcgaacccattacgcgtggccgttatcggatccggcccatctgggttttatacggtcagtaatttactcaagcaaaccgatctcgtcgttgaagtggatgtgtttgatcgtttgccgacgccttacgggttggttcgagccggggtggcgccggatcatcaaaaggataagtccgtaacccgtgcctacgagaaaagcgccgccgcgccggggttccggtttttcggtaatgtggagtatggcacccacctgcatttggacgacttaaaagaacactaccatcaagtgatgttcacaacaggcagcccttttgaccgaaatttgggggtggctggcgaggaccttcttgggagtcactctgccaccgagtttgttgcctggtacaacgggcaccccgactttgccgaccgacagtttgatttgtcccaagagaacgtggttgtggtggggattggcaatgttgcgatggatgtcgcgcgaattctgtgtaaaaccgttgatgaactcaaagtcactgatattgccgatcacgcccttgcagcattaagcgaaagtaaggtgaagaatgtttatattttaggaagaaggggtccagctcaagccgccttcacaccgcctgaaataaaagagatgggcgagtttgcggaagccgatgtcaatattttagcaagcgaggcagtggtggatnccaattctcaaaagctgctcgatgacagncaggacaagaatgcgattaagaatgtagagacgataacggcctatgcctcgcgtgaaaatgccggcaagcccaggcagttgcatattcggttttgcgtctcaccgaccgagctggttgaagccgatggccgagtgggtgcggttaaactgatacaaaacgatttggtattggatgatcgagggcaattgaaagccgttgcaacggagcgcgaagaagtgattccggcgggccttgtgtttcgctcagtgggatatcgcgggcagccgttgccggatgtacccttcaacgacagttggggcaccattttaaacgaaggcggccgcgcagttgatgctgcgggcgatcaagtggttggcctctacaccgcgggttggatcaagcgcggtcccagtggggtgattggcaccaataaaacctgcgcgcaagaaaccgttgggttgatgatgcaagatcttcaggcgaaccgtttgtttgagccgagcgcgccgtctgccgaggccgcattgaaattgatccagagccgccaaccggactttgtcagctttgcggactggaaaaaaatagatgangcggaagtcgcgaagggcctcgcaagcgaccggccgagagtgaagtttacccgggttactgacatgctcgaggttgctcgcgcctaaccgactgccgctctgaccgctggcatcacttcattgatatagcgctcgagggcatcttcccgccagggtgcacgcagcgcgatgttgattagactcgcgccttgctgatggtaggccaagattttgtcaatggcttggcttggggtgcagaccaaagagcccgcgcgaatgcgtnctgcttgcggtccccagtc

SEQ ID NO: 332 - DNA, 4000 bp, Escherichia coli
  misc_feature (1)..(3): n is a, c, g, or t
  misc_feature (8)..(13): n is a, c, g, or t
  misc_feature (15)..(15): n is a, c, g, or t
  misc_feature (17)..(20): n is a, c, g, or t
  misc_feature (22)..(23): n is a, c, g, or t
  misc_feature (25)..(27): n is a, c, g, or t
  misc_feature (29)..(30): n is a, c, g, or t
  misc_feature (32)..(42): n is a, c, g, or t
  misc_feature (44)..(45): n is a, c, g, or t
  misc_feature (47)..(48): n is a, c, g, or t
  misc_feature (53)..(55): n is a, c, g, or t
  misc_feature (57)..(62): n is a, c, g, or t
  misc_feature (64)..(74): n is a, c, g, or t
  misc_feature (76)..(90): n is a, c, g, or t
  misc_feature (92)..(92): n is a, c, g, or t
  misc_feature (94)..(94): n is a, c, g, or t
  misc_feature (96)..(99): n is a, c, g, or t
  misc_feature (101)..(101): n is a, c, g, or t
  misc_feature (103)..(121): n is a, c, g, or t
  misc_feature (123)..(123): n is a, c, g, or t
  misc_feature (125)..(125): n is a, c, g, or t
  misc_feature (127)..(128): n is a, c, g, or t
  misc_feature (130)..(131): n is a, c, g, or t
  misc_feature (133)..(147): n is a, c, g, or t
  misc_feature (149)..(150): n is a, c, g, or t
  misc_feature (152)..(162): n is a, c, g, or t
  misc_feature (165)..(168): n is a, c, g, or t
  misc_feature (170)..(171): n is a, c, g, or t
  misc_feature (174)..(175): n is a, c, g, or t
  misc_feature (177)..(180): n is a, c, g, or t
  misc_feature (182)..(183): n is a, c, g, or t
  misc_feature (185)..(187): n is a, c, g, or t
  misc_feature (190)..(192): n is a, c, g, or t
  misc_feature (194)..(194): n is a, c, g, or t
  misc_feature (196)..(197): n is a, c, g, or t
  misc_feature (199)..(200): n is a, c, g, or t
  misc_feature (202)..(203): n is a, c, g, or t
  misc_feature (205)..(207): n is a, c, g, or t
  misc_feature (209)..(212): n is a, c, g, or t
  misc_feature (214)..(219): n is a, c, g, or t
  misc_feature (221)..(230): n is a, c, g, or t
  misc_feature (232)..(232): n is a, c, g, or t
  misc_feature (234)..(235): n is a, c, g, or t
  misc_feature (240)..(241): n is a, c, g, or t
  misc_feature (244)..(249): n is a, c, g, or t
  misc_feature (251)..(255): n is a, c, g, or t
  misc_feature (257)..(257): n is a, c, g, or t
  misc_feature (259)..(260): n is a, c, g, or t
  misc_feature (265)..(267): n is a, c, g, or t
  misc_feature (269)..(269): n is a, c, g, or t
  misc_feature (271)..(278): n is a, c, g, or t
  misc_feature (280)..(280): n is a, c, g, or t
  misc_feature (283)..(287): n is a, c, g, or t
  misc_feature (289)..(289): n is a, c, g, or t
  misc_feature (292)..(309): n is a, c, g, or t
  misc_feature (311)..(311): n is a, c, g, or t
  misc_feature (313)..(314): n is a, c, g, or t
  misc_feature (317)..(317): n is a, c, g, or t
  misc_feature (319)..(320): n is a, c, g, or t
  misc_feature (323)..(323): n is a, c, g, or t
  misc_feature (325)..(326): n is a, c, g, or t
  misc_feature (328)..(329): n is a, c, g, or t
  misc_feature (331)..(334): n is a, c, g, or t
  misc_feature (336)..(341): n is a, c, g, or t
  misc_feature (344)..(344): n is a, c, g, or t
  misc_feature (346)..(362): n is a, c, g, or t
  misc_feature (364)..(367): n is a, c, g, or t
  misc_feature (374)..(376): n is a, c, g, or t
  misc_feature (380)..(380): n is a, c, g, or t
  misc_feature (382)..(386): n is a, c, g, or t
  misc_feature (388)..(391): n is a, c, g, or t
  misc_feature (395)..(401): n is a, c, g, or t
  misc_feature (403)..(404): n is a, c, g, or t
  misc_feature (409)..(410): n is a, c, g, or t
  misc_feature (412)..(414): n is a, c, g, or t
  misc_feature (416)..(429): n is a, c, g, or t
  misc_feature (431)..(431): n is a, c, g, or t
  misc_feature (433)..(434): n is a, c, g, or t
  misc_feature (436)..(442): n is a, c, g, or t
  misc_feature (447)..(450): n is a, c, g, or t
  misc_feature (452)..(453): n is a, c, g, or t
  misc_feature (458)..(476): n is a, c, g, or t
  misc_feature (478)..(479): n is a, c, g, or t
  misc_feature (481)..(484): n is a, c, g, or t
  misc_feature (486)..(493): n is a, c, g, or t
  misc_feature (495)..(503): n is a, c, g, or t
  misc_feature (507)..(509): n is a, c, g, or t
  misc_feature (512)..(514): n is a, c, g, or t
  misc_feature (517)..(522): n is a, c, g, or t
  misc_feature (527)..(527): n is a, c, g, or t
  misc_feature (530)..(531): n is a, c, g, or t
  misc_feature (533)..(534): n is a, c, g, or t
  misc_feature (536)..(538): n is a, c, g, or t
  misc_feature (541)..(541): n is a, c, g, or t
  misc_feature (544)..(550): n is a, c, g, or t
  misc_feature (552)..(556): n is a, c, g, or t
  misc_feature (559)..(567): n is a, c, g, or t
  misc_feature (569)..(571): n is a, c, g, or t
  misc_feature (573)..(574): n is a, c, g, or t
  misc_feature (576)..(603): n is a, c, g, or t
  misc_feature (605)..(606): n is a, c, g, or t
  misc_feature (608)..(608): n is a, c, g, or t
  misc_feature (610)..(612): n is a, c, g, or t
  misc_feature (614)..(614): n is a, c, g, or t
  misc_feature (618)..(621): n is a, c, g, or t
  misc_feature (628)..(643): n is a, c, g, or t
  misc_feature (645)..(646): n is a, c, g, or t
  misc_feature (648)..(665): n is a, c, g, or t
  misc_feature (667)..(669): n is a, c, g, or t
  misc_feature (671)..(673): n is a, c, g, or t
  misc_feature (675)..(681): n is a, c, g, or t
  misc_feature (683)..(683): n is a, c, g, or t
  misc_feature (685)..(693): n is a, c, g, or t
  misc_feature (695)..(708): n is a, c, g, or t
  misc_feature (712)..(717): n is a, c, g, or t
  misc_feature (719)..(720): n is a, c, g, or t
  misc_feature (723)..(735): n is a, c, g, or t
  misc_feature (737)..(737): n is a, c, g, or t
  misc_feature (739)..(747): n is a, c, g, or t
  misc_feature (750)..(752): n is a, c, g, or t
  misc_feature (760)..(761): n is a, c, g, or t
  misc_feature (765)..(767): n is a, c, g, or t
  misc_feature (774)..(775): n is a, c, g, or t
  misc_feature (778)..(779): n is a, c, g, or t
  misc_feature (784)..(800): n is a, c, g, or t
  misc_feature (803)..(803): n is a, c, g, or t
  misc_feature (805)..(814): n is a, c, g, or t
  misc_feature (817)..(821): n is a, c, g, or t
  misc_feature (823)..(833): n is a, c, g, or t
  misc_feature (835)..(837): n is a, c, g, or t
  misc_feature (839)..(848): n is a, c, g, or t
  misc_feature (851)..(854): n is a, c, g, or t
  misc_feature (857)..(859): n is a, c, g, or t
  misc_feature (861)..(863): n is a, c, g, or t
  misc_feature (865)..(865): n is a, c, g, or t
  misc_feature (868)..(868): n is a, c, g, or t
  misc_feature (871)..(871): n is a, c, g, or t
  misc_feature (873)..(880): n is a, c, g, or t
  misc_feature (885)..(887): n is a, c, g, or t
  misc_feature (889)..(889): n is a, c, g, or t
  misc_feature (892)..(914): n is a, c, g, or t
  misc_feature (916)..(931): n is a, c, g, or t
  misc_feature (933)..(943): n is a, c, g, or t
  misc_feature (945)..(946): n is a, c, g, or t
  misc_feature (948)..(962): n is a, c, g, or t
  misc_feature (964)..(964): n is a, c, g, or t
  misc_feature (966)..(966): n is a, c, g, or t
  misc_feature (968)..(969): n is a, c, g, or t
  misc_feature (971)..(976): n is a, c, g, or t
  misc_feature (979)..(980): n is a, c, g, or t
  misc_feature (982)..(985): n is a, c, g, or t
  misc_feature (987)..(992): n is a, c, g, or t
  misc_feature (994)..(994): n is a, c, g, or t
  misc_feature (997)..(997): n is a, c, g, or t
  misc_feature (1000)..(1002): n is a, c, g, or t
  misc_feature (1004)..(1011): n is a, c, g, or t
  misc_feature (1013)..(1017): n is a, c, g, or t
  misc_feature (1019)..(1019): n is a, c, g, or t
  misc_feature (1023)..(1024): n is a, c, g, or t
  misc_feature (1026)..(1030): n is a, c, g, or t
  misc_feature (1032)..(1033): n is a, c, g, or t
  misc_feature (1038)..(1042): n is a, c, g, or t
  misc_feature (1045)..(1048): n is a, c, g, or t
  misc_feature (1050)..(1051): n is a, c, g, or t
  misc_feature (1053)..(1054): n is a, c, g, or t
  misc_feature (1057)..(1057): n is a, c, g, or t
  misc_feature (1061)..(1061): n is a, c, g, or t
  misc_feature (1064)..(1067): n is a, c, g, or t
  misc_feature (1069)..(1070): n is a, c, g, or t
  misc_feature (1072)..(1072): n is a, c, g, or t
  misc_feature (1074)..(1075): n is a, c, g, or t
  misc_feature (1078)..(1081): n is a, c, g, or t
  misc_feature (1085)..(1089): n is a, c, g, or t
  misc_feature (1091)..(1096): n is a, c, g, or t
  misc_feature (1098)..(1099): n is a, c, g, or t
  misc_feature (1101)..(1111): n is a, c, g, or t
  misc_feature (1115)..(1122): n is a, c, g, or t
  misc_feature (1124)..(1125): n is a, c, g, or t
  misc_feature (1128)..(1132): n is a, c, g, or t
  misc_feature (1135)..(1135): n is a, c, g, or t
  misc_feature (1137)..(1137): n is a, c, g, or t
  misc_feature (1140)..(1144): n is a, c, g, or t
  misc_feature (1146)..(1146): n is a, c, g, or t
  misc_feature (1149)..(1150): n is a, c, g, or t
  misc_feature (1153)..(1155): n is a, c, g, or t
  misc_feature (1159)..(1165): n is a, c, g, or t
  misc_feature (1167)..(1171): n is a, c, g, or t
  misc_feature (1173)..(1176): n is a, c, g, or t
  misc_feature (1178)..(1179): n is a, c, g, or t
  misc_feature (1182)..(1183): n is a, c, g, or t
  misc_feature (1186)..(1189): n is a, c, g, or t
  misc_feature (1191)..(1199): n is a, c, g, or t
  misc_feature (1203)..(1204): n is a, c, g, or t
  misc_feature (1206)..(1207): n is a, c, g, or t
  misc_feature (1209)..(1210): n is a, c, g, or t
  misc_feature (1212)..(1213): n is a, c, g, or t
  misc_feature (1215)..(1223): n is a, c, g, or t
  misc_feature (1226)..(1227): n is a, c, g, or t
  misc_feature (1230)..(1230): n is a, c, g, or t
  misc_feature (1235)..(1235): n is a, c, g, or t
  misc_feature (1237)..(1242): n is a, c, g, or t
  misc_feature (1244)..(1244): n is a, c, g, or t
  misc_feature (1247)..(1247): n is a, c, g, or t
  misc_feature (1250)..(1250): n is a, c, g, or t
  misc_feature (1252)..(1252): n is a, c, g, or t
  misc_feature (1254)..(1263): n is a, c, g, or t
  misc_feature (1265)..(1271): n is a, c, g, or t
  misc_feature (1276)..(1288): n is a, c, g, or t
  misc_feature (1290)..(1295): n is a, c, g, or t
  misc_feature (1298)..(1298): n is a, c, g, or t
  misc_feature (1300)..(1302): n is a, c, g, or t
  misc_feature (1305)..(1312): n is a, c, g, or t
  misc_feature (1314)..(1319): n is a, c, g, or t
  misc_feature (1321)..(1321): n is a, c, g, or t
  misc_feature (1324)..(1335): n is a, c, g, or t
  misc_feature (1337)..(1337): n is a, c, g, or t
  misc_feature (1339)..(1340): n is a, c, g, or t
  misc_feature (1342)..(1342): n is a, c, g, or t
  misc_feature (1348)..(1353): n is a, c, g, or t
  misc_feature (1357)..(1360): n is a, c, g, or t
  misc_feature (1362)..(1369): n is a, c, g, or t
  misc_feature (1372)..(1377): n is a, c, g, or t
  misc_feature (1379)..(1379): n is a, c, g, or t
  misc_feature (1383)..(1383): n is a, c, g, or t
  misc_feature (1385)..(1385): n is a, c, g, or t
  misc_feature (1387)..(1389): n is a, c, g, or t
  misc_feature (1395)..(1396): n is a, c, g, or t
  misc_feature (1398)..(1400): n is a, c, g, or t
  misc_feature (1402)..(1405): n is a, c, g, or t
  misc_feature (1410)..(1410): n is a, c, g, or t
  misc_feature (1414)..(1415): n is a, c, g, or t
  misc_feature (1419)..(1419): n is a, c, g, or t
  misc_feature (1421)..(1423): n is a, c, g, or t
  misc_feature (1425)..(1425): n is a, c, g, or t
  misc_feature (1427)..(1428): n is a, c, g, or t
  misc_feature (1431)..(1431): n is a, c, g, or t
  misc_feature (1438)..(1440): n is a, c, g, or t
  misc_feature (1442)..(1442): n is a, c, g, or t
  misc_feature (1445)..(1445): n is a, c, g, or t
  misc_feature (1447)..(1448): n is a, c, g, or t
  misc_feature (1450)..(1452): n is a, c, g, or t
  misc_feature (1454)..(1454): n is a, c, g, or t
  misc_feature (1456)..(1457): n is a, c, g, or t
  misc_feature (1464)..(1465): n is a, c, g, or t
  misc_feature (1467)..(1467): n is a, c, g, or t
  misc_feature (1471)..(1473): n is a, c, g, or t
  misc_feature (1476)..(1479): n is a, c, g, or t
  misc_feature (1490)..(1490): n is a, c, g, or t
  misc_feature (1499)..(1499): n is a, c, g, or t
  misc_feature (1508)..(1508): n is a, c, g, or t
  misc_feature (1732)..(1732): n is a, c, g, or t
  misc_feature (1749)..(1749): n is a, c, g, or t
  misc_feature (2371)..(2371): n is a, c, g, or t
  misc_feature (3761)..(3761): n is a, c, g, or t
nnnggggnnnnnngncnnnngnntnnnanncnnnnnnnnnnngnnannaaaannngnnnnnnannnnnnnnnnntnnnnnnnnnnnnnnngngnannnngngnnnnnnnnnnnnnnnnnnncngngnnannannnnnnnnnnnnnnntnntnnnnnnnnnnnggnnnnannggnngnnnngnngnnngtnnntntnngnngnnannncnnnngnnnnnncnnnnnnnnnncncnnaaaannacnnnnnnannnnntngnnggggnnngngnnnnnnnngntgnnnnngnaannnnnnnnnnnnnnnnnngnannacnannggngnngnngnnnncnnnnnnaanannnnnnnnnnnnnnnnnannnnggggggnnnaaangnnnnnannnncccnnnnnnncnnccccnnannngnnnnnnnnnnnnnntngnngnnnnnnnccccnnnngnnccccnnnnnnnnnnnnnnnnnnncnncnnnngnnnnnnnncnnnnnnnnnaaannnaannnaannnnnnggggnccnncnnannnggnggnnnnnnngnnnnnttnnnnnnnnncnnnannannnnnnnnnnnnnnnnnnnnnnnnnnnncnncncnnnangggnnnnttttttnnnnnnnnnnnnnnnngnngnnnnnnnnnnnnnnnnnncnnntnnngnnnnnnntngnnnnnnnnngnnnnnnnnnnnnnncccnnnnnntnnttnnnnnnnnnnnnntngnnnnnnnnnggnnnaaaacccnncttnnnggggggnnggnnggggnnnnnnnnnnnnnnnnnggncnnnnnnnnnnggnnnnncnnnnnnnnnnnannncnnnnnnnnnnggnnnnaannncnnngnggnggngnnnnnnnnaaaannngnccnnnnnnnnnnnnnnnnnnnnnnncnnnnnnnnnnnnnnnngnnnnnnnnnnnanngnnnnnnnnnnnnnnncncngnnannnnnnccnngnnnntnnnnnncnccnccnnncnnnnnnnnannnnngntttnncnnnnngnnttttnnnnnccnnnnanngnnggnggcnccnnnngnngngnnggnnnntggnnnnnannnnnnannannnnnnnnnnngggnnnnnnnngnnggnnnnnccncnttnnnnngnagnnggnnntttnnnnnnncnnnnngnnnnannaannaannnntnnnnnnnnntttnngnntnntnntnnnnnnnnnaannaanttttnannnnnntnttnttnanannnnnnnnnncnnnnnnnggggnnnnnnnnnnnnngnnnnnngcncnnnttnnnnnnnngnnnnnncncgnnnnnnnnnnnncngnncnccccannnnnncccnnnnannnnnnnnaannnnnncntttncnannntgggcnnannncnnnngttgntagnncacncnnntnannagnggggggnnngntgntnnannncntnngggcccnncntttnnnaannnnttgcaaatctnaaggttggncgcagagangagcagttcttaaaataacgatttttgttctttgaaagtctagggtaaatataatgtaagcaggtaaaataaacgcctagaatagtagcgtttgcataaaccagttacagcaattgatggatgccttggcttcatcaggcgatgaaggacgcagcaagctgcgataagcttcggatagcggcacacacgctttgacccggagatttccgaatggggaaacccgncaccgataatacggtgncacttcaggatgaatacatagtcctgatagagcaatacgcggcgaagtgaaacatctcagtaaccgcaggaaaagaaagagaatcgattccgtaagtagtggcgagcgaaagcggaacagcccaaaccagagggatttatccctttggggttgtaggaccacaacgtgaaatgcaacggttagacgaacactctggaaagagtgaccaaagagggtgacagtcccttagtcgaaaacccgagcaaatctagtggtatcctgagtagcaccggacacgtgaaacccggtgtgaatccatgccgaccacggcataaggctaaatactcgatgaagaccgatagtgaactagtaccgcgagggaaaggtgaaaagcacccctgttaggggagtgaaatagtaactgaaatcaattgctaacaagtcagtgggagctcccatgtggagtcaccgcttgccttttgtataatgagtctgcgagttattgtctgtagcaagcttaagccggtacccggtgcaagcgcagcgaaagcgagtccgaatagggcgtctagttgctggcaatagacccgaagcggaggtgatctaaccatgaccaggatgaagctgcggtaaaacgcagtgnaggtccgaaccggttactcttgagaaagtatcggatgagttgtggttaggagcgaaagactaatcaaaccccgtgatagctggttctttccgaaatatatttaggtatagcgtctggtgctgatctatggaggtagagcactaaataagctagggcccctaccggggtactgaacttaattaaactccgaatgccatagagtgaagccaggcagtcagacggcgggtgataaggtccgtcgtcgagaggagaatagtccagaccaccagttaaggtcccaaaatatggctcagtggaaaaggatgtgattttgcttagacaatggggatgttggcttagaggcagccatcatttaaacagtgcgtaacagctgacccatcgagcgaaattgcgccgaaaatgatcgggacttaagccatataccgaagctgtggattcaccgcaaggtgagtagtaggaaagcgtcctaagtgctgcgaagcggaaggggtaaccgaccgtggagtgcttaggagtgagaatgcagacataagtaacgataaagatggttgaattccatctcgccgaaatcccaaggattcctggggaaggttcgtccgcccagggttagtcgggtgctaagacgaggccgtaaggagtagtcgatgccaagctggtttaatattccagcaccaccggatttgcgtttgacccaaggagtgacggagaaagttagaacagcgacgtgttgaatcgtcgtcgaagctcgtaggctgtctggggataaaagaccagataaggctgaaaagcgataggaccctgaagctacggccgaaggggattgttcgatactacgcttccaagaaaagcttcgtggttagcaagtcaggtgcccgtaccgtaaaccgacacaggtgggatagatgagtattctaaggcgcgcaggttaactctctctaaggaactcggcaaattgaccccgtatcttcggtataaggggtgccccgcaaggggccgcagtgaaccgcttcaaccgactgtttagcaaaaacacagctctctgctaagtcgcaagacgacgtatagggagtgacacgtgaccaatgcggaaaggtgaaaacgtgaggtgcaagcttcgcgtctaagcccccgtgaatgtcggccgtaactataacggtcctaaggtagcgaaattccttgtcgggtaagttccgacccgcacgaatcgtgtaacgagttgaaggctgtctcggagagatgcctggtgaaattgtagtggcggtgaagatgccgcctacccgcagcaggacggaaagaccctatgcacctttactgtaagctgttattgtcgcttgatttttaatacgtagaataggtgggagactttgaagcccggttccaggatcgggcngagtcgaaatgtgaaataccactttttaattgttaggcgtctaaccccgacccattatctgggcgtgggacagtgatagcaggtcagttttactggggcggtatcctccaaaagagtaacggaggatttcgaaggttccctcagcccggtcggtaatcgggctatagagcgcatgagtataagggagctttactgtgagacctacaagtcgagcagttgcgaaagcaggatcaagtgat

SEQ ID NO: 333 - DNA, 4000 bp, Escherichia coli
  misc_feature (11)..(11): n is a, c, g, or t
  misc_feature (36)..(36): n is a, c, g, or t
  misc_feature (51)..(51): n is a, c, g, or t
  misc_feature (57)..(57): n is a, c, g, or t
  misc_feature (60)..(60): n is a, c, g, or t
  misc_feature (105)..(105): n is a, c, g, or t
  misc_feature (129)..(129): n is a, c, g, or t
  misc_feature (135)..(135): n is a, c, g, or t
  misc_feature (168)..(168): n is a, c, g, or t
  misc_feature (180)..(180): n is a, c, g, or t
  misc_feature (189)..(189): n is a, c, g, or t
  misc_feature (204)..(204): n is a, c, g, or t
  misc_feature (216)..(216): n is a, c, g, or t
  misc_feature (255)..(255): n is a, c, g, or t
  misc_feature (270)..(270): n is a, c, g, or t
  misc_feature (288)..(288): n is a, c, g, or t
  misc_feature (303)..(303): n is a, c, g, or t
  misc_feature (325)..(325): n is a, c, g, or t
  misc_feature (327)..(327): n is a, c, g, or t
  misc_feature (330)..(330): n is a, c, g, or t
  misc_feature (333)..(333): n is a, c, g, or t
  misc_feature (339)..(339): n is a, c, g, or t
  misc_feature (344)..(345): n is a, c, g, or t
  misc_feature (354)..(354): n is a, c, g, or t
  misc_feature (360)..(360): n is a, c, g, or t
  misc_feature (369)..(369): n is a, c, g, or t
  misc_feature (375)..(375): n is a, c, g, or t
  misc_feature (384)..(384): n is a, c, g, or t
  misc_feature (396)..(396): n is a, c, g, or t
  misc_feature (414)..(414): n is a, c, g, or t
  misc_feature (417)..(417): n is a, c, g, or t
  misc_feature (420)..(420): n is a, c, g, or t
  misc_feature (432)..(432): n is a, c, g, or t
  misc_feature (441)..(441): n is a, c, g, or t
  misc_feature (444)..(444): n is a, c, g, or t
  misc_feature (468)..(468): n is a, c, g, or t
  misc_feature (498)..(498): n is a, c, g, or t
  misc_feature (510)..(510): n is a, c, g, or t
  misc_feature (519)..(519): n is a, c, g, or t
  misc_feature (522)..(522): n is a, c, g, or t
  misc_feature (537)..(537): n is a, c, g, or t
  misc_feature (555)..(555): n is a, c, g, or t
  misc_feature (579)..(579): n is a, c, g, or t
  misc_feature (588)..(588): n is a, c, g, or t
  misc_feature (597)..(597): n is a, c, g, or t
  misc_feature (621)..(621): n is a, c, g, or t
  misc_feature (645)..(645): n is a, c, g, or t
  misc_feature (663)..(663): n is a, c, g, or t
  misc_feature (669)..(669): n is a, c, g, or t
  misc_feature (681)..(681): n is a, c, g, or t
  misc_feature (684)..(684): n is a, c, g, or t
  misc_feature (693)..(693): n is a, c, g, or t
  misc_feature (729)..(729): n is a, c, g, or t
  misc_feature (744)..(744): n is a, c, g, or t
  misc_feature (774)..(774): n is a, c, g, or t
  misc_feature (804)..(804): n is a, c, g, or t
  misc_feature (837)..(837): n is a, c, g, or t
  misc_feature (840)..(840): n is a, c, g, or t
  misc_feature (843)..(843): n is a, c, g, or t
  misc_feature (855)..(855): n is a, c, g, or t
  misc_feature (870)..(870): n is a, c, g, or t
  misc_feature (882)..(882): n is a, c, g, or t
  misc_feature (891)..(891): n is a, c, g, or t
  misc_feature (903)..(903): n is a, c, g, or t
  misc_feature (926)..(926): n is a, c, g, or t
  misc_feature (941)..(941): n is a, c, g, or t
  misc_feature (948)..(948): n is a, c, g, or t
  misc_feature (975)..(975): n is a, c, g, or t
  misc_feature (999)..(999): n is a, c, g, or t
  misc_feature (1002)..(1002): n is a, c, g, or t
  misc_feature (1005)..(1005): n is a, c, g, or t
  misc_feature (1017)..(1018): n is a, c, g, or t
  misc_feature (1035)..(1035): n is a, c, g, or t
  misc_feature (1047)..(1047): n is a, c, g, or t
  misc_feature (1059)..(1059): n is a, c, g, or t
  misc_feature (1066)..(1066): n is a, c, g, or t
  misc_feature (1072)..(1072): n is a, c, g, or t
  misc_feature (1076)..(1077): n is a, c, g, or t
  misc_feature (1083)..(1083): n is a, c, g, or t
  misc_feature (1097)..(1097): n is a, c, g, or t
  misc_feature (2387)..(2387): n is a, c, g, or t
  misc_feature (2396)..(2397): n is a, c, g, or t
  misc_feature (2412)..(2412): n is a, c, g, or t
  misc_feature (2586)..(2586): n is a, c, g, or t
  misc_feature (2652)..(2652): n is a, c, g, or t
  misc_feature (2691)..(2691): n is a, c, g, or t
  misc_feature (2697)..(2697): n is a, c, g, or t
  misc_feature (2706)..(2706): n is a, c, g, or t
  misc_feature (2728)..(2728): n is a, c, g, or t
  misc_feature (2739)..(2740): n is a, c, g, or t
  misc_feature (2744)..(2744): n is a, c, g, or t
  misc_feature (2746)..(2748): n is a, c, g, or t
  misc_feature (2750)..(2752): n is a, c, g, or t
  misc_feature (2756)..(2767): n is a, c, g, or t
  misc_feature (2772)..(2772): n is a, c, g, or t
  misc_feature (2774)..(2775): n is a, c, g, or t
  misc_feature (2777)..(2779): n is a, c, g, or t
  misc_feature (2781)..(2781): n is a, c, g, or t
  misc_feature (2783)..(2786): n is a, c, g, or t
  misc_feature (2788)..(2793): n is a, c, g, or t
  misc_feature (2796)..(2800): n is a, c, g, or t
  misc_feature (2802)..(2802): n is a, c, g, or t
  misc_feature (2804)..(2804): n is a, c, g, or t
  misc_feature (2807)..(2807): n is a, c, g, or t
  misc_feature (2809)..(2810): n is a, c, g, or t
  misc_feature (2812)..(2813): n is a, c, g, or t
  misc_feature (2816)..(2816): n is a, c, g, or t
  misc_feature (2818)..(2818): n is a, c, g, or t
  misc_feature (2820)..(2820): n is a, c, g, or t
  misc_feature (2822)..(2823): n is a, c, g, or t
  misc_feature (2825)..(2825): n is a, c, g, or t
  misc_feature (2827)..(2827): n is a, c, g, or t
  misc_feature (2830)..(2830): n is a, c, g, or t
  misc_feature (2832)..(2841): n is a, c, g, or t
  misc_feature (2843)..(2844): n is a, c, g, or t
  misc_feature (2846)..(2846): n is a, c, g, or t
  misc_feature (2848)..(2851): n is a, c, g, or t
  misc_feature (2854)..(2857): n is a, c, g, or t
  misc_feature (2859)..(2859): n is a, c, g, or t
  misc_feature (2862)..(2863): n is a, c, g, or t
  misc_feature (2865)..(2866): n is a, c, g, or t
  misc_feature (2868)..(2870): n is a, c, g, or t
  misc_feature (2873)..(2873): n is a, c, g, or t
  misc_feature (2876)..(2876): n is a, c, g, or t
  misc_feature (2878)..(2881): n is a, c, g, or t
  misc_feature (2883)..(2883): n is a, c, g, or t
  misc_feature (2885)..(2885): n is a, c, g, or t
  misc_feature (2887)..(2888): n is a, c, g, or t
  misc_feature (2891)..(2891): n is a, c, g, or t
  misc_feature (2893)..(2893): n is a, c, g, or t
  misc_feature (2895)..(2898): n is a, c, g, or t
  misc_feature (2900)..(2904): n is a, c, g, or t
  misc_feature (2907)..(2910): n is a, c, g, or t
  misc_feature (2912)..(2912): n is a, c, g, or t
  misc_feature (2914)..(2916): n is a, c, g, or t
  misc_feature (2919)..(2919): n is a, c, g, or t
  misc_feature (2924)..(2924): n is a, c, g, or t
  misc_feature (2926)..(2929): n is a, c, g, or t
  misc_feature (2931)..(2931): n is a, c, g, or t
  misc_feature (2934)..(2935): n is a, c, g, or t
  misc_feature (2938)..(2940): n is a, c, g, or t
  misc_feature (2942)..(2943): n is a, c, g, or t
  misc_feature (2946)..(2946): n is a, c, g, or t
  misc_feature (2948)..(2959): n is a, c, g, or t
  misc_feature (2962)..(2963): n is a, c, g, or t
  misc_feature (2965)..(2973): n is a, c, g, or t
  misc_feature (2975)..(2977): n is a, c, g, or t
  misc_feature (2979)..(2982): n is a, c, g, or t
  misc_feature (2985)..(2986): n is a, c, g, or t
  misc_feature (2988)..(2997): n is a, c, g, or t
  misc_feature (2999)..(3001): n is a, c, g, or t
  misc_feature (3003)..(3005): n is a, c, g, or t
  misc_feature (3007)..(3010): n is a, c, g, or t
  misc_feature (3012)..(3013): n is a, c, g, or t
  misc_feature (3016)..(3028): n is a, c, g, or t
  misc_feature (3030)..(3033): n is a, c, g, or t
  misc_feature (3036)..(3049): n is a, c, g, or t
  misc_feature (3051)..(3054): n is a, c, g, or t
  misc_feature (3056)..(3061): n is a, c, g, or t
  misc_feature (3063)..(3064): n is a, c, g, or t
  misc_feature (3066)..(3071): n is a, c, g, or t
  misc_feature (3073)..(3073): n is a, c, g, or t
  misc_feature (3076)..(3079): n is a, c, g, or t
  misc_feature (3082)..(3082): n is a, c, g, or t
  misc_feature (3084)..(3086): n is a, c, g, or t
  misc_feature (3088)..(3091): n is a, c, g, or t
  misc_feature (3093)..(3094): n is a, c, g, or t
  misc_feature (3096)..(3098): n is a, c, g, or t
  misc_feature (3102)..(3106): n is a, c, g, or t
  misc_feature (3109)..(3110): n is a, c, g, or t
  misc_feature (3113)..(3113): n is a, c, g, or t
  misc_feature (3115)..(3117): n is a, c, g, or t
  misc_feature (3119)..(3120): n is a, c, g, or t
  misc_feature (3122)..(3123): n is a, c, g, or t
  misc_feature (3127)..(3127): n is a, c, g, or t
  misc_feature (3129)..(3129): n is a, c, g, or t
  misc_feature (3131)..(3134): n is a, c, g, or t
  misc_feature (3136)..(3139): n is a, c, g, or t
  misc_feature (3142)..(3143): n is a, c, g, or t
  misc_feature (3145)..(3147): n is a, c, g, or t
  misc_feature (3149)..(3152): n is a, c, g, or t
  misc_feature (3154)..(3155): n is a, c, g, or t
  misc_feature (3159)..(3162): n is a, c, g, or t
  misc_feature (3165)..(3166): n is a, c, g, or t
  misc_feature (3169)..(3170): n is a, c, g, or t
  misc_feature (3175)..(3178): n is a, c, g, or t
  misc_feature (3181)..(3182): n is a, c, g, or t
  misc_feature (3184)..(3203): n is a, c, g, or t
  misc_feature (3205)..(3211): n is a, c, g, or t
  misc_feature (3213)..(3213): n is a, c, g, or t
  misc_feature (3215)..(3224): n is a, c, g, or t
  misc_feature (3226)..(3227): n is a, c, g, or t
  misc_feature (3231)..(3234): n is a, c, g, or t
  misc_feature (3237)..(3237): n is a, c, g, or t
  misc_feature (3239)..(3239): n is a, c, g, or t
  misc_feature (3241)..(3244): n is a, c, g, or t
  misc_feature (3246)..(3247): n is a, c, g, or t
  misc_feature (3252)..(3254): n is a, c, g, or t
  misc_feature (3257)..(3257): n is a, c, g, or t
  misc_feature (3259)..(3259): n is a, c, g, or t
  misc_feature (3262)..(3262): n is a, c, g, or t
  misc_feature (3264)..(3266): n is a, c, g, or t
  misc_feature (3268)..(3269): n is a, c, g, or t
  misc_feature (3271)..(3274): n is a, c, g, or t
  misc_feature (3277)..(3279): n is a, c, g, or t
  misc_feature (3282)..(3283): n is a, c, g, or t
  misc_feature (3287)..(3291): n is a, c, g, or t
  misc_feature (3295)..(3299): n is a, c, g, or t
  misc_feature (3301)..(3307): n is a, c, g, or t
  misc_feature (3309)..(3310): n is a, c, g, or t
  misc_feature (3312)..(3313): n is a, c, g, or t
  misc_feature (3315)..(3317): n is a, c, g, or t
  misc_feature (3320)..(3320): n is a, c, g, or t
  misc_feature (3323)..(3323): n is a, c, g, or t
  misc_feature (3325)..(3328): n is a, c, g, or t
  misc_feature (3331)..(3331): n is a, c, g, or t
  misc_feature (3334)..(3335): n is a, c, g, or t
  misc_feature (3337)..(3344): n is a, c, g, or t
  misc_feature (3346)..(3346): n is a, c, g, or t
  misc_feature (3348)..(3349): n is a, c, g, or t
  misc_feature (3351)..(3351): n is a, c, g, or t
  misc_feature (3353)..(3354): n is a, c, g, or t
  misc_feature (3356)..(3357): n is a, c, g, or t
  misc_feature (3359)..(3360): n is a, c, g, or t
  misc_feature (3363)..(3364): n is a, c, g, or t
  misc_feature (3366)..(3374): n is a, c, g, or t
  misc_feature (3377)..(3380): n is a, c, g, or t
  misc_feature (3382)..(3385): n is a, c, g, or t
  misc_feature (3387)..(3388): n is a, c, g, or t
  misc_feature (3390)..(3394): n is a, c, g, or t
  misc_feature (3396)..(3396): n is a, c, g, or t
  misc_feature (3398)..(3402): n is a, c, g, or t
  misc_feature (3404)..(3406): n is a, c, g, or t
  misc_feature (3408)..(3409): n is a, c, g, or t
  misc_feature (3411)..(3415): n is a, c, g, or t
  misc_feature (3417)..(3417): n is a, c, g, or t
  misc_feature (3419)..(3420): n is a, c, g, or t
  misc_feature (3425)..(3431): n is a, c, g, or t
  misc_feature (3434)..(3436): n is a, c, g, or t
  misc_feature (3438)..(3445): n is a, c, g, or t
  misc_feature (3450)..(3450): n is a, c, g, or t
  misc_feature (3452)..(3457): n is a, c, g, or t
  misc_feature (3459)..(3460): n is a, c, g, or t
  misc_feature (3463)..(3463): n is a, c, g, or t
  misc_feature (3465)..(3469): n is a, c, g, or t
  misc_feature (3471)..(3472): n is a, c, g, or t
  misc_feature (3474)..(3477): n is a, c, g, or t
  misc_feature (3479)..(3490): n is a, c, g, or t
  misc_feature (3493)..(3493): n is a, c, g, or t
  misc_feature (3495)..(3495): n is a, c, g, or t
  misc_feature (3497)..(3497): n is a, c, g, or t
  misc_feature (3499)..(3506): n is a, c, g, or t
  misc_feature (3508)..(3509): n is a, c, g, or t
  misc_feature (3512)..(3518): n is a, c, g, or t
  misc_feature (3520)..(3528): n is a, c, g, or t
  misc_feature (3530)..(3538): n is a, c, g, or t
  misc_feature (3540)..(3542): n is a, c, g, or t
  misc_feature (3545)..(3545): n is a, c, g, or t
  misc_feature (3547)..(3556): n is a, c, g, or t
  misc_feature (3559)..(3559): n is a, c, g, or t
  misc_feature (3561)..(3562): n is a, c, g, or t
  misc_feature (3564)..(3572): n is a, c, g, or t
  misc_feature (3574)..(3576): n is a, c, g, or t
  misc_feature (3578)..(3580): n is a, c, g, or t
  misc_feature (3582)..(3585): n is a, c, g, or t
  misc_feature (3589)..(3592): n is a, c, g, or t
  misc_feature (3594)..(3595): n is a, c, g, or t
  misc_feature (3597)..(3600): n is a, c, g, or t
  misc_feature (3603)..(3605): n is a, c, g, or t
  misc_feature (3607)..(3609): n is a, c, g, or t
  misc_feature (3612)..(3616): n is a, c, g, or t
  misc_feature (3618)..(3618): n is a, c, g, or t
  misc_feature (3620)..(3620): n is a, c, g, or t
  misc_feature (3622)..(3624): n is a, c, g, or t
  misc_feature (3627)..(3637): n is a, c, g, or t
  misc_feature (3639)..(3639): n is a, c, g, or t
  misc_feature (3641)..(3644): n is a, c, g, or t
  misc_feature (3646)..(3647): n is a, c, g, or t
  misc_feature (3649)..(3649): n is a, c, g, or t
  misc_feature (3651)..(3659): n is a, c, g, or t
  misc_feature (3661)..(3663): n is a, c, g, or t
  misc_feature (3667)..(3667): n is a, c, g, or t
  misc_feature (3669)..(3670): n is a, c, g, or t
  misc_feature (3672)..(3675): n is a, c, g, or t
  misc_feature (3677)..(3677): n is a, c, g, or t
  misc_feature (3681)..(3693): n is a, c, g, or t
  misc_feature (3695)..(3698): n is a, c, g, or t
  misc_feature (3700)..(3701): n is a, c, g, or t
  misc_feature (3703)..(3713): n is a, c, g, or t
  misc_feature (3715)..(3718): n is a, c, g, or t
  misc_feature (3720)..(3723): n is a, c, g, or t
  misc_feature (3725)..(3725): n is a, c, g, or t
  misc_feature (3727)..(3732): n is a, c, g, or t
  misc_feature (3735)..(3748): n is a, c, g, or t
  misc_feature (3751)..(3752): n is a, c, g, or t
  misc_feature (3754)..(3760): n is a, c, g, or t
  misc_feature (3762)..(3764): n is a, c, g, or t
  misc_feature (3768)..(3775): n is a, c, g, or t
  misc_feature (3777)..(3779): n is a, c, g, or t
  misc_feature (3781)..(3781): n is a, c, g, or t
  misc_feature (3783)..(3783): n is a, c, g, or t
  misc_feature (3785)..(3797): n is a, c, g, or t
  misc_feature (3799)..(3799): n is a, c, g, or t
  misc_feature (3801)..(3808): n is a, c, g, or t
  misc_feature (3810)..(3811): n is a, c, g, or t
  misc_feature (3813)..(3817): n is a, c, g, or t
  misc_feature (3819)..(3821): n is a, c, g, or t
  misc_feature (3824)..(3824): n is a, c, g, or t
  misc_feature (3826)..(3827): n is a, c, g, or t
  misc_feature (3829)..(3832): n is a, c, g, or t
  misc_feature (3834)..(3835): n is a, c, g, or t
  misc_feature (3837)..(3842): n is a, c, g, or t
  misc_feature (3844)..(3847): n is a, c, g, or t
  misc_feature (3849)..(3853): n is a, c, g, or t
  misc_feature (3857)..(3859): n is a, c, g, or t
  misc_feature (3861)..(3861): n is a, c, g, or t
  misc_feature (3863)..(3863): n is a, c, g, or t
  misc_feature (3865)..(3868): n is a, c, g, or t
  misc_feature (3875)..(3875): n is a, c, g, or t
  misc_feature (3877)..(3879): n is a, c, g, or t
  misc_feature (3881)..(3885): n is a, c, g, or t
  misc_feature (3887)..(3890): n is a, c, g, or t
  misc_feature (3892)..(3893): n is a, c, g, or t
  misc_feature (3895)..(3897): n is a, c, g, or t
  misc_feature (3899)..(3899): n is a, c, g, or t
  misc_feature (3901)..(3901): n is a, c, g, or t
  misc_feature (3905)..(3908): n is a, c, g, or t
  misc_feature (3910)..(3910): n is a, c, g, or t
  misc_feature (3912)..(3913): n is a, c, g, or t
  misc_feature (3915)..(3917): n is a, c, g, or t
  misc_feature (3919)..(3920): n is a, c, g, or t
  misc_feature (3922)..(3922): n is a, c, g, or t
  misc_feature (3924)..(3930): n is a, c, g, or t
  misc_feature (3932)..(3935): n is a, c, g, or t
  misc_feature (3939)..(3943): n is a, c, g, or t
  misc_feature (3945)..(3947): n is a, c, g, or t
  misc_feature (3949)..(3949): n is a, c, g, or t
  misc_feature (3951)..(3952): n is a, c, g, or t
  misc_feature (3954)..(3961): n is a, c, g, or t
  misc_feature (3963)..(3964): n is a, c, g, or t
  misc_feature (3966)..(3976): n is a, c, g, or t
  misc_feature (3978)..(3979): n is a, c, g, or t
  misc_feature (3983)..(3983): n is a, c, g, or t
  misc_feature (3985)..(3986): n is a, c, g, or t
  misc_feature (3988)..(3988): n is a, c, g, or t
  misc_feature (3990)..(3992): n is a, c, g, or t
  misc_feature (3994)..(3994): n is a, c, g, or t
  misc_feature (3996)..(3999): n is a, c, g, or t
accctggaagngaacaccgcctacacctacctggtnaacgaccactggtcngcggangcngtatccggctacagcttcctgaaccttgccgatgagaccgtcgcnatcgactggcccatcgacctggcnaaggcngaactctccgagaaggaccgtaaccacccgcgnctgaacgagatnaagcccctngaagccgacccgatnctgattattggngcgggcggtcagctcggcaccgagctggttcgccagctnaccgagcagaacgtncccttcctggctgtggancgcgaccgcctcganctgggcaagcccgagcagtggngngangcnttccgntggcnntccttccgngcggtnatcaacgcngcagcntacaccgcngtggatcaggcngaaacccccgaggggcgncgngangcctgggcagcnaacgccctnggngtgagcgctcttgcctccatctgngaagaagctaacctgccgctggttcacgtntccaccgactangtctttganggntccctgcccctgggngaggaatacccggaggantaccccctggcaccgctgagcgtntacggcgcntccaaggcngccggtgaggttgccgccgccgcntggcgtaagcactacaccctgcgnaccagctgggttgttggngccggnaagaactttgtnggnaccatggcntccctggctgagcgcggtatcgacccgtccgtggtngccgaccagtggggncgcccgaccttcacccaggacctggcagcngctgccctgcacctgctcttctccggcgcngaatacggcacctacaacgtgtcgaacaccggngangtnatcaactgggcncagttcgctcgtgcngtgtacgagggnaccggccangacccggcacgngtcagcgacaccaccaccgaggnatacttcgccaacgntgagctnttcgctcaccgtccgacgaactcggcnatggacctgtccaagctgattgcngcnggnttcaccccgcgnnatcaccgcgaggcgctngccgcctacctngcagaaatgggntcctaancctctnaggnnttggcnctatatctgctganaacagcataaaaggcgtgaaaagcgccatatcacaggttcccggcccttgaagaagagccgggaacctgtacaatattgtcttggccaaggcggtggaatacacgaaacgtgtaggtccgtaactgacggtggctggttggaaagagatttctggcgccagtccctattccacttggcgcataacttctaaccaagaaagggtggacaactcatgtcagataccatcaaaatttcagctaccgtacgtagcgacttcggcaagggctacgcgcgccgcatccgcatggcaggcgacatccccgccgtcatctacggccacggcgaagagcccaagcacgtagtactccccggccacgcaaccaccctggctgcccgcgtccccaacgctatcctcgacctcgacatcgaaggtgaatcacacctcgcaatgatcaaggacatccagcgtcacgcaatccgccctgaactgcagcacatcgacctgctgaccgttaagcgcggcgagcgcgttgagattgaggttcctgtacacgttgaaggcgagcctgctgttggcgccgttgctaaccaggaagaaaccgttcttctggttgaagctgacgcactgaaggcacccgaagctttgaccgtgagcatcgaaggccgcgaagctggcgctcacgttctggcatcagacgttgaactgccctcaggcgtaaccctggttgcagacgctgaactgctgatcgttaacgtttctgagcccgaggaactcgacgttcccgagcccggtgaagaaggcgaaaacgcacccgagggtgacatcgttgaagcttccgaggaatcagatcaggctggcgaagctcacgactcagataactcaaagcactagaccgcgccctgcgcctagcgcaacaatgatttgtggatggcccgccgctacctctcttctgaggtggtagcgggccatactcatagaatggtgtagtccatgaattttctaaaaaccttttacagcgccgtggaaagggcgaagatatgtctgatgcgtggctcattgttggtctggggaacccgggcccggagtacgagaaaacccgccataacatcggccagatggtggttgatgaactggcgcgtgaagtaggcggtggcttcaagaagcacggacgcgcgcgcgcccaggtgctggaaggacgtttgggtataggcggacccaaggtagtgctggccaagcccctgacctatatgaacacctcgggcggcccggtatcggctctagcccagttctacgatattaaccccgaccntatcatcgnngtgcacgatgaactngatatccccttcgacaccattaagctcaagattggtgggggagagggcggccataacggtctgcgcgatatcaccaaggcgctgggcaccaaggactactaccgtgtgcgcaccggcatcggtcgtcctcccggacgcatggacaccgcagacttcgtgctcaagcccttcagnagcaccgaagcgaaggacctgcccttcctcatctcaaacgcagcggatgcaaccatgatgctcgtnaaggaaggcctgctggcaacccagcagcgctaccacggngcaggntcctagccntatgacccgtgccgggtaaacnctgaactgggnnaacncnnnannngggnnnnnnnnnnnncgggncnntnnntnannnngnnnnnnccnnnnnangnaananncnnganangnannangntanannnnnnnnnngnnanannnnccnnnncnggnnannannngancgngnnnngnangnnccngngnnnnannnnnccnnnncngnnnacnccccncnnnncnacnnccnnntnngcnannnnnnnnnnnnccnncnnnnnnnnnannntnnnntcnncnnnnnnnnnntnnncnnncnnnntnnggnnnnnnnnnnnnngnnnnccnnnnnnnnnnnnnncnnnnannnnnncnncnnnnnncncgnnnnctncnnngnnnncnncnnngccnnnnnccnnggngnnnanncnnccgncntnnnngnnnncgnncnnntnnnngnngcgnnnntcnncgnngccannnncgnngnnnnnnnnnnnnnnnnnnnngnnnnnnncncnnnnnnnnnngnngccnnnnacntngnnnncnnctccnnnggnancgncnnncnngnnnncgnnngtnncgcnnnnnagcnnnnngnnnnnnncnncnncnnnganatngnnnnccncgnnannnnnnnncncnngnanntnntnnccnngnnnnnnnnngcnnnncnnnncnncnnnnncncnnnnnannncnncnnnnncnannacggnnnnnnngannncnnnnnnnncgagnannnnnncnncgngnnnnncnncnnnntnnnnnnnnnnnncgncncnannnnnnnngnnccnnnnnnngnnnnnnnnncnnnnnnnnncnnngcncnnnnnnnnnnggncnncnnnnnnnnngnnncnnncnnnnccgnnnncnncnnnnccnnngnnntcnnnnncncngnnntcnnnnnnnnnnngntnnnngnncncnnnnnnnnngnnncccncnncnnnngngccnnnnnnnnnnnnncnnnncnncnnnnnnnnnnngnnnncnnnntnannnnnngcnnnnnnnnnnnnnncgnngnnnnnnngnnngccnnnnnnnngnnngncncnnnnnnnnnnnnngncnnnnnnnngnncnnnnncnnngcngnngnnnncnncnnnnnncnnnngnnnnnggannncntngnnnngggggancnnnannnnngnnnncnncnnntngngggnnnncngnntnnngnngntnnnnnnntnnnnggcnnnnncnnncncnncnnnnnnnncnncnnnnnnnnnnncnncctngnngncnnncncnnnna

SEQ ID NO: 334 - DNA, 4000 bp, Escherichia coli
  misc_feature (1967)..(1967): n is a, c, g, or t
  misc_feature (1970)..(1971): n is a, c, g, or t
  misc_feature (1980)..(1980): n is a, c, g, or t
  misc_feature (1985)..(1985): n is a, c, g, or t
  misc_feature (1988)..(1989): n is a, c, g, or t
  misc_feature (1997)..(1997): n is a, c, g, or t
  misc_feature (2003)..(2003): n is a, c, g, or t
  misc_feature (2009)..(2009): n is a, c, g, or t
  misc_feature (2012)..(2013): n is a, c, g, or t
  misc_feature (2019)..(2019): n is a, c, g, or t
  misc_feature (2021)..(2022): n is a, c, g, or t
  misc_feature (2027)..(2027): n is a, c, g, or t
cggccggagacggccggcgaacactgtgcaccatcatccaaggaaggcgtatccctcccgcacccggcgccgtatgaccggcccggccatgggtaaacacaggactgccgatgctcccggcggcgcacgcaaagcgtggccggagctgccgacggcagggattttttcacatggagaacatcgtcaacagcttcaactcgctatacaaagcataccgcaagacccgctgcgggaagcgggacaaccccacggccatgcgctaccgcatggaggccatcgagcgcacggccgacctctctgaccgcctccagcggcgcgagtacaccttcgggccctactaccccttcaaggtgtatgagccaaaggagcggctcgtccttgccatagacttcgagggcaaagtcgtccagcactcgctctgcgacaacgtcctcgagccagtattctcccggcgcttcatccgggacaactatgcggggcagatcggcaaaggcacccacgacggcctcgaccgtctggccggcgccatgcgccactactttttcagccggaaggcagcagacgaggaggcccggcgggccgccggcctgccataccggccgatggaggagtgggactacgccgagggctgggtgctgaaaggtgacttttccaagttcttttacaccctgctgcacgccgtctgcttcgagaaggcccgcaaggctctggccttcctgtctgacgaggagctgatcgacttcgtcgagtggctgctctggatcgtcatcgacagcacgccagaccccgggatccccatcggcaaccagtcgagccaactgctcgccctgctctatctggacgacttcgaccactggctgcgggatggcctcggcctcgtctatggccgttacatggacgacttctacatcatcagcagcgacaagctgctgctccgggagatcctcaagaagatcgaggcgtacatcaagccgctgggcctgcgcctgaacggcaagacgcagatcttcccgctcaagaatggcatcgacttcctcggcttccatacctacctcacgagcaccggcaaggtggtcaggaaggtgagggccaagagcatcgacaacatgaagcggaagatccgcaagttccgcggcctcgtggacaggggcaagatgacgctcgagagcgtgagccaatcctacgcaagctggacgggccacatctcgcacggcaacacctaccacctgcggcagaacatggacgcctatttctacgcatacttcccggagctaaaacctaccgaaaggagacaagactcatgcctcaaaccctcggaagccttgccaacaaggcaaaaatcaagttcggcagcctctacggcgcgccgatcatctggatcaaggccgacaaaaaccacgccggctaccctgccaacagcgtcaccctcgtgaccaaccagatcatcaagctgctgtgcttcgacgcgaaggagagcgccaacggcaacagcgaccgccgaaactacggcaacaaccgctacatctactccaacctgcgccagtggctcaacagtgacgccgccgcgggccagtggtacaccgcgcagcatagcgcagatgcgcctccgagcacggccaacgtgtgggacggcgtcaaccagtaccagaccctcgccggtttcctcaatggcttcacggccaacgagcgggccgccctgctcgccaccaccatcaccgtcggtaagagctccacggacggcggcgggacggagacctgcgtggacaaggttttccccctgtcctgcaccgaggtcaacctctcgggcgaccatgtgtgcggcagcaagctggcgatcttcagcgacaactccagccgcatcgctaccgtgacggcatcctgcgtcgccaattccaactacggcagcaacccgtcggcaaatcaggcgtggtactactggctgcgggacgcctatgccgggtcggccngcnncgcccgctncgtcnggnncgatggcncgctgnactggnacnncgcctncnncggcnacggcggcctgcgccccgcttgtaatctgtcatccgatctcttggtctccgataacaccgactcggacggctgctacacaatcgtctacaaccagccgcccacggcccccggcaccatcactgtcccgagcgaggtcatcggcggcgaaaacctgagcatctcgtggggacagtcgaccgatcccgacggcaacctcgccggctacaagctggagcgcaaggtggacgacggcacatgggcgcagatttacagcggcagctcccggagctacacggactccatcacctacggatggacgagcgtgcagtaccgcgtcaaggcatacgacaccgccggggccgagagcgcctacaccaccagcgccgtgcgcaccgtcaccaacaaccggccgcccgtcatcagcggcagcgacaccgacctcggcagcttcaccaccacgccgccctcctatgagtacaccgtcaccgacgccgacggccatcaggtcacggtcgtggagaagctggacaccaccacgctgcgcacctacaccgctaccctcggcgacaccaacgagctcgagatcacggccgaccagtggctcaagctgctgaacggcgaccacaccctgaccatcaccgccaccgacgccaagaacgagagcaccgtgcgcaccctttccttcgacaaggccatgcactcggtcgagttcgagcagaccgtggcgatggcggccgacgatatgccgaccaaggccctcgtcaatattcagggcagcttcccgaccggcagcacccttcaggtctggatctgcaacaacggcaacgacgccgagcccacatgggaggacatcaccaccaaggccctgaccagccagaagcactttttcaccaaccagaccaagaccgccgcaagctggggcgtgaagatcaaggtcaagctcctgcgcggctcggccgagggcgactgctacatccagtcggtcggcggcaacttcgcataaaccaacaccccaagaccagaaaggaggagcagcatggtctacttcatggaacacagtatcaaagccatccacgagaaggagcaggccgccgccggcggcgggggcggcacctctcccgaggacaaggagcggatcaccaagctcgaggacgagctcgaggatctgtctggcgccattgaaagggggctgaccacatgagcgacaagtacagcggcctcgaggccgccctgcgcagcgcccgcatgaccttcgtgagcgaggccgaggccggcgaccgtaccggcaccgagatcatcgcctgcgaggatctgctgccagcgtggacgaaggccggccccaagggggatggcagccacgaggtcggcgaagcctgcacccacgacgggcagagctggcgctgctgccaagcccacaacaccaacaacaacccggacatcgagccgggcaagagccccgcacagtgggtgccctaccacaccaccgacccgaagaaggcgaagcccttcattcagccgaccatggccgaggacagctaccagaagggcgaggtctgcatctggactgatggcaaggtctaccgctccatcatggagggggccaacgcatacagcccggaagcctacccgcagggctgggaggtcgtcgaggtcgaggatggaggtgcagcatgatccagcttgacatcgggcagctcgtggccctcatggggatcccgtcggccatcacgggcctgtgcttctggatgatccagaggcagctctccaagagggacgcagagctcgaccggcgcgacgccgcccgggagagaaacgaggtgctgctcgtgcgcagcgtgggggccgccatcgcgctcggcgaggccacggccaccgccctgaagaacggccacgccaacggagagaccgaggcggccctccagtatgcgcagaagatcaaacacgagcagaaggacttcctcaccgagcagggcatccacgcgatctactgagg

SEQ ID NO: 335 - DNA, 4000 bp, Escherichia coli
  misc_feature (1986)..(1987): n is a, c, g, or t
tcaatgatgtggccggcaattgcacccgcttcctgctgctgcgccgcggggagcgcgctgccgaggggccgatggccagccttgccttctcgctccactccaaccagcccggggccctgctcaaggcactgggctgttttgcccagcgcgggctgaacatgagccgcatcgagtcgcggccgtcgaaacgggagatgggggaatacatcttttttgtcgatctggagctgcccgagggctccacgcccctggaggcggccctggccgagttgggccccctctgcgagcacctggccctgttcggggcttacccgctcaccaaccaggcttgacgccacggaacacgccgaactgcatcaggccggtggcaaaggcccagtgcatcagcaggatcgtgggagtttcccgcaggccctgcaggacggctcccggtccgagcccaaggatggcccccggccgccgcaccccttcggcgatcgagtcgatccaggaggggagggtggcccgggtccagtcatcggtgtccacagccatcccgccggcgtagcgactctgctcaaggtgctggcggaggccgcggatgctggcgaattcgggatgggcccactgctccagcaactggcgcatcacccagcgctctcggcgggtcatgacgccatcggcgggatcgcgccggttccaatcggccacggccaggaggccgccgggtttcaccacccgcagcagctcatcggcgtagcgttgcttgtcgggcatgtgggggcaggcctccacgctccacaccgcatcgacgctggcgtcggccacctccagggcgagggcatccatcaccgcgaagcggcagctgaggtcggctggcgtgagcgcctgggcccgggcgatctgggctgggctgatgctgatgcccaacacgttgaggccgtaatcgcgggccaggatgcgggcgctgccgccgatgccgcagcccacatcgagcaccgtcgacccggcgggaagccggtcgaggccgctccagcgcaccaattcatgcacgaaggtctccttcgccgcccggaagtcctggcgcccacttggggtccgcccggagtcgcggtagtagcccaggtggatgtggtcaccccagaggcgttccagcagctggtcattggtccagcggtcgtaggcgtcggccacgctggcgctggattcgtagcggcgccgacgctgcagccagatgcgggtggccacggcgatggccgcggcaaggagggctccagccccgatggtggcggccaggggccagctgaggagggtcatgaagccgcttgctggggctgggattattggggctggaacgtgtccttgagcacggtgcgggccgccaattgacggcgggtctggtcgagaagctcgtactcctggcgcaaccgctcgccggtgtcggtgatttccagcagcgcctgctggtggtcggccacgggcccacccaggtgggcgccgatccagaacgacagttcccggggcagctcgggcagatcgttgggcaggctggcgggcttgccgatcagcttgcccgtgagctccaccacatcccgcagggcctgaccgaccgtgccggccagttcgtccagctcggcagggccggcttcggggtcatcttcaatccagctcaccaggcccacccgaaagggtgcctcgcgcacaatgtcgagcacgcgaaagcgctgctgacccatggtcacgatgttgctgcggtcgtcatcctgggtttggcagtgcaggatctcagcacagcagcccacgtccgccatggtttgggtctggggatcccagcgcaccaccccaaaacgctggtcaccggccatcaccgtgcgcagcagcatccggtaacggggctcaaaaatgtgcagtggcagcacttcctgggggaagagcaccacatccggcaggggaaacagtggcagctcccgtacggccagttcacccatggcttgatcaggaggtgcnnaatcatcctagaaaaaatgcccccgccacgcgccggcgtgacaggggcaaagaacctggaggagcgaaccctgatccggtgatcagagcttgacttcgatgtcgacgccgctgggcagatccagcttcatcagcgcgtcgatcgttttcgccgaagggctgtagatgtcgatgatgcgccggtgggtgcgggtttcgaagtgctcgcgggagtctttgtcgacgtggggcgagcgcagcacgcagtaaatcttgcgcttggtgggcagggggatggggccgatggccgtggcagcggtgtgatcggcggtttcgataattttttcgcaggagagatccagcatgcggcgatcaaacgccttcaggcggatgcggatcttctgctgagcgatggcggtggacatgggagatcagactcggaacggtcgtcaaggggctcaagcctggccagccgggtggctgatggagctggattgtcgaggtgctgggaaggggtgagcccggtggacccaccccatgaaacttacctcaggctcaggcgatgatcttggagaccacaccggcaccgatggtgcggccgccttcgcggatggcgaagcgcatgccctgctcgatggccaccgggcagatcagctcgccggtcatcttgatgcggtcaccgggcatcaccatttccacgttcgcaccgtcgtcggaggtgaaggccgtgatctggccggtcacgtcggtcgtacggatgtagaactgcgggcgatagccagcgaagaagggggtatggcggccgccttcttccttcttgagcacatacacctcaccctcaaacttggtgtggggggtgatggagccgggcttgaccagcaccatgccgcgctcgatgtcttccttctgcacaccgcgcagcagcagacccacgttgtcgccggccatgccctcgtcgagcagcttgcggaacatttccacgccggtgacggtggtttcgcgggtgtccctgatccccacgatctgcacggtctcgccgaccttcaccttgccgcgctcgatccgaccggtggccacggtgccacgaccggtgatcgagaagacgtcttcgatggccatcaggaacggcttgtcgatttcgcgctcgggctcggggatcgactcgtcgacggcatccatcaggtcgaggattttgtcgacccactcgtcggcgccacgctcagccttgttgccagcttggatgtactccagagccttcagagctgaaccagccaccacggggatgtcgtcgccggggaagtcgtagctgctgagcagttcacgcatctccagttcgacgagctcgaggatctcctcgtcgtcgaccatgtccttcttgttgaggaacaccaccagcgcgggcacgcccacctgcttggccagcaggatgtgctccttggtctgggccatcgggccgtcggtggcggccaccaccaggattgcgccgtccatctgggcggcaccagtgatcatgttcttgacgtagtccgcgtggccggggcagtccacgtgggcatagtgacgcttgccggtttcgtattcgacgtgcgcggtgttgatggtgatcccccgctctttctcttcaggggcaccatcgatttcgtcgtaggcctgggccttggccatgccttgggatgccagcacgttggtgatggcagccgtcagggtggttttgccgtggtcaacgtggccaatggtgccgatgttgacgtggggcttgttcctttcgaacttctcgcgtgccatgagtggaaagaatcgggggattaaagggtagaggagagatcaggaattgccctgattcttggagatgatggcctcagccacgttgcgaggaacttcctcgtaatggctgaactccatcgagaaaataccccgaccctgggtcatggatcggagctgggtggcatagccgaacatctcggccaggggcactttcgactggaccttggactgcccattgtcaatggactgcccttcgacctggccgcgacgg

SEQ ID NO: 336 - DNA, 4000 bp, Escherichia coli
  misc_feature (678)..(678): n is a, c, g, or t
  misc_feature (807)..(807): n is a, c, g, or t
  misc_feature (2018)..(2018): n is a, c, g, or t
  misc_feature (2965)..(2965): n is a, c, g, or t
  misc_feature (3844)..(3844): n is a, c, g, or t
gcactctctgaaagtccaataactcttggacaaagcattgattccatctcactatcttttagaattgtttcacaccaaagatgcccctgaatacccataatattagattcaagttctggctcatcttcaggaataatttgccaatcaacagaactctcaaaaggtatcacagctgcccaatttgcccctcgatcagcatagtttctactttgagccatatcaaaataaatgttctcagctggacacaagaccactttatagccttgtcttgctagatcaaaaccagactcaagattctgccatgaaaataataatttctctgacttatcgtcatgatgattgccatcttcagcctcctgccaagaggcagtttttttgttatttaactctactctttttgaaagcttattgataaaccatgaagcaacatctttagcactgttaagatcatgctctttcattaagtcttgtactttaggagatttttcccaagcgcccggcgctacttcatccccacccagatggatatattccccaggaaatagattacacatatcgtctattaaagactcgacaacctttatggtttcaggcatggctggattcaacgtgttctctctatagccttgaactgaaacttcattacttttgtcttcagggtctctcatctcagggtanaagttaattagcgccatattatggcccggcaaatcaaactcgggtatgacttcaatatagttagctgaggccctactaataattctatcaatatcttctttgtcataataaccaccagttgcatctganccagatccgaaaacaggtggtactaataaattatttcccctttttgaagtttcagtagcagcttcaggataactatctaatttaaatcgaaaggcttcatcatcgactccatgccaatgaaacttattcagcttgaaaagactcattaaatctagtaatttaaataaactgtctaccgagaaaaaatgcctcacagtatctaaatgctgtcctctccaactaaaacgaggcttatcaaagatagaaccacacgggactagctgatgataattttgggaaagctgcatcaaagagacaagagcataataaaagcctgattcatcacctgatacaatctcaacatcatcactcgttatggtaattttataggcagagtcatcagaaagatcctgaaaagttagctttagtgatgtggttgctttcttatttatctcgtttgttgagttagataaaagattgagattaagtcgattaccaagttctaaagctgattgataggcacttgttattatttccagattttcaaacgctacattaatcggcgaacacaggttacaaacacctgcacttggattccatgagtaagggtgtggcaccaatctaaaagattcataatttaatttatctcccgaaaaattgggaattggcgccacggaggagattctttctagatctaaatctatcatttcaagattgatcagatctccattatctttttttaaaaaacagccttggggtgaccatcgatgattcataggcttgtgcctagactcttcataggcatatttaaaactccactgttcaccaggctttaaaatcaactcttcagaatgacataactctgtataaccacctgaacttttgacgacactacaattttcaatcgcttttgaaggtgcaagtaagctaaaacaaaacctaaaattctctatcgagttatcagaattattgctcaagcttgaacaaaagtaattgtctgaattgattgatgtagtcatcacaaaaccagttgtattcatcgttatttatctttctcaaaatagactcattgcagcgtctaattagcacttagtctagtaaaaattggtaatataatggtattatataacaggtactaaataaaaagcaaataagatttattgattagtatttaattaatctcataaagatcatttaatccaatatatatgattattatatgggtaataaangcttttaaatattttatattcttgttattgactttctttagactattagaatataataataccaattaaataccaatttaactaaaaatgctgttaatttatttaacagcttaattcaatcatatggtgagtgctgacaatttaattaacttcttaagaccatctggtgatagttctgaatctctatacaaacaattatctcgctcactaaatagtgccattcaagagggaattttaaagcctggtgatgcgcttatgccagagagggatttggcttctaatttaaaaatgtctcgcatcactgtccgtaaggcgatagatcagcttgtagaaattggaatgcttattaagagacaaggtgctggaacagttgtatctgaaaatgttgaccttgttcttcacaaaaacctctcctctttaaatagttttaccgctgatatgaagaaaagaggccttgagtcctactcaagaattactcttagagaggaaggcaaagctaccgcgaaggaagcgttgataatgaacttaaatgaagatgactttgtgcatagactcaatcgagttcgatacctagttaatgagccacttctttatgaaatagctgtcatacctgcgtcaatcatttcaataacctctgccattgacaattctttatatgaacttcttgaatccaaaaaaatgaacccagtcactgcaaaacaaaatattcacgcgattattgcagatgataatttagctgataagcttgaagtcaatcctggaagtgctattttatttgttgaaagaaagggtaaagatgccaatggtcgagtggtcgaatatacccaatcctactatcgtggtgatcgctatgattatgtggtcgaattaggatgaaacaagcaatcacaggctcgaagcttttcaacggtatagattttattgagcataaagcactcctcattgangatcaacatattgctggaattgtaaatgaagatgctatacccactgacttccaagtcaaaaaactagaggggggcatcttgtctccaggctttattgatcttcaagttaatggaggtggtggaaagttatttaataactctccagacaaggaaagccttaatacaataatatctgcacatcaatattttggcactacaagtattatgccaacagtcatcagtgactcgttaaatattttgcaaaaatgcactgacactatctctaacgagattgataataatcactcactacttggcattcacattgaggggccatttttcaatgtaaagtatagaggggtccaccaaaaacaatatattaataccattaatgcttcatatttaaatctatttgagacactcgataagtttccagtcatgcttacgcttgctcccgaatgtatatcgatcaagcagcttaaacatcttaagtctttaggttttaaaattctggcaggtcacaccgacgcaaactacgatcagctcgaagaagcggttaaatatggcttagatggcttcactcatctctttaatgcaatgggccaaatctcagcacgggagccaggtgttgtcggatctgcatttgattttgatgaaacatccgcaagtattattgttgatttacaccatgttcatccttctttaattaatctctcgttcaaacaaaaaccaaaaggaaaactcttttttgtctcagattctatggcaaccattaatcatggggagccctcatttgagctttatgatgaagtggttagtgagtcaaatggacgcattattaattcagaaggtaaacttgcaggctcatccattactcaaattgatgccattaaaaatgcntatcaaaaatgcagcattcccctcgaaagtgcaatctctatggcaacactttatccagcagaatatttaggtgtgtctgactatattggccagttaaaaaaagggtaccgagcagatcttgctcattttgactcaaactttcatgtacaaaatgtt

SEQ ID NO: 337 - DNA, 4000 bp, Escherichia coli
  misc_feature (1969)..(1969): n is a, c, g, or t
  misc_feature (1974)..(1974): n is a, c, g, or t
  misc_feature (1980)..(1981): n is a, c, g, or t
  misc_feature (1989)..(1990): n is a, c, g, or t
  misc_feature (1996)..(1996): n is a, c, g, or t
  misc_feature (2001)..(2002): n is a, c, g, or t
  misc_feature (2022)..(2022): n is a, c, g, or t
  misc_feature (2035)..(2035): n is a, c, g, or t
  misc_feature (2041)..(2041): n is a, c, g, or t
ggcgatcaactggcacggacggctgacagccttgatctgttccttctcggcatccgtcagcgtcaccgcctgccatccgatgtcggcatgctgctctagcatggccgcgccatccggcacgaacacgtaatgccagccgttcagttcggccagttcgatggcctcattggtttcggtgttgcggaagtacagcgtggtgccgtcaggcccaggcgtggtaactcgctggtatttatggattggcatgtcggttcctcgcagaagggatttgagagataagctcgggccgttcgtcgcggatacggcggcacatgtgagcatgactcgacgtgcgcaatgcgttgccgagaatgctgttcaggctgggtacatcgcacgctttcaggctgcggctgaatcgaaacaggctgtgcttgcgcacgaaccgtcgcttgcgccacgtcctgaaccccacgaaattgacgccacgactgacaggtgcaatcgtccagcgagagagcgtcaaggcaagattggccgtcagaaagccgatgatcgtgtcgcgccgttctatggcttgctcacgggtatcgcaccacagaatgaagtcatcgacgtagcgcacgtacttcttgatcttcatctcgcgcttgacgaagtgatccagcggatcgaggtagatcagcgcgtacaactgcgacagcagattgccaatgggcacgcccagcgctcccttgccgtcgtcggcaaactgcatcatcagatccaccaggcgctcgtccttgatcttgcgttcgatcagcttgcgcaagatgtcgcggttgatgttgtagtaaaagcgccggatgtccagttgcagcgtgaagctgtcggccttggcctcgcgcagatactgctgcgcccggtcgcttgccatgtgcgtgcctttggccacacggcagccgtagctgtcgtggatgaacacgcggtcaaagatcgggttcagcagcccatagatagcgtgctgcaccaccacgtcacgaaaagccggtgcgctgatctggcgcggcttgggttccatgaccatgaaatgccggtacggctgcggcttgtaggtgcctgcatgcagttccttgtgcagcgcctgcaagttcgcgcccaagtcgcgctcgaagcgcatcaccgagaacgtcttgcgcttgccgcgccggcctcgctcataggcggcatacagcgcctccatcgaaaagcactggtcaaacagattgccgtggcgtttaggcatggctgacattccccgtgggtactagaaagccattcccggcagatttcgccaaaaggctggacggaaagctccctatgtctccagttttcccatagcgggatgtcagggatggaaacgtagtcgccggcacggaagccaacgttgttgttgtcattcgaccggttgttgttccaattgcggtagaacacgcccgcattcgctgcgttgttccagttggccgcagatagagcgaacaggcacacattttcaagcctccgcccaattcgcaggtttcaagctgcgaatccatcctccgatcatcgcgccaagctcattgacgagcacggaaatggcggtgtatcggcgttgcgcttccgtgcagccacggtcgcgcttgtgattgtggaagtcgtaataccccaactcgaatgaaaggttaatcagcatccgaagctgctcatgccgcacgtccaacttggtcaggctcgtcttgttgtgataccgcttctggcactcggccagcagggcatacacgtcataggcagcctgacggatggattggcaaaggccgtatttctcgtgctttggaaagtgattcagatgcacgttgagcaacagaatcatctccctgcacttgcagagaatggcggcttcgggatgggtgtgtgtcgtcattggtattgaggcggggctgtcgccccgccaacatgcttacgatccataggcgccggcacggaagccaacgcngccgntgccanncgaccggnngccgcnccaanngcggcagaacacgcccgcanccgctgcgccgcnccagtnggccgcagagcgagcgaacaggttggcgcggttgtactggtagcagccgtcattgccgaactggctggttcccgttgcgtcggcgccgctggtggcgttctgaatgccgcaggccgtgcgcttccagctaataccactggtcgctccgctgaacacctgattgctgccgctgccgaagtacgtccatccggtagtgctgccccacgggaacagcccggtttccaagttgtacttggtggccagatttgtcgtgtcgccccatgcgtcgtttgttccgttccagccgtaggtcaggctggacagggccacgctggtattgaggacgtaggcgttgccgtctgtcttttgcgtcgtgtcggtggcgctggtgccagcattggtgatgccaagcatgacctgatacaaggcgccattgaggtcggccacaccgcatgactgtccgttgtgcgtggtcttggcaaacgggctgccactgccggtctttggcttggcgctcgaaccactgtcgcctgccgtggtgaaggtgacgccggcatcgttggtgtctgccagactgccgttgttgcagcccttcgggaaattgttggtggcgtcgtaccaggcacaataggtcgtattgctgctggcctgggcgtgtgccagtgccagcagagaaagcgccgagtacatgaacaccgaagccacgttgaacgtgcccactccccgcgaacgggccagcaacacagcatcggcatagatgccagtgcatgagccttcgccggtcgtcataccgttggagttggtgtaggtggccgtggtcgtcagcgagatcggcacgccattggcgactgacttgcagctcgtcgtgccgttcttgctggccagatacttgtcgataaagaagccagatttgtcggcgccgccgtccttgaacgcccggtgcatggcatatcctgccgtgttggccgctgcttctgtcgcgtaggtgtcgatgcccacgatgtcgatagcgttggcgccataggtggcatagcgcgggctggccgcgttgccgatgcggtagtagaaacgcggcacgaacaccatgatcgagccgtcgctgtactggtagttgccgtaattggcgctggccttgtccgatgtgccggtcatggccgagaacccagacggcaatgtcccgctgtactcgccaaccccgaagccctgcccgccctgtgtgccgatcagccctccgaacgtcgccttggtgacgaacgtcgttcccgtcgaccagcttgagacgccgttgttggtgccacggtggcgcacgcgccaatagtaggtctggctggtggagaggccggaaaccgtccaggtggtcttgttggtggcgtccgcgctcgtgctctgcacgatgttggtgaagccggaatcggtcgccagttgccagtcagagttcaggtgagtgtccgacaggccgaaccaggcgaaagccgaactggtgagcgtcaccgaactgttctggtcggtggcgccattggtcggcgtgctgttggtgggggttgagacgccagccggttgaatggcaagactgaatgcggtggccacatcatccatggtcacggtcagcgtgaccgtttgcgctgtgcttggcgcggtgaagctgatcgtgtcgcccgtgatgctcacgctgccggcgcttacctgcaccacgtagctggaaaacacgttgtagttggtgatggtgtatgacttggactggctgacgtagatcgtcgcatcacccgacagcgccactccgacaccgccttgaatggcgatattgccagcgccaaggatgctctgcccgttgatggtcttgatgttggtgcccgacaccagatccacctgatattgcgggtgcgggtcgcctgctgcttcgtgggctgcaacagcggcggcagccgtgccggtgttttccttgccgttcagcgccgtttgcgtggccgtgctgacgggctt

SEQ ID NO: 338 - DNA, 4000 bp, Escherichia coli
  misc_feature (61)..(61): n is a, c, g, or t
  misc_feature (70)..(70): n is a, c, g, or t
  misc_feature (72)..(72): n is a, c, g, or t
  misc_feature (88)..(88): n is a, c, g, or t
  misc_feature (100)..(104): n is a, c, g, or t
  misc_feature (110)..(110): n is a, c, g, or t
  misc_feature (115)..(115): n is a, c, g, or t
  misc_feature (118)..(118): n is a, c, g, or t
  misc_feature (120)..(121): n is a, c, g, or t
  misc_feature (126)..(127): n is a, c, g, or t
  misc_feature (155)..(156): n is a, c, g, or t
  misc_feature (159)..(159): n is a, c, g, or t
  misc_feature (162)..(162): n is a, c, g, or t
  misc_feature (169)..(170): n is a, c, g, or t
  misc_feature (175)..(175): n is a, c, g, or t
  misc_feature (178)..(178): n is a, c, g, or t
  misc_feature (181)..(181): n is a, c, g, or t
  misc_feature (199)..(199): n is a, c, g, or t
  misc_feature (204)..(204): n is a, c, g, or t
  misc_feature (233)..(235): n is a, c, g, or t
  misc_feature (241)..(241): n is a, c, g, or t
  misc_feature (246)..(247): n is a, c, g, or t
  misc_feature (255)..(256): n is a, c, g, or t
  misc_feature (285)..(285): n is a, c, g, or t
  misc_feature (287)..(287): n is a, c, g, or t
  misc_feature (309)..(309): n is a, c, g, or t
  misc_feature (317)..(317): n is a, c, g, or t
  misc_feature (322)..(322): n is a, c, g, or t
  misc_feature (353)..(353): n is a, c, g, or t
  misc_feature (378)..(378): n is a, c, g, or t
  misc_feature (410)..(410): n is a, c, g, or t
  misc_feature (457)..(457): n is a, c, g, or t
  misc_feature (473)..(473): n is a, c, g, or t
  misc_feature (485)..(485): n is a, c, g, or t
  misc_feature (489)..(489): n is a, c, g, or t
  misc_feature (510)..(510): n is a, c, g, or t
  misc_feature (519)..(519): n is a, c, g, or t
  misc_feature (688)..(688): n is a, c, g, or t
  misc_feature (712)..(712): n is a, c, g, or t
  misc_feature (717)..(717): n is a, c, g, or t
  misc_feature (1178)..(1178): n is a, c, g, or t
  misc_feature (1281)..(1281): n is a, c, g, or t
  misc_feature (1352)..(1352): n is a, c, g, or t
  misc_feature (1368)..(1368): n is a, c, g, or t
  misc_feature (1985)..(1985): n is a, c, g, or t
gaagggcgtgaattttgccacagcacccagtaatcagcaactaattgtgactgaaataatnagtttatancncatctttttctggatntaccgctgctannnnnaagacntcacncgncnnccctnnaagtctagtttgatattagactagaatnntcntcntaattannatggntantcnaaaatcggcgtaaaactnactanttaaaaagcctttaaaaccaaacaacaannnctaatncattnnaaggacgnntgcagatggccaatgaatacccaattggnanagaaggtaagccttggggtacnaaagaganaaccntatggctaaatcaacagtcgattaaacgacngtatgctgatgaagttttggtcacnattgactctttgcgagatgatttcgagctagnccaatatggtactttgccttacgaccaaaatcgctacccgctatacntagcgaagaccaaaanctggcaagccanttcnccaaccgtgttggttactggnggcgtgcanggatatgaaactagcggtgtccagggagccctagggtttttaactggcaaggccaaagactatgaatcatcttttaatttagttgtcgcaccgtgcatcagtccttggggttatgaaaccattaatcgttggaatccagatgcaattgaccctaatcgttcatttatgnccaacagtttgtcagcagaagctnctcanataatggcctatgttaatgctcagcaatttaatctgcttgctcattttgacttacacgaaacaaccgatacagataattctgaattccgtcccgcattagccgcccgagacgcggtatttcaggcagtttgggatatccctgatggattttatactgttgatgactcatcccgtccgaagccagcattccaaaaagcgataattgactctgttgaatcagtgacccacattgctcaacctgatgaacagaataaaatcattggcgctgatgtcgctcaaaaaggcgttatcaactataacaaacgcaaactatttttatgtggaggttttaccactgccgactatgttaccaccaccgaggtttatcctgacagctcatcagcgacgccaagacaatgtattgatgcccaaattgccgctatttgtggtggtttaaattatttaatgacccgcgctagcgnggttaaagtttgacaaatatttgcttgcggtagagaacccaagcaacagcataaaatacgagggtgaaacataaggcatacaccaacgagacggctttatctngcaccagtgattgcaaataactaattaaaatgccataaattgaccaaaaatctatcggagcacgtaaaagntcttgcatcacacacncaataaaacgatgattccgcccctaaaatacaactaatcgattgtcaaagtttatgtcagctgaaaaaaagcaggttaatgcgtctcccgactcccaatccgttgctctaagaaacgcattgggaagcttcgctacaggaataacagtagttacagccttaggggtaaacgagcaaaagatcggcatgaccgtgaatagcttcaattcagtctctctaaatcctgcgcttgtgctgtggagcatagataagaaatcaaactgttttagcgattttattaaagccaaatcttatgccattcatgtgctaagccatgaacagcaggctatttctgatcagttcgctcttagcggagaggataagttttcaaatttgcaatgcactagcggactcaataatgtcccaatacttccagatttcagcgcatgttttgagtgtagcatcgagcaccaatttgagggtggcgatcatataatattagtaggaaaggtattaaaatttgaggacagaggtagtcagcctctagttttttatcggggaaattatacttcattttagtatttaaatcagtaacttaaatgtttaacttcttagtttaaattaagtttaaaccatggnttctggattatcaggtttacgttgacgtaaacgtaatattcatttaagataagccctttcttagagcgaaaggaaagacttagcgatgcacccctcaaccgttacagtcgaatatagtattagcgacctatgcaaagaattcgacatcacaacccgtactattcggcattatgaggatttaggtcttttgagcccttctcgtcgcggccaatcaagagtctataccccctcagatagaacccgattacgcttgattcttagaggtaaaagacttggattatctctagaggactctcgtcaaattatagatatgtacgagcctggtaagactaatattaatcaactaaacactttgatcgacgcaattcgcgttcaacgcactaaactcaatcagcagcttgatgatatcagcaagctattgaaagacctcaatgatgcagaagccaactgtgttattgctctcaaaactaatggacagaactaacctatgaataccccctacccgacactgaactttaacctaggtgaagacatagacatgttgcgtgatagcgtgttccagttctgcactcaagaaattagccctcgtgctgacgatatagatagcagtaacgaatttcccatggacctgtggcgaaaacttggcgacatgggactcttggggttaacagtggatgagcaatatggcggcacgggcatgggataccttgcccacagtgttgccatggaagaaatatctcgtgcatcagcctctgttggcctgtcttacggtgctcattctaacctctgcgttaatcaacttcacaagaacggcacagaacagcagaagcaaaaatacctgcctaaactctgctcaggtgagcatataggggctctagcgatgagcgaaccaggtgctgggtccgacgttgttagcatgaaacttacggctcaaaagcagagtgatcattatattcttaacggcaataagatgtggattactaacggtccagatgcaaacacttatgtcatatacgccaaaaccgatacctctgcaggatctcggggaattacagcatttattgttgaacgtgactatcccggcttttcccgccatcaaaagctcgataaattgggaatgaggggttcaaacacctgtgagttggtttttaatgactgtcaggtgcccgtagagaacgttctcggtggcgaaggtcgcggtgtagctgttcttatgtcaggcttggattatgaacgcaccgtactctccggcggccctgtaggcatcatgcaggcctgtctagatgtcgttctaccctacattcacgatcgtaagcaatttggtcaacccattggggagttccaactcatgcaaggtaagatcgctgacatgtatgcggacttgaatgcgtctcgtgcttatctttatgcagtcgctaaggcttgtgatctcggtcaagactctcgtaaagacgcagcagcagtaattatgtttaccgctgagaaagccacgcagatggccctgcaagcaattcaagctctgggcggcaatggctacactaatgaatactccaccgggagattgcttagagatgccaaactctatgagattggagctggcacctctgaagtgcgcagaatgctcatcggtcgcgaattatttaacgagagcgcctaagaggtaaccaatggccattattaaaagtaaaataaatatcaatagtgccgagttttctgcaaatacagagaaaatgaagagtcaggtagacgatctatgcctgactcttgagaaaatttacttaggcggcggtaaaaaagccagtgaacgtcacttaaaccgcggcaaattattgcccagagaacgggttcaggggctccttgatcccggctcgcccttcctagagctatcaccattagctgctcacaacgtgtatgacgatgacgtaccggctgcgggaatcattactggtataggtcgagttagcggccaagaatgcgtgatagtagctaatgacgccactgtaaaagggggaagc

SEQ ID NO: 339 - DNA, 4000 bp, Escherichia coli
  misc_feature (1)..(83): n is a, c, g, or t
  misc_feature (85)..(145): n is a, c, g, or t
  misc_feature (147)..(149): n is a, c, g, or t
  misc_feature (152)..(185): n is a, c, g, or t
  misc_feature (187)..(215): n is a, c, g, or t
  misc_feature (217)..(217): n is a, c, g, or t
  misc_feature (219)..(221): n is a, c, g, or t
  misc_feature (223)..(235): n is a, c, g, or t
  misc_feature (237)..(244): n is a, c, g, or t
  misc_feature (246)..(350): n is a, c, g, or t
  misc_feature (352)..(387): n is a, c, g, or t
  misc_feature (393)..(435): n is a, c, g, or t
  misc_feature (437)..(438): n is a, c, g, or t
  misc_feature (441)..(451): n is a, c, g, or t
  misc_feature (454)..(494): n is a, c, g, or t
  misc_feature (496)..(530): n is a, c, g, or t
  misc_feature (532)..(537): n is a, c, g, or t
  misc_feature (539)..(587): n is a, c, g, or t
  misc_feature (589)..(610): n is a, c, g, or t
  misc_feature (613)..(622): n is a, c, g, or t
  misc_feature (624)..(635): n is a, c, g, or t
  misc_feature (639)..(642): n is a, c, g, or t
  misc_feature (645)..(645): n is a, c, g, or t
  misc_feature (648)..(656): n is a, c, g, or t
  misc_feature (659)..(660): n is a, c, g, or t
  misc_feature (662)..(664): n is a, c, g, or t
  misc_feature (666)..(674): n is a, c, g, or t
  misc_feature (681)..(683): n is a, c, g, or t
  misc_feature (686)..(686): n is a, c, g, or t
  misc_feature (688)..(701): n is a, c, g, or t
  misc_feature (705)..(705): n is a, c, g, or t
  misc_feature (708)..(713): n is a, c, g, or t
  misc_feature (716)..(716): n is a, c, g, or t
  misc_feature (718)..(718): n is a, c, g, or t
  misc_feature (720)..(723): n is a, c, g, or t
  misc_feature (725)..(732): n is a, c, g, or t
  misc_feature (735)..(735): n is a, c, g, or t
  misc_feature (737)..(739): n is a, c, g, or t
  misc_feature (741)..(743): n is a, c, g, or t
  misc_feature (746)..(746): n is a, c, g, or t
  misc_feature (748)..(749): n is a, c, g, or t
  misc_feature (751)..(752): n is a, c, g, or t
  misc_feature (754)..(754): n is a, c, g, or t
  misc_feature (757)..(759): n is a, c, g, or t
  misc_feature (761)..(764): n is a, c, g, or t
  misc_feature (766)..(766): n is a, c, g, or t
  misc_feature (771)..(771): n is a, c, g, or t
  misc_feature (942)..(942): n is a, c, g, or t
  misc_feature (945)..(945): n is a, c, g, or t
  misc_feature (1182)..(1183): n is a, c, g, or t
  misc_feature (1223)..(1223): n is a, c, g, or t
  misc_feature (1357)..(1357): n is a, c, g, or t
  misc_feature (1364)..(1364): n is a, c, g, or t
  misc_feature (1366)..(1366): n is a, c, g, or t
  misc_feature (1986)..(1986): n is a, c, g, or t
  misc_feature (2020)..(2020): n is a, c, g, or t
  misc_feature (2172)..(2172): n is a, c, g, or t
  misc_feature (2175)..(2175): n is a, c, g, or t
  misc_feature (2228)..(2228): n is a, c, g, or t
  misc_feature (2242)..(2242): n is a, c, g, or t
  misc_feature (2252)..(2252): n is a, c, g, or t
  misc_feature (2276)..(2276): n is a, c, g, or t
  misc_feature (2288)..(2288): n is a, c, g, or t
  misc_feature (2303)..(2303): n is a, c, g, or t
  misc_feature (2305)..(2305): n is a, c, g, or t
  misc_feature (2342)..(2342): n is a, c, g, or t
  misc_feature (2841)..(2841): n is a, c, g, or t
  misc_feature (2847)..(2847): n is a, c, g, or t
  misc_feature (2850)..(2850): n is a, c, g, or t
  misc_feature (2852)..(2852): n is a, c, g, or t
  misc_feature (2861)..(2862): n is a, c, g, or t
  misc_feature (2917)..(2917): n is a, c, g, or t
  misc_feature (2920)..(2920): n is a, c, g, or t
  misc_feature (2927)..(2927): n is a, c, g, or t
  misc_feature (2930)..(2930): n is a, c, g, or t
  misc_feature (3420)..(3420): n is a, c, g, or t
  misc_feature (3440)..(3440): n is a, c, g, or t
  misc_feature (3505)..(3505): n is a, c, g, or t
  misc_feature (3508)..(3508): n is a, c, g, or t
  misc_feature (3514)..(3514): n is a, c, g, or t
  misc_feature (3517)..(3517): n is a, c, g, or t
  misc_feature (3569)..(3569): n is a, c, g, or t
  misc_feature (3598)..(3598): n is a, c, g, or t
  misc_feature (3628)..(3628): n is a, c, g, or t
  misc_feature (3630)..(3630): n is a, c, g, or t
  misc_feature (3632)..(3632): n is a, c, g, or t
  misc_feature (3635)..(3637): n is a, c, g, or t
  misc_feature (3639)..(3642): n is a, c, g, or t
  misc_feature (3648)..(3648): n is a, c, g, or t
  misc_feature (3650)..(3650): n is a, c, g, or t
  misc_feature (3652)..(3656): n is a, c, g, or t
  misc_feature (3658)..(3660): n is a, c, g, or t
  misc_feature (3663)..(3668): n is a, c, g, or t
  misc_feature (3672)..(3677): n is a, c, g, or t
  misc_feature (3679)..(3685): n is a, c, g, or t
  misc_feature (3687)..(3688): n is a, c, g, or t
  misc_feature (3691)..(3691): n is a, c, g, or t
  misc_feature (3694)..(3700): n is a, c, g, or t
  misc_feature (3702)..(3702): n is a, c, g, or t
  misc_feature (3704)..(3707): n is a, c, g, or t
  misc_feature (3709)..(3710): n is a, c, g, or t
  misc_feature (3712)..(3712): n is a, c, g, or t
  misc_feature (3714)..(3714): n is a, c, g, or t
  misc_feature (3716)..(3717): n is a, c, g, or t
  misc_feature (3719)..(3719): n is a, c, g, or t
  misc_feature (3721)..(3759): n is a, c, g, or t
  misc_feature (3761)..(3766): n is a, c, g, or t
  misc_feature (3768)..(3770): n is a, c, g, or t
  misc_feature (3772)..(3784): n is a, c, g, or t
  misc_feature (3786)..(3788): n is a, c, g, or t
  misc_feature (3790)..(3802): n is a, c, g, or t
  misc_feature (3804)..(3812): n is a, c, g, or t
  misc_feature (3814)..(3815): n is a, c, g, or t
  misc_feature (3817)..(3826): n is a, c, g, or t
  misc_feature (3828)..(3838): n is a, c, g, or t
  misc_feature (3843)..(3850): n is a, c, g, or t
  misc_feature (3852)..(3877): n is a, c, g, or t
  misc_feature (3879)..(4000): n is a, c, g, or t
nnnnnnnnnnnnnnnnnnnnnnnnnnnnnnnnnnnnnnnnnnnnnnnnnnnnnnnnnnnnnnnnnnnnnnnnnnnnnnnnnnncnnnnnnnnnnnnnnnnnnnnnnnnnnnnnnnnnnnnnnnnnnnnnnnnnnnnnnnnnnnnngnnnggnnnnnnnnnnnnnnnnnnnnnnnnnnnnnnnnnngnnnnnnnnnnnnnnnnnnnnnnnnnnnnnanannnannnnnnnnnnnnngnnnnnnnnannnnnnnnnnnnnnnnnnnnnnnnnnnnnnnnnnnnnnnnnnnnnnnnnnnnnnnnnnnnnnnnnnnnnnnnnnnnnnnnnnnnnnnnnnnnnnnnnnnnnnnnngnnnnnnnnnnnnnnnnnnnnnnnnnnnnnnnnnnnngggggnnnnnnnnnnnnnnnnnnnnnnnnnnnnnnnnnnnnnnnnnnngnnaannnnnnnnnnnggnnnnnnnnnnnnnnnnnnnnnnnnnnnnnnnnnnnnnnnnngnnnnnnnnnnnnnnnnnnnnnnnnnnnnnnnnnnnannnnnnannnnnnnnnnnnnnnnnnnnnnnnnnnnnnnnnnnnnnnnnnnnnnnnntnnnnnnnnnnnnnnnnnnnnnnaannnnnnnnnnannnnnnnnnnnnaaannnnaanaannnnnnnnnaannannntnnnnnnnnnttttttnnnaanannnnnnnnnnnnnnaaanggnnnnnnaanantnnnntnnnnnnnnaanannnannnaanannanncnaannntnnnnanagaangtttgaaaggtcaagcgaacaagggcgcagggcgaatgccttggcactgggagccgatgaaagacgtgataagctgcgataagcttcggggagctgcaaataagcattgatccggagatttctgaatgaggaaactcacctgggttcatactcaggtacgttatactgaanttnaaaataggtatatcgagggaaccgcctgaactgaaacatctaagtagggcgaggaagagacatcaaacgagattccgtaagtagtggcgagcgaacgcggaagagggcaaaccgagagtagaaatactttcggggtacggactgcttttaggacttaatctgttaaccgaacggcatgggaaggccggtcagagagtgtgagaaccacgtaggtgaaaacggagagagctgcgcagnntccagagtacggccagacacgtgaaacctggtcggaatanggggggaccaccctccaaccctaaatactacccagtgaccgatagcgtatagtactgtgaaggaaaggtgaaaagcaccccgggaggggagtgaaaaagaacctgaaaccctgtgcctacaagcacctagagcncgtcaangngtgatagggtactttttgtagaacggtccggcgagcgattgtatgcagcaaggttaaggacttaaggtctggagccgaagcgaaagcgagtttgaaaagggcgttaagttgcatataatgggcccgaaaccgggtgacctacccatggtcaggttgaagtggaagtaaaattccatggaggaccgaaccgacctccgttgaaaaggcggcggatgaactgtgggtagcggagaaattccaatcgaacccggagatagctggttctccccgaaatagttttaggactagcctcaagttagatacctggaggtaaagcactgaatagcctagcggccgagaggttagcgaagcttatcaaactcagaatgccagagtattgatgcttgggagtcagacagtgtcagataaatgtcattgtcaaaagggaaacagcccagatctacagctaaggtcccaaagtcaggttaagtggaaaacgatgtgaagatacgcagacaaccaggatgttggctcagaagcagccactcattcaaagagtgcgtaatagctcactggtcgagcgtctttgcgcggagaatttaacggggctaaacctgacaccgaagcttaggcaatacagnaatgtattgggtaggggagcgttgtatacgcggngaaacagtagcgcaagcggctgtggagtgtatagaagtgagaatgccggaatgagtagcgcgaatgcagtgagaatctgcatggccgaaagcctcaggtttctggaggaaggttcgtccgctccaggttagtcgggagctaaggtgaggccnaanggcgtagccgatgcacagacggtagagattccgtcaccaccaaaagagttaancacagggacacatntgaagtctcngagccgggtgttggttccggtagngatcgagggaanttagtaccgaagtcngngatggaagatggcgagaaaagctgtgtgtatttctgnggtgcccgtaccgcaaaccgacacaggtaggtaggaagaagattctaaggccaacgggagaagggttgttaaggaactcggcaaattgaccccgtaacttcgggagaaggggtgctccagagatggagccgcagagaatcggcccaagcaactgtttaccaaaaacacaggtttgtgctaaatcgaaagatgacgtatacgagctgacgcctgcccggtgctggaaggttaagaggagatgtgcaagcattgaatcgaagccccagtgaacggcggccgtaactataacggtcctaaggtagcgaaattccttgtcaggtaagttctgacccgcatgaaaggcgtaatgatttgggcactgtctcaacagcccgcccggcgaaattgtagtaccggtgaagatgccggttacccgcgacaagacggaaagaccccatggagctttactgtagcctaatattgggtttcgatgttgcatgcacaggatagatgggacacngggaancangngctttggcnnttgtggagtggccgttgggataccatccttgcgatattggaattctaacctgcgnctntgaatcnagncgggggacattgttaggtgggcagtttgactggggcggtcgcctcctaaagagtaacggaggcgttcaaaggttcgctcagcttgaacggaaatcaagcaaaagagtgcaaacgcagaagcgagcctaactgcgagactgacgggtcgagcagtaacgaaagttggagttagtgatccggtggtatgtgagtggaaatgccatcgctcaacggataaaagttaccctggggataacaggctgatctcccccaagagtccacatcgacggggaggtttggcacctcgatgtcggctcatcgcatcctggggctgtattcggtcccaagggtttggctgttcgccaattaaagcggtacgcgagctgggttcagaacgtcgtgagacagttcggtccctatctgtcgtgggcgcaggatatttgatgggagctgtccctagtacgagaggaccgggacggacgtacctctggcgcaccagttgttccgccangagcatagctgggcaactangtacggatcggataaacgctgaaagcatctaagcgtgaagccgacccaaagataagatatcccantgnttcaancangtaagaccccttgaagactacaaggttgataggcacgatgtgtaagtggagngatccattcagcaagcgtgtactaatagntcgagggcttgaccacaattcgcttgagantntnagnnncnnnnaaaaantntnnnnngnnnttnnnnnntttnnnnnncnnnnnnntnnaanaannnnnnnanannnnannanananntntnnnnnnnnnnnnnnnnnnnnnnnnnnnnnnnnnnnnnnngnnnnnncnnntnnnnnnnnnnnnnannnannnnnnnnnnnnncnnnnnnnnnanntnnnnnnnnnnannnnnnnnnnnaaaannnnnnnncnnnnnnnnnnnnnnnnnnnnnnnnnnannnnnnnnnnnnnnnnnnnnnnnnnnnnnnnnnnnnnnnnnnnnnnnnnnnnnnnnnnnnnnnnnnnnnnnnnnnnnnnnnnnnnnnnnnnnnnnnnnnnnnnnnnnnnnnnnnnnnnnnnn

SEQ ID NO: 340 - DNA, 4000 bp, Escherichia coli
  misc_feature (134)..(134): n is a, c, g, or t
  misc_feature (781)..(781): n is a, c, g, or t
  misc_feature (1262)..(1262): n is a, c, g, or t
  misc_feature (1989)..(1990): n is a, c, g, or t
  misc_feature (2012)..(2012): n is a, c, g, or t
  misc_feature (2021)..(2021): n is a, c, g, or t
  misc_feature (2047)..(2047): n is a, c, g, or t
  misc_feature (2548)..(2548): n is a, c, g, or t
  misc_feature (3529)..(3529): n is a, c, g, or t
tgaatgcgttcaatttcgttttggcttagttccctgacaagagtaagatgaccaaatctgtttttatcattcttgccaaaaacaaggatgtctccaatcgggggttttgagacagagccattcatatattgcgnaagatttctatcctcattgtggtgaccattggacaatgagctatcgaaaagcatataggcatgcccataagaatcaggcatgcgatgattctttatctggtaataataccttttaactaattcaacacactgatacttaaggcctagattgtaaccttctctgctgaggtttcttccgaaaaaatttgacattctgccattatcatatacagtcattgaattataggaatcgatgatatcagcggaggaccagtctttcttaaccggaaaacagacagcgggcccactgaagtgtattccaagggtcagaataccgattaacaagcatgtatgagagcttagcattgtttgcacactataaaagggtcactgcaaatatacatatgcggattacacgaaaaaatgaagttccaatattaaagcgaagtctatcttattaatataaaataaaagagctatacattttataaatttgtaatcctgaaataaaacttgaaatgtttgatactttaagtgataagctggactcggcctttaagaatttaactggtgagggaaaactcacagaaattaatattgcacagtcaattaaagaaatccgtcgagctctcgtagccgccgatgtcaactataaaatagccaagganttcaccgatagggttaaagaacaggctatgggcacacgaaatgtgctcaaagcggttaagcctggagagcttatggtcaagatcgttatggatgaaatggttgagctgatgggtggtcagtccgttggaatcaacctctcgggaagtccggccgtgattcttatagcaggtctgcaaggttccggaaagactacatttacaggcaaactggctaagcacctcaaggaaaaaaagcgattgaaggtacttgtagcggcctgtgacgtgtacaggccagcagcaatcgatcagctgaccgttctggcaaagcaggttgatgttgaaatttataaagagacagaaaataagaatcctatatccattgcaggaaacgcgttggtttatgccaagcaaaacaactttggagccgtcataattgatactgcaggacgcctttctgtagatgaggaaatgatggacgagattgcagccatcaaagatnagataacaccttcagaaactctttttgttgtcgattcaatgacaggtcaggatgcagtcaatactgcagcagttttcaatgagcgcattgattataatggcgttgttttaacaaaacttgatggcgatacgcgaggtggagctgctttatcgatcaaatatacagtcggcaagccaataaaatttgtctccacaggtgagaagatggatgccctggatgtgtttcatccagacaggatggcccagcgaattttgggtatgggagatatagtctccttcgttgagaaagcacaggatcaatttgatgaaaaggaagcacagcggcttgagaagaaaatcaagaagaacaaatttgacttcaatgacttcctgggacagatggcgcagatacgaaagatgggagacctaaggtcactgataggaatgattcccggtatgagcaagctcaaaaacctggacatagatgacaatgcctttgcgaaagtcgaatccatcattcattccatgacaccggaagagcgaaccaatccagatctattgaatatgagtagaaaaagacgaattgcgaaaggatgtggccgaaatatccatgagataaatatgtttatcaagcaattcaatcagatgcgtaagatgatgcatatgatgtcaaaaggaaagggaatgcagcaactaatgggtaattttcccaatatgcctgggatgaattaatatttcttactattttnntagtgaaatttaccatttgaantgttataantctgagacatgaaaaaactttacctnttattaacccttcttttaggggctaattttctatttgcacaacttccggactggtcaactgctcctgatttttcacttccagatcttaatgacgattatcatgaactttatgactacctagatgaagggtattctgcagttctggacttttcagctacctggtgcggtccatgctggaactatcatcaaacaggcatattggaagatatttatgatgagtatggacctggaggggaagacaaggtcatggtgtttatgattgaagctgaccccggcacaacgcctccatgcatttatggaccttccgggtgttctggtggttcaataggagactggactgcaggtgttacatatcctattctaaacccagaagcatcagaggcggcaacagttaacacagattttcaaattaattattaccccaccttatatggcgtatcaccaattggagaaattattgaaattggtcaagccagcttttctgtttgggaaagttgggtngcggaatcttttcaaatgcataatacaagctggactaccaatgaagaagattgtacggaatccttcatagacctgcatcctgttggtggtcatgatggcattgactaccagtggtcaaatggtgcaacgactgaagacttgtatgacatagcacctggagaatataccgtcactatgaccgatggtcatgactatgaagttgtgaaaggtcctatagaaattaaatacaacaatggtgcaaatattgtccttgatgaaatagaacacattgaatgctttggtgaagaaacgggtattatagacatccacatggaaggtggatccgatgattttgaattctactggtcaaatggttctaacgatgaagaccttgaggatgctcctggtggaacatacgaattgcttgtgatagaccttgactctggttgtgaatttgaaatggaatttgagattgaggaacccgagactttggaatatgaattggaaatagagaatgccccatgtggatcagctgaattaggtgcagtggagttttttgtggatgggggtacctggccagtgacattcttctttgaagatttcgatacaagagatgattatgttgaattacctgcaggagattataccgttaccatcatggattttaacggctgtgaattggaaaccgaaagctttactatcgaatccgttgatgcaccacttgcctatgcgggttttagcggtttgctgaattgtgtcaatgacagtatatcaatttcaatagacagttcatcctcaggacctatgatctcttatgaatggtattcaccagacagtatcctgatcggacaggatagtcaattgtatgtaatgactgaaggtatgtatacactcaatgtgataaacctttcatctggatgtactagtgtggattcggtgtttgttatgtccgattacagcagtcctgaattggaagcagatgttattcagtcatggcattgntcggatcacatagccatattgggtggttttgtaaatgttgcagacagcttagtgacatacagttggtctaccttgggaggtgaaatatcatctgaccctcatgcggcagaaattgaagtaagtgcttttggtttgtatcagctggaagttacccatatagcaagtggctgtgtagaaacaggagaactcatgattcaagagcctgagttgccagagattacatatgagggagagctggaattttgtgaagaaagtactactgaaatttgctttgacttcgatagcaatttcagggttgactatgaatttaatggtgaacctatttccactattggaaaccagacatgcatcatattttccgaggctggcgatttaattgtcactgttgtagatcaattaactgattgcagctcatcagaatcctttgtgctggaacaattcgaagttcctgagttgcaggtattgggagaa

SEQ ID NO: 341 - DNA, 4000 bp, Escherichia coli
  misc_feature (1926)..(1926): n is a, c, g, or t
  misc_feature (3355)..(3355): n is a, c, g, or t
agcgcagtccgaaggcctctcccgcaatgatggtcagatcgatgccgtcgcctgcgcggcgcggcagggtcgacgcggcgtagtgcacgaaggtcggctctccatcctcgtgaccgtcaggcaatgccacccagctctgaatgccgtggacttcatggccgcccgatgcgcgggcggcctgcggcgttcgctcggaatgggcaatgccgcgcccggccgacatccagttcacgtcgccggggcggatttcctgcaccgtgccgaggctgtcgcgatgctccagggagccctcgaagagataagtcaccgtcgccagtgcaatatgggggtgcggccgcacgtcgatcccatagcccggtgcgaatcgcgttgggcccatatgatcgaaaaaaatgaacggccccaccatctgccggaccccggccggcagcacgcggcgcacgacgaagccgccaaggtcgcgttggcgcgaatcaatcacttgcagaatcgtcatgggcggccccgcgtcaacgcctcgagaaaccgatagtagaactcgacgcctgtgtagtaagaatcgactttgaccctctcgtccttgccgtgcatgcgcacatcgtcgcgatcgatcgcgatgccgttgatcccatagctcggcatgcccgcatacatcgtgtaaatactatccgacgatcccgttaccatcgtcggtatcacgggcgcgccgggccatagcttcgccgcgaccttgcgcagcgagtccatgacgtcggcgcgcagcggcggcggcgccattgccttgcgatccgagccatgatccgacaattcgcccgcatcgctccggtaccggacggtgagcttcggatcgttgaacaggcggatcaattccaagcgaatttcctcctgagaatggccgggaaagatacggcagttgacgttggcctccgcgcgctgcggcagggcattgggcgcatgacccccgctcagcatggtcgccacgcacgtggtgcgcatggtggaattatagcgcgcgtcctgcgacagccgccgaaccgccgcggaatcgggcggctcgcccaggattgcacgcatatcggccgctgtctggcctgtttcgatcttggccatctggccgaaatactcccgtgtcacggcattcaactcgaagggaaacggtgatttctccaataccgccagcgcattcgcgacgtgatagatcgcattgtccggtttcggcagcgaactgtgtcccccgggattggtggcgagcacctggtagtcggcatagagcttttctgtggcttcgaattccacgctcaacggtttgccatgatccgtggtgacgccgcccgagtccgggttgagcacgaactcggcatcgatcaggtcgcggtgattctgcagcagccaatccacgccgttcgactttccgccctcttcgtcggcggtgagcgccaggatgatgtcgcggttcgggacgtagccttcctgcttcaaacgaatgaaatcggtgacggcgatggcgtcggcttccttcatgtcttgggtgccgcgcccgtagaagtagccgtcttgctcgacgaatttgaacggatcggtggtccagtcctcacgccgcgcttccacgacatccaggtgcccgatgatcaagatcggccgcagcgtcgaacccggcttgccgcggtagcgcgcaaccatgtttcccttgcggtcattgggcccgatgaccacgacgtcggtcttgggaaaccccgcatcgagcaatcgcttcgccatggcctgcgcggccaccgtggtacttccgatggaatcggtggtgttgatctcgatcaattgcttgaagatgtcgtgcgccatctcgcgggtggcggcatccttctgggaggccgcgggccacgccgcttgcgcgcacaggccgcagacgaggacaatgatgggcttcangcgagcgcgatatatcaaatttgcatctccccataaaaatacaaaatcaggattcagattatgccggttcaagtcaatcgaggcgctcgtctgcggagcgtaagttgtctaataaacgatgctattctgcgcgagttgcggcaaatgcccggagcgatgtgacatggtgaagaaaaagacacccggggtgacccgcgccgccgcggaagccgccgtgcgcactctcctcacctgggccggcgacgatccgacgcgcgagggtctgcgcgacacgccgaagcgcgtcgtcaacgcctacaccgattggttctcgggatacgccatcgaccccggagcgtatctacggcgcaccttcgaagaagtcgagggctacgacgagatggtggtgctgcgcgatatcagcttcgaatcgttttgcgagcatcacatggcgcccatcatcggccacgcgcatgtcggttacctccccaccgaccgcgtcgtcggcatcagcaagctcgcgcgagtcgtcgacggctatgcgcgccgcttccaggtgcaggaaaagctcacctcgcaaattgccgcgtgcatcaacgatattctcaagccgcgcggcgtcggcgtcgtgatcgacgccgtgcatcagtgcatgaccactcgcggcgttcacaaacgcggggtctcgatgatcacgagcaagatgatgggcacctttcgcgcggatgccagcacacgcgcggagtttttgcgcttcatcgacatcgagggccgctctctgcgctgatcagtttcgcttgcgctcggcggcggagcgtaccggcatcaagtcgaccgagaagctgtatttgtgtttctcgccgggctgcagcgcaccgacgccgaccacttggcgcgcaattttctcgccgcgctcgttggtgatcgagatcaccacgacgtactcgcagctctcatcgcgcacggtgtggcgaatcgttccttcgattcgcatcgccggcttcgactccgcctgcggttccgcattcccggaattgaagcgtagatggtgctggcaccccggacaaatattggcgctctgcaggaccaccgccttgcagtgcggacatattcgagtcgcgcctaaggtgccggctcgagcggcgctcacggctagctgccgccgcccaccaagccgggtttgatcttcaccttctcgtcctcccagccgaattcgacgtgcccgcgcatgcgggagcctgcggcgacggtgatcgacccggccttcacgtcgccgacgatgatgccgccttccgttacatcgacccgcttggcggattcgatgttgccctgaagctcgccgccgaccacgacgatgccggccaggacctggccggtcaaatgggcccccggctcgatgctgaaattgccgtcgatacgaacatcacccttgaagcggcccgccatacgnacatttcccgacccctcgatcttgccctcgatcgtcagattcgcggcaatgaccgattcgcccccctccgatgacgtcttgggggtggggcggcgcggcgaaacggccagagccggttcgcttatattgcgctccggcaaatttcgttccggcggaggcgccgacggggggacaacagaacccgcagtggcgggcgtgggtttttcgttccaaagcgccatgacttaactctccattgagatggtggctaaagcgtacacgctaacgcttaaaaatgtcatcggacactgtcttttattagagacggtgacccggagcggcggcccctacgggggtcccctacagacggttgatcgcgggccgcgtcgagcaagccgcacacctcgcgcacgccctgcaggatgcgcggcgccattcggccgaccagcgagggatccaccgtgaacacgtgatgattgcgcaccgcttcgaggttcgaaaatcgactccattcgagagcctgccgcgcaccctcggcgccggcggcggcgacgagtatcacgtcggggttgcgcgcgagcactgcttccttgtcgattgccggcgccagcgcggagagatcggcaaaaacattgtcgccgccgcacagcgataaaacctcgctga

SEQ ID NO: 342 - DNA, 4000 bp, Escherichia coli
  misc_feature (1682)..(1682): n is a, c, g, or t
  misc_feature (1685)..(1685): n is a, c, g, or t
  misc_feature (1691)..(1691): n is a, c, g, or t
  misc_feature (1697)..(1697): n is a, c, g, or t
  misc_feature (1973)..(1973): n is a, c, g, or t
  misc_feature (1980)..(1981): n is a, c, g, or t
  misc_feature (1983)..(1984): n is a, c, g, or t
  misc_feature (1986)..(1987): n is a, c, g, or t
  misc_feature (1990)..(1990): n is a, c, g, or t
  misc_feature (1996)..(1996): n is a, c, g, or t
  misc_feature (1999)..(1999): n is a, c, g, or t
  misc_feature (2004)..(2004): n is a, c, g, or t
  misc_feature (2007)..(2008): n is a, c, g, or t
  misc_feature (2011)..(2011): n is a, c, g, or t
  misc_feature (2013)..(2014): n is a, c, g, or t
  misc_feature (2019)..(2020): n is a, c, g, or t
  misc_feature (2034)..(2034): n is a, c, g, or t
  misc_feature (2037)..(2037): n is a, c, g, or t
  misc_feature (2041)..(2041): n is a, c, g, or t
  misc_feature (2043)..(2044): n is a, c, g, or t
  misc_feature (2046)..(2046): n is a, c, g, or t
  misc_feature (2049)..(2050): n is a, c, g, or t
  misc_feature (2052)..(2053): n is a, c, g, or t
  misc_feature (2123)..(2123): n is a, c, g, or t
  misc_feature (2138)..(2138): n is a, c, g, or t
  misc_feature (2141)..(2141): n is a, c, g, or t
  misc_feature (2147)..(2147): n is a, c, g, or t
  misc_feature (2210)..(2210): n is a, c, g, or t
  misc_feature (2222)..(2222): n is a, c, g, or t
  misc_feature (2225)..(2225): n is a, c, g, or t
  misc_feature (2227)..(2227): n is a, c, g, or t
  misc_feature (2315)..(2315): n is a, c, g, or t
  misc_feature (2330)..(2330): n is a, c, g, or t
  misc_feature (2477)..(2477): n is a, c, g, or t
  misc_feature (2503)..(2503): n is a, c, g, or t
  misc_feature (2510)..(2510): n is a, c, g, or t
  misc_feature (2533)..(2533): n is a, c, g, or t
  misc_feature (2536)..(2536): n is a, c, g, or t
  misc_feature (2553)..(2554): n is a, c, g, or t
  misc_feature (2569)..(2569): n is a, c, g, or t
  misc_feature (2573)..(2574): n is a, c, g, or t
  misc_feature (2576)..(2578): n is a, c, g, or t
  misc_feature (2580)..(2581): n is a, c, g, or t
  misc_feature (2583)..(2583): n is a, c, g, or t
  misc_feature (2585)..(2585): n is a, c, g, or t
  misc_feature (2587)..(2587): n is a, c, g, or t
  misc_feature (2593)..(2599): n is a, c, g, or t
  misc_feature (2601)..(2606): n is a, c, g, or t
  misc_feature (2609)..(2609): n is a, c, g, or t
  misc_feature (2612)..(2614): n is a, c, g, or t
  misc_feature (2616)..(2616): n is a, c, g, or t
  misc_feature (2619)..(2626): n is a, c, g, or t
  misc_feature (2629)..(2630): n is a, c, g, or t
  misc_feature (2632)..(2636): n is a, c, g, or t
  misc_feature (2639)..(2639): n is a, c, g, or t
  misc_feature (2641)..(2641): n is a, c, g, or t
  misc_feature (2643)..(2648): n is a, c, g, or t
  misc_feature (2650)..(2654): n is a, c, g, or t
  misc_feature (2657)..(2658): n is a, c, g, or t
  misc_feature (2769)..(4000): n is a, c, g, or t
gcagcagcggcaccccccagtcgcctgccaatgcccgcgccgacaggctcttcccgcagccgggcacgccgacaagcagcacgcccttggggacgggcaggccggcgtagcgggcggtgttggcaaaggcgggctgccgagagcggaaccacttgagcagattgcccaggccgcccacatcctgaaacgagtcggccgcgtgatagtactccagaatgcccgacttgcggatgacctgcgccttctcctcggcaatggcccgctcggcgccggggcgcagccccttctcctgcacggccactttgcgcagcgtccgctcggcttcgttgagcgtcatgcccagggcggcgcgcaccagcagggcgcggtcgaggtcggtcagttccaccggcaggcccgcagcctgcacttcgtcgcagatccgctccaacaacggcgccaagtgctgctgatcgggcaactggaagccggccaaggtcacttccttttccaactcctccggcacgctgaagttgggcgacaggaacaacaccgccttgcgcgtcattcgcacggcacgggcggtgtcgcggatcaggcgggtggtcaccggcgagaagtgccggtgcagatcgaggaagacgtagacagcgtcctcggggttctcgatgacgtgcaccagcgcggccgtcgggtcttccaggctgtcgttgttgaccagcttgtcctgctcgtcccgcagaccgcgggaggcgctccacacgtagagcttccgtgcctgcttggtctcttcagacagccgcgcgcagatgccccgcacggccgtcagcacgcgatcctcttcgaccgagagcacgcagaccagcgggaagctggcgcggatcaggacttccagacggctctcgtcgtcgtccaccatccgcgtccgtcgcgccacggcttccaggtcgcgcgccaactcgtcggccgtctggtagcggcggtccgcttccttgtgtagggctttgcgcaggacgcggatgacgcggacgtcgacgcccttctcgtgcagcggcttctcgtcatacttggccgccatgatcttctgcatgacctcggcaaactcaccggtgaagggcttctcgcccgtcagcagctcatacagcgtcacgcccaacgcccacagatcggcattggtgccggcggcgccttggaactgctccggcgccatgtactgcaccgtgcccacgcgcgtgctggccttggcgctggtgcgcgccaacagccgcgccacgccgaagtcgagcaacttgggcacgttgtcgccggtgaccagcacattgtcgggcttcacgtcgcggtggaagatgcgagcggaatgggcgtacgccaacgcctcgccaatgagcccggcgtagcggatcgcctccggcggcgtgaagctcccatgctcccgcagcttcgctcgcaagctttggccctctacgtgctccataaccaggaacgacacgccctcgcggcgctccacggcatggacccgcagaatgccggggtgctccaagcggctggtgacggcgaactccttctccaactcctcgatcccctccgggtcctgctggtgcgggaagccaagcgccaccaccggctcccccggcccgccgcgattgcgcgccttgtacacgctcttgaacgcccccgcgccgaggtacgcctccagcgtgtanggnccgaancgttgnccgagcttgtagggaccgccttcagtcatcgttcactccgttctccgtagggtaaagctccagctttgccgcccttgacctttgccttcaggtctgcgagactgcacggcagagcgacagttgaggtcaagttcaaggtcaagggcggcaaagctggagctttaccctacggaacaaaggccgaccagggggctatcgccccctggacccccgtcccttgctctcgcaaggggtaaaggcgtaaagggtcaaggcgtgagagtccgggcaagacgnaaaccgnngnngnngcngcgatncgncgggncgnngtngnngcggnnggcacaacggaagncgncggnanngncgnngnnccaggagccgccgcgcaacacacggaagtttcctgacttcggcgccgccaagtctcctttcttgtagcgntcataggcgttgctntcntaccantcctcgcaccactcccacacgttcccggacatctggtacaaaccccacgggctgcagccctcngggtactgccanacncngcacgtggtctcgctgcctttgttgttgctgttccggcacttgctctggtcccactcgttcccccacgggtactcccgaccatccacnccccgagcgcccttntcccactccagctcggttggcaaacgcaagccagcccattccgcgtacgcttgcgcgtcgtgccagttcacgtacaccaccggatggtcttccttcccggccccggcctgctgcttccagtcgtcgctctcccgatacccgctcgcntccacgaagcgggcgtactgggcgtnggtcacngggtgaatgcccaagtagtacgncgncagcgtcaccgggaacnngtcggcaccggccangaanncnnngnncngnancagcannnnnnngnnnnnntcnttnnngntcnnnnnnnngtnntnnnnnttnangnnnnnncnnnnngannaccaagggcgaaacactaagaacacgaggaaaccgggagggcgaggctcctgccgagccgcagacgcgatcacctccggcaccggctcggcgggagcctcgccctcccctnnnnnnnnnnnnnnnnnnnnnnnnnnnnnnnnnnnnnnnnnnnnnnnnnnnnnnnnnnnnnnnnnnnnnnnnnnnnnnnnnnnnnnnnnnnnnnnnnnnnnnnnnnnnnnnnnnnnnnnnnnnnnnnnnnnnnnnnnnnnnnnnnnnnnnnnnnnnnnnnnnnnnnnnnnnnnnnnnnnnnnnnnnnnnnnnnnnnnnnnnnnnnnnnnnnnnnnnnnnnnnnnnnnnnnnnnnnnnnnnnnnnnnnnnnnnnnnnnnnnnnnnnnnnnnnnnnnnnnnnnnnnnnnnnnnnnnnnnnnnnnnnnnnnnnnnnnnnnnnnnnnnnnnnnnnnnnnnnnnnnnnnnnnnnnnnnnnnnnnnnnnnnnnnnnnnnnnnnnnnnnnnnnnnnnnnnnnnnnnnnnnnnnnnnnnnnnnnnnnnnnnnnnnnnnnnnnnnnnnnnnnnnnnnnnnnnnnnnnnnnnnnnnnnnnnnnnnnnnnnnnnnnnnnnnnnnnnnnnnnnnnnnnnnnnnnnnnnnnnnnnnnnnnnnnnnnnnnnnnnnnnnnnnnnnnnnnnnnnnnnnnnnnnnnnnnnnnnnnnnnnnnnnnnnnnnnnnnnnnnnnnnnnnnnnnnnnnnnnnnnnnnnnnnnnnnnnnnnnnnnnnnnnnnnnnnnnnnnnnnnnnnnnnnnnnnnnnnnnnnnnnnnnnnnnnnnnnnnnnnnnnnnnnnnnnnnnnnnnnnnnnnnnnnnnnnnnnnnnnnnnnnnnnnnnnnnnnnnnnnnnnnnnnnnnnnnnnnnnnnnnnnnnnnnnnnnnnnnnnnnnnnnnnnnnnnnnnnnnnnnnnnnnnnnnnnnnnnnnnnnnnnnnnnnnnnnnnnnnnnnnnnnnnnnnnnnnnnnnnnnnnnnnnnnnnnnnnnnnnnnnnnnnnnnnnnnnnnnnnnnnnnnnnnnnnnnnnnnnnnnnnnnnnnnnnnnnnnnnnnnnnnnnnnnnnnnnnnnnnnnnnnnnnnnnnnnnnnnnnnnnnnnnnnnnnnnnnnnnnnnnnnnnnnnnnnnnnnnnnnnnnnnnnnnnnnnnnnnnnnnnnnnnnnnnnnnnnnnnnnnnnnnnnnnnnnnnnnnnnnnnnnnnnnnnnnnnnnnnnnnnnnnnnnnnnnnnnnnnnnnnnnnnnnnnnnnnnnnnnnnnnnnnnnnnnnnnnnnnnnnnnnnnnnnnnnnnnnnnnnnnnnnnnnnnnnnnnnnnnnnnnnnnnnnnnn

SEQ ID NO: 343 - DNA, 4000 bp, Escherichia coli
  misc_feature (126)..(126): n is a, c, g, or t
  misc_feature (896)..(896): n is a, c, g, or t
  misc_feature (2685)..(2685): n is a, c, g, or t
  misc_feature (2742)..(2742): n is a, c, g, or t
gcatcttgaatctttgagagcccgcgttgactaaggatatcaaatttatgaagtccaatatcttctgctacaaccatatcaaattgcgttgttgcaaagcctttaggcggtaaaaaagtcccagtntggtaatggatactcttttcagcaatcaaaatccctccagcgtgaatgcttaaatggcttggaaacccttgaatataagtgctatagcgcaatactagatggcccaattggtccaattcgttactgctaaacttccccctactcaatttatcaatctcatgtttaggcagaccaaacaccttccctagttcgcggaccaccgcacggtattgaaacgtattgtacgttgccaacaacgccgtgtgcgggaagcgtttaaagatgtattgggtaatgtcgtctcgatcacgccaggaaaaatcaagatcaaaatctggaggagatgtccggtacaggttaatgaagcgctcaaaatacaagtccaactcaatggggtctacatctgtgattttcaacaaataagcaacaatgctatttgctccactcccacgcccaacatagaaatagccgcgtttttgggcataattgacaatgtcccagttgatcaagaagtaggatacaaaattcttctttgcaatgagttccaactccttctcaatacgctcctttactttgaagtctaccgttggataacgataaggtataccgtcgtaagccaattttttgagcagtcgtaaatccttctgttttgaaccggtataggtctgtaagttcagtgaggcttcatcgggcaatagaaccttacaatcttctaatacctgctgcgcctgacgtagcaaatacggcacttcaacataagcgctcagcagttcatcgttagctaagtagcngtcttcttctttcgcttgtttatcctttgaaagtttactcagcaaggtattttcgtctatagcacgcaataggcggtgagcattgtggtcccgttttcccctgaaagttgccgtaggcattgcaatgagtttgtgctgacggtgaacatgcggcgaaagatgtaagaagcgtaactgatctgcccctactcctataagttcgttaggtgccaacagtgcatcgggtggaagagcttctaaaggataaatgatccaagcatctttaagtgctgcgaccggagcgcgcgatgaaaagcgctgctttcgatgaaggtgttctgataggtgatcattgatttggcggaagccttcccaatttttcgctagtgctacatagcagggcactattccatttctaaaatctaccccaatgaccggacgctttctagcgtgattgcgcaaaaggtaaaggaccgtcatgcatgccgaagtgttattaatatcggtgatggccatcgcattccatggctggctttcaaagaaagccagccactctttgggcgaaagtaccccgtaacgcaagctgtaataactgtgcgagttcactaacatctcttctgcattttatctagaaacctaaatccaacttgcgttgacgtgcctgagtcatgcccattccttgtaggccaaggtgagtatgaatttcatagtcgtattccgtaactaaacgttggcctacaggcttgagtagttccggcccattgcttctgggattctttattgcagctgatataggataggcattgagctcctctgcagggtatggataaagtaagtcggttacttctgctaacggcgtcgtaggatctagccaaatggattcatcttcttcattgagaattacaggtgatcggtggtgatcgatagcagctgtgattttattgctcaccgttgtaataatcgcaaaactatcgaccatctcgccggtatctggattgacccaggtatcgtacaatcccgcgaaagcgaaaggagctccgtctcttttgtaaatgacgtaaggctttgacaaacgttccttttgtggtccttctataaatccatctgccagcactagacagcgtttagagcgaatgctctgacggaaggctggctttaccgtaatgccctttgcgccacgataggtaggattgttttctttgttgtgatccccttctgaacgagcgttaaagaggtaaaagggtttctttgcccaatacggggtgaatccaaactgataatgctttatacggtcggaatgctcctgtgtaatcacaggtgccaatgttcctataccaatattagtatttggtgtaaagagctctggacgctctataagcgcactaaaacgcttctctattgcctttactttgctaatagctacatatctaccacacatacttctctgtttatctacgtttactgatgtctgtttgctaaaagtggtggtggctcaccgttaaatggatttgtccttcctatggttttagcgcctagagaaacggcgcgcaatactgaacggtcgccaaagcgttgtcgtatatggtccatggcactatagagtttactgagttcctcgctctcttcaaacaaattcatctggtacccaccgccaactaaatgggagaaacgaacacccaccaaacgaacgagtaatctacgttcaaagagtttttgaaaaagctccttgactttaggaatgagaaggtgatctgccgctgtatatggtatacgcgcctgaagcgtatgggtattaaagtctgaatacctnattttaacagtaatacaagaagtaagcttatccccacgacgcagctgataagcaagnttctctgtcatagcgacaataattccttcaagtttaaccacatctatggtatccttagcaaaagtgcgttctgttgaaatactctttcgctcttggtaaggaacaacagggctttgatcaacaccctgagccttatgccaaatcacagcaccgtgcttgcccatgacactctgcatcatttccaatggcatttcttgtagcgtatgaatacgtcgcacccctagatttcgcaaggtctggtaggtcttctctcccaccatgggaatcttgcgaaccgataaaggtgctagaaacggacgctccagccctttttgaacgaaaatcttgttattaggcttagcttcccctgtggcgaccttgctaacagtcttgtttaaggacaagccaaaactaataggcaatcctgtttcactaatgacacggtcccttagttcactggaaaatttgaagtttccaaaaaaacgatccataccggtaaggtccacataaaactcatctaccgacgtcttctcatagacaggtacctcctctttaataacatccgtaactaagtttgagtatttactgtagttcgctgaattcccccgaatgataatggcctcagggcagagagaacgagccatgcgcataggcatggccgaatgcacgccgaacttccttgtctcataactacaagctgcaactactccacgatcgccggtaccgccaatgagaataggcttaccgtttaatcgactatccatcaaacgttcaacagagacgaagaacgtatcaaggtccatatgtaggatagagcggtccatgaattaaaatgtagttagttaagtaaggacacaccaccggcacttcgaacggctctaagaccgctcaaaaacacactaggctaaactccttttacgtgttaattagttgtctttcaggtgattcatctcttttttgagatcggccatcatgtgcatgatctgagacatttcctgacctgtacctgctgcagggagttcaaagctggtataaccaaccgctttccaaacctctaccagcctatcgacaggtacagtataaggagcaaactgtggattatccgattttagcattaattcaccgatatggaggttattaatgacgcgcttgtacacgacaccttcgtcttttgtgatcaaaacatgacactcgtcattgcgaatagacttccaatcttgaatatattctgtgataacataagccccaggtttgatcggaagcatgctctctcctctga

SEQ ID NO: 344 - DNA, 4000 bp, Escherichia coli
  misc_feature (1931)..(1932): n is a, c, g, or t
  misc_feature (1934)..(1935): n is a, c, g, or t
  misc_feature (1937)..(1938): n is a, c, g, or t
  misc_feature (1943)..(1943): n is a, c, g, or t
  misc_feature (1968)..(1968): n is a, c, g, or t
  misc_feature (1970)..(1971): n is a, c, g, or t
  misc_feature (1973)..(1973): n is a, c, g, or t
  misc_feature (1976)..(1976): n is a, c, g, or t
  misc_feature (1983)..(1983): n is a, c, g, or t
  misc_feature (1986)..(1986): n is a, c, g, or t
  misc_feature (1991)..(1992): n is a, c, g, or t
  misc_feature (1994)..(1994): n is a, c, g, or t
  misc_feature (1997)..(1998): n is a, c, g, or t
  misc_feature (2000)..(2000): n is a, c, g, or t
atttccgcagcgccctatcgtgacagggtggtgcatcacgcgctgtgcaacgtcattgtgccgctgatcgatcgcaccttcatcgcagacacctacgctaatcggttgggctatggcacccaccgtgccctgaagcgcttcacctactttgcccgtaagagtcgttacatcttgcaaggcgatgtccgcaaatactttcccaatctggatcatgaccttttgaaagccgccctgaggcagaaaatcaaatgtccagagaccctctggttgatcgatcgcatcattgacggcagcaatccccagggcgaagacgcagagtactttccgggcgatgacttgctgacaccgcttgagcgtcgcaagggcttacccatcggcaacctgaccagccagttctttgccaatgtttatctgaatggctttgaccactttgtgaaagaacagctccaagccaagcagtatttgcgctacgtggatgacttttcgctcttctcggacgatcgctcttttctcgaggacgcatggagcgcgatcgcagactatttgacgactctgcgcctgaagctgcatcccatcaaaagtcaactgtttgaaacacgctacggcgcaaactttgtggggtttcgcatcctgccagaccgcattcgtgtccgcagcgacaacctgagacgggcacggcagcggctccggcaactccagcaagactacacaaccggacaaatttccctggaacacctcattcagcgtctccaaagctgggaagcccatctgctgcacggtgatacccatcgactgcgccgtcaaatcagcgatcgctggcgctttaccccacccgcagcaccactctccgtaaagattccagcaccactagagcctgattgggaagtctagcggtatcctacaaacgggattagtcggcaaacgcggcggtgcctggaacaacaatccgaggtcttgccgttctgcctctcgcaacaacaatacgcccgacaaccgcaacaacaatatcggttttcgagtggtttgtgctgccccgagtactcttcagtgccagaactggcagatgagatatctgctgggagtgtgagaagagtccagactagttccagtgatgctcttcttttggcttttagctctaatagtggcatccgaaaatcaaaccgagtcaggtagcttggtaagccttgctgaagtgttgcctgactcacccaatgtagggcagtcttgcatggcagaactcatccttcgtaaagaacgcaaacaagcccgctactttaccgaaaagctgggagacgggattgggttagatatgattctggttccgtctggcacctttgtgatgggttcgccagacgatgaaccagaacgcaacgaaagcgagggaccgcagcatgaagtgagtgtctccagcttttttatgggacgctatcccgtcactcaggcacagtggcggtttgtggcagcattggctccagagaagcgggacttagaactcgacccatccaactttaagggcgataatcgccccgttgagcaggtgccctggtacgacgcagtggagttttgcgatcggctggcgaagcacactggtagaccgtatcgcttaccatccgaagctgagtgggaatatgcctgtcgagctgataccaccacacccttctactttggcaaaaccctgacgaccgaactggcaaactacgacggcaactatacctacgatatcgggactcaaggtgaggatcgagaagagactacgaccgtagaccagtttgaaattgcgaatgcctttgggttatgtgatatgcacggcaatgtgtgggagtggtgtcaggattattggcatgatcactataagggtgcgcccaccgacggcagtgcctggttaagtgaagacgagaatgcaaaccgagtgttacgcggcggtgcctggnncnncnntccgnggtcttgccgttctgcctctcgctncnncnatncgcccgnctnccgcnncnacnntntcggttttcgagtggtttgtgctgccccgaggactctgtagccctttactcttttgccctcttgctctttgcgcgcgaagcgcgtcgcattgcaccgctcttttgaagccttgcacaacgtttgcgccgcatggaataagttgattctcaaccagcttttgccacagagatggcgggtgagtttttaggagtggcaagtaaaaaaatacaaacgtttgcagaaaaatgagagagccagagagctgagacaagaagccacaaacactttcccacaggcagagcttcctctatcctttttcagtcccacacgcctcgttttttcagtcccgtgcgccgtccctgctcttgacgttggggtctggagagtaacggaacagtcaaccgacttaaggctgtgcgtctgcctttgatgccgatgctacgctccattgcctcccccctgttgagcgatcgccaaactgtaaacgcctgcatggtgggcagccccgcttgcccgtactcagtggagtgatgatatttagctaatatcttcactcgccctacagtcgcactacattcgggagtcgggggttaaatgagtaggcgagcagaaagtagcgttaagcggttatgaaatgacagtgacattggcgggtaatgacagctacgcgccctcatcaacccaccagcgaaacagcatcttagtacacttgttctatgcgtcagaacgcgatacagtaaagccggctaatgggttacacccccgcttcctcgccttcaccacgttctggtggaggcttcttgctttagagtacgactcagattgctctttcgcttcgccagtccagtctgaccaaccctacaagccatcattctttgcttgcctgaccgctagtgcaacatcaagggcatgtgttgacaggttaacgggtcactgggtagaaagttattgccgacacttgcttgagcgctgccattaatcgtggttgattgctgtcaggcttatggggtatgggttagagggcttgggctggtaggtgtaaagggttggttagctggcattgttgcaagctccgtaatttagtgtggtcaaatgaagccttgatgggattcagttgtcggcaattgaagtggggctaaagtgcaatggtcggcaattgtttctagagggatgccccccctttgtggtgaagatgatgcctgctcagtatggctttcacgcttatgctccccacggggatgtggctagaggttttaagggggtgtgtgcttcagtccaaggggtactgacagtagagacggcaggtttagggtaaagtggatgctgtttgagcgggggttacagctgctagtcgtaccctaaaagggattcatccagccgttggtcacacttgagggtaatttaggggtggcaggctaacgagtcaggcagctttgaacagaccaccggtcggacatcatagacccaacccatctaaacccatcccctttacagaggagcagatcagagccagggcgtatcaactctggcagatcgggggagaccagcagtcagcagacgggtattggcaggcagcgcttgaggcactgaggcaagagcgttcacttgtgtgtgcgaagcacgtatcgctggtgtggcgagtgaatcagacctggcagatggctactaataaggagaacagggtcttcacgcttgatgtggtgaaggtggtgatctctgggtttggtgtgttggcgacagtctttgcaggggtagggttatatctcacttatcagaactcacaagcagagcggcagctgaatactgagaggctggtcaccgatcgctttagcaaagcggtggagcaattgggcagtcaggatgttgatgtgcggttgggtggcatctactcgctggagcgcgttgccaaggattcacccaaagaccatgggacagtgatggaagtgttgacagcgtatgtgcggaacaaatcaccagtgccgaaggggtggaaaagcacaccgtcagagaagcgtaagcc

SEQ ID NO: 345 - DNA, 4000 bp, Escherichia coli
  misc_feature (1)..(4): n is a, c, g, or t
  misc_feature (7)..(12): n is a, c, g, or t
  misc_feature (16)..(16): n is a, c, g, or t
  misc_feature (18)..(19): n is a, c, g, or t
  misc_feature (22)..(22): n is a, c, g, or t
  misc_feature (24)..(24): n is a, c, g, or t
  misc_feature (27)..(27): n is a, c, g, or t
  misc_feature (29)..(29): n is a, c, g, or t
  misc_feature (32)..(33): n is a, c, g, or t
  misc_feature (35)..(35): n is a, c, g, or t
  misc_feature (40)..(40): n is a, c, g, or t
  misc_feature (43)..(45): n is a, c, g, or t
  misc_feature (48)..(48): n is a, c, g, or t
  misc_feature (50)..(51): n is a, c, g, or t
  misc_feature (55)..(55): n is a, c, g, or t
  misc_feature (60)..(61): n is a, c, g, or t
  misc_feature (64)..(67): n is a, c, g, or t
  misc_feature (71)..(71): n is a, c, g, or t
  misc_feature (73)..(75): n is a, c, g, or t
  misc_feature (78)..(81): n is a, c, g, or t
  misc_feature (83)..(83): n is a, c, g, or t
  misc_feature (85)..(89): n is a, c, g, or t
  misc_feature (93)..(94): n is a, c, g, or t
  misc_feature (100)..(100): n is a, c, g, or t
  misc_feature (102)..(102): n is a, c, g, or t
  misc_feature (104)..(104): n is a, c, g, or t
  misc_feature (106)..(106): n is a, c, g, or t
  misc_feature (111)..(113): n is a, c, g, or t
  misc_feature (115)..(119): n is a, c, g, or t
  misc_feature (121)..(121): n is a, c, g, or t
  misc_feature (123)..(124): n is a, c, g, or t
  misc_feature (129)..(130): n is a, c, g, or t
  misc_feature (132)..(132): n is a, c, g, or t
  misc_feature (135)..(135): n is a, c, g, or t
  misc_feature (137)..(137): n is a, c, g, or t
  misc_feature (143)..(144): n is a, c, g, or t
  misc_feature (146)..(152): n is a, c, g, or t
  misc_feature (154)..(155): n is a, c, g, or t
  misc_feature (157)..(159): n is a, c, g, or t
  misc_feature (162)..(163): n is a, c, g, or t
  misc_feature (165)..(166): n is a, c, g, or t
  misc_feature (170)..(170): n is a, c, g, or t
  misc_feature (172)..(173): n is a, c, g, or t
  misc_feature (175)..(179): n is a, c, g, or t
  misc_feature (181)..(185): n is a, c, g, or t
  misc_feature (187)..(188): n is a, c, g, or t
  misc_feature (193)..(194): n is a, c, g, or t
  misc_feature (197)..(197): n is a, c, g, or t
  misc_feature (200)..(202): n is a, c, g, or t
  misc_feature (205)..(205): n is a, c, g, or t
  misc_feature (207)..(207): n is a, c, g, or t
  misc_feature (210)..(210): n is a, c, g, or t
  misc_feature (212)..(212): n is a, c, g, or t
  misc_feature (214)..(230): n is a, c, g, or t
  misc_feature (232)..(233): n is a, c, g, or t
  misc_feature (235)..(238): n is a, c, g, or t
  misc_feature (240)..(250): n is a, c, g, or t
  misc_feature (252)..(254): n is a, c, g, or t
  misc_feature (256)..(260): n is a, c, g, or t
  misc_feature (262)..(272): n is a, c, g, or t
  misc_feature (274)..(274): n is a, c, g, or t
  misc_feature (276)..(279): n is a, c, g, or t
  misc_feature (281)..(302): n is a, c, g, or t
  misc_feature (304)..(326): n is a, c, g, or t
  misc_feature (328)..(329): n is a, c, g, or t
  misc_feature (331)..(336): n is a, c, g, or t
  misc_feature (338)..(350): n is a, c, g, or t
  misc_feature (352)..(365): n is a, c, g, or t
  misc_feature (368)..(369): n is a, c, g, or t
  misc_feature (371)..(373): n is a, c, g, or t
  misc_feature (376)..(386): n is a, c, g, or t
  misc_feature (389)..(390): n is a, c, g, or t
  misc_feature (392)..(392): n is a, c, g, or t
  misc_feature (394)..(399): n is a, c, g, or t
  misc_feature (401)..(404): n is a, c, g, or t
  misc_feature (406)..(411): n is a, c, g, or t
  misc_feature (413)..(414): n is a, c, g, or t
  misc_feature (416)..(417): n is a, c, g, or t
  misc_feature (419)..(425): n is a, c, g, or t
  misc_feature (427)..(427): n is a, c, g, or t
  misc_feature (429)..(432): n is a, c, g, or t
  misc_feature (434)..(438): n is a, c, g, or t
  misc_feature (440)..(440): n is a, c, g, or t
  misc_feature (443)..(448): n is a, c, g, or t
  misc_feature (450)..(454): n is a, c, g, or t
  misc_feature (457)..(457): n is a, c, g, or t
  misc_feature (459)..(465): n is a, c, g, or t
  misc_feature (467)..(468): n is a, c, g, or t
  misc_feature (470)..(478): n is a, c, g, or t
  misc_feature (480)..(486): n is a, c, g, or t
  misc_feature (488)..(488): n is a, c, g, or t
  misc_feature (490)..(492): n is a, c, g, or t
  misc_feature (494)..(497): n is a, c, g, or t
  misc_feature (499)..(500): n is a, c, g, or t
  misc_feature (502)..(505): n is a, c, g, or t
  misc_feature (507)..(507): n is a, c, g, or t
  misc_feature (511)..(511): n is a, c, g, or t
  misc_feature (513)..(517): n is a, c, g, or t
  misc_feature (519)..(519): n is a, c, g, or t
  misc_feature (521)..(521): n is a, c, g, or t
  misc_feature (524)..(524): n is a, c, g, or t
  misc_feature (526)..(526): n is a, c, g, or t
  misc_feature (530)..(530): n is a, c, g, or t
  misc_feature (535)..(537): n is a, c, g, or t
  misc_feature (539)..(540): n is a, c, g, or t
  misc_feature (542)..(542): n is a, c, g, or t
  misc_feature (544)..(544): n is a, c, g, or t
  misc_feature (546)..(546): n is a, c, g, or t
  misc_feature (548)..(551): n is a, c, g, or t
  misc_feature (555)..(557): n is a, c, g, or t
  misc_feature (560)..(564): n is a, c, g, or t
  misc_feature (566)..(566): n is a, c, g, or t
  misc_feature (569)..(570): n is a, c, g, or t
  misc_feature (572)..(573): n is a, c, g, or t
  misc_feature (575)..(576): n is a, c, g, or t
  misc_feature (580)..(580): n is a, c, g, or t
  misc_feature (585)..(585): n is a, c, g, or t
  misc_feature (587)..(587): n is a, c, g, or t
  misc_feature (592)..(592): n is a, c, g, or t
  misc_feature (595)..(597): n is a, c, g, or t
  misc_feature (601)..(601): n is a, c, g, or t
  misc_feature (604)..(607): n is a, c, g, or t
  misc_feature (609)..(609): n is a, c, g, or t
  misc_feature (620)..(620): n is a, c, g, or t
  misc_feature (623)..(626): n is a, c, g, or t
  misc_feature (628)..(628): n is a, c, g, or t
  misc_feature (631)..(632): n is a, c, g, or t
  misc_feature (634)..(635): n is a, c, g, or t
  misc_feature (637)..(637): n is a, c, g, or t
  misc_feature (639)..(639): n is a, c, g, or t
  misc_feature (641)..(645): n is a, c, g, or t
  misc_feature (647)..(647): n is a, c, g, or t
  misc_feature (649)..(650): n is a, c, g, or t
  misc_feature (652)..(654): n is a, c, g, or t
  misc_feature (656)..(657): n is a, c, g, or t
  misc_feature (660)..(661): n is a, c, g, or t
  misc_feature (664)..(665): n is a, c, g, or t
  misc_feature (670)..(671): n is a, c, g, or t
  misc_feature (674)..(675): n is a, c, g, or t
  misc_feature (677)..(677): n is a, c, g, or t
  misc_feature (679)..(680): n is a, c, g, or t
  misc_feature (683)..(685): n is a, c, g, or t
  misc_feature (690)..(695): n is a, c, g, or t
  misc_feature (699)..(703): n is a, c, g, or t
  misc_feature (705)..(708): n is a, c, g, or t
  misc_feature (712)..(712): n is a, c, g, or t
  misc_feature (717)..(717): n is a, c, g, or t
  misc_feature (721)..(722): n is a, c, g, or t
  misc_feature (724)..(724): n is a, c, g, or t
  misc_feature (726)..(726): n is a, c, g, or t
  misc_feature (729)..(733): n is a, c, g, or t
  misc_feature (736)..(737): n is a, c, g, or t
  misc_feature (739)..(743): n is a, c, g, or t
  misc_feature (746)..(746): n is a, c, g, or t
  misc_feature (748)..(748): n is a, c, g, or t
  misc_feature (752)..(753): n is a, c, g, or t
  misc_feature (756)..(756): n is a, c, g, or t
  misc_feature (759)..(759): n is a, c, g, or t
  misc_feature (761)..(761): n is a, c, g, or t
  misc_feature (763)..(763): n is a, c, g, or t
  misc_feature (765)..(765): n is a, c, g, or t
  misc_feature (767)..(767): n is a, c, g, or t
  misc_feature (769)..(769): n is a, c, g, or t
  misc_feature (775)..(777): n is a, c, g, or t
  misc_feature (802)..(802): n is a, c, g, or t
  misc_feature (816)..(816): n is a, c, g, or t
  misc_feature (819)..(819): n is a, c, g, or t
  misc_feature (828)..(828): n is a, c, g, or t
  misc_feature (831)..(831): n is a, c, g, or t
  misc_feature (849)..(849): n is a, c, g, or t
  misc_feature (852)..(852): n is a, c, g, or t
  misc_feature (861)..(861): n is a, c, g, or t
  misc_feature (864)..(864): n is a, c, g, or t
  misc_feature (867)..(867): n is a, c, g, or t
  misc_feature (882)..(882): n is a, c, g, or t
  misc_feature (915)..(915): n is a, c, g, or t
  misc_feature (930)..(930): n is a, c, g, or t
  misc_feature (984)..(984): n is a, c, g, or t
  misc_feature (1008)..(1008): n is a, c, g, or t
  misc_feature (1011)..(1011): n is a, c, g, or t
  misc_feature (1023)..(1023): n is a, c, g, or t
  misc_feature (1026)..(1026): n is a, c, g, or t
  misc_feature (1053)..(1053): n is a, c, g, or t
  misc_feature (1062)..(1062): n is a, c, g, or t
  misc_feature (1101)..(1101): n is a, c, g, or t
  misc_feature (1107)..(1107): n is a, c, g, or t
  misc_feature (1116)..(1116): n is a, c, g, or t
  misc_feature (1119)..(1119): n is a, c, g, or t
  misc_feature (1143)..(1143): n is a, c, g, or t
  misc_feature (1149)..(1149): n is a, c, g, or t
  misc_feature (1152)..(1152): n is a, c, g, or t
  misc_feature (1158)..(1158): n is a, c, g, or t
  misc_feature (1248)..(1248): n is a, c, g, or t
  misc_feature (1269)..(1269): n is a, c, g, or t
  misc_feature (1286)..(1286): n is a, c, g, or t
  misc_feature (1305)..(1305): n is a, c, g, or t
  misc_feature (1335)..(1335): n is a, c, g, or t
  misc_feature (1341)..(1341): n is a, c, g, or t
  misc_feature (1380)..(1380): n is a, c, g, or t
  misc_feature (1386)..(1386): n is a, c, g, or t
  misc_feature (1398)..(1398): n is a, c, g, or t
  misc_feature (1424)..(1424): n is a, c, g, or t
  misc_feature (1467)..(1467): n is a, c, g, or t
  misc_feature (1479)..(1479): n is a, c, g, or t
  misc_feature (1491)..(1491): n is a, c, g, or t
  misc_feature (1509)..(1509): n is a, c, g, or t
  misc_feature (1533)..(1533): n is a, c, g, or t
  misc_feature (1548)..(1548): n is a, c, g, or t
  misc_feature (1554)..(1554): n is a, c, g, or t
  misc_feature (1557)..(1557): n is a, c, g, or t
  misc_feature (1560)..(1560): n is a, c, g, or t
  misc_feature (1572)..(1572): n is a, c, g, or t
  misc_feature (1575)..(1575): n is a, c, g, or t
  misc_feature (1587)..(1587): n is a, c, g, or t
  misc_feature (1590)..(1590): n is a, c, g, or t
  misc_feature (1596)..(1596): n is a, c, g, or t
  misc_feature (1601)..(1601): n is a, c, g, or t
  misc_feature (1637)..(1637): n is a, c, g, or t
  misc_feature (1689)..(1689): n is a, c, g, or t
  misc_feature (1718)..(1718): n is a, c, g, or t
  misc_feature (1725)..(1725): n is a, c, g, or t
  misc_feature (1761)..(1761): n is a, c, g, or t
  misc_feature (1812)..(1812): n is a, c, g, or t
  misc_feature (1963)..(1963): n is a, c, g, or t
  misc_feature (1974)..(1974): n is a, c, g, or t
  misc_feature (1976)..(1976): n is a, c, g, or t
  misc_feature (1980)..(1982): n is a, c, g, or t
  misc_feature (1985)..(1986): n is a, c, g, or t
  misc_feature (1988)..(1988): n is a, c, g, or t
  misc_feature (1990)..(1991): n is a, c, g, or t
nnnnttnnnnnnatantnnaanantangngtnnanaatanagnnnaantnngaanacaannggnnnntatntnnnatnnnnanannnnnagtnnaaaatntngntntattnnnannnnnananngtatnntngtngntttttnnannnnnnnannannntcnngnncttntnntnnnnntnnnnntnntacannagnacnnnttnancananannnnnnnnnnnnnnnnnannannnnannnnnnnnnnnannnannnnnannnnnnnnnnnanannnnannnnnnnnnnnnnnnnnnnnnnannnnnnnnnnnnnnnnnnnnnnntnncnnnnnnannnnnnnnnnnnnannnnnnnnnnnnnnttnnannnatnnnnnnnnnnnttnntntnnnnnntnnnntnnnnnnannannannnnnnnanannnnannnnntntgnnnnnntnnnnnatnannnnnnntnntnnnnnnnnnannnnnnnanannntnnnnannannnngngatnannnnncntnttnangaantgatnnnanngngngngnnnntacnnnatnnnnngntgnnanntnntttntaacnanagagngtnnngagnagnnnnanggtgaaaaaanacnnnncnccnntnnanantnnnnntntnnannntnnttnnggnnaaaannagnnantnntgnnncacannnnnnttannnnntnnnntttntatanaaannananaannnnngtnnannnnnaananatcnntcnctntntntnanantaatannntacataatttacgttatgtaatttnataaactatccaangcntttttctgntcntcattaacgatatgcgtntanaagtctgtnacntgngtgctagcatgtccnagctggtggctgaccaaaacctgtgatttggtngcatcatagagacgngttgctaatgtatggcgaagcttgtggggtgtcacgcggactttgaagtcttcngaatacttggcgaccatcttttcnacnctagaagcatcnatncggtttggaacacctcgatacaaggtnagaaagagngctgtatcagtcttttctgtcttgtaacgtttgtctcgnatagcnagatattgntcnagataaggcttagcaaaggcagcnacattnacngagtcncgttttccaccttttcgagtgacgtcaatgaccatcatcttaagattgaggtcacgaaggtctaggttaacggcttcagagagacggacnccagaggcaagaaggagtgcnataatggctaaatctcnctctttattcttattaaangaggataaggcgcgatttgagagtgtttgngggtantcctggtcgatatagttaagaaaaccttctgtttcatcncctaanaagagcttttgnttgatattttcagctcgagcagccanggtttctttctttttcttggtagcaaccttcttcatgacattncggtagaaatanggttccccttgntcgttttcaacttcctcngtcaaatacttatagagactaganagtgcagaaagggtncggttnatngtngtttgggaaacnccnttttttgtcgtnttngcattnagcanaggacgttcacgtaagtaaagaataaaggattccangtctttcttggtcatgtgctccagaacgtctaaagggatctcggccatggtntcagcatccgatataccagattccaaaanccaggtnaaaaatcgatcgtattcctttaagtattcgtacaangttgtaaaactgtatggaacggccagtttcgattggtaatattccaatacntaccagggcatgacttgtttgagtttatcaatccgttctaataagatctcgcgtttcatgtttttctccaaatctttctatactagtagtatagcatagccagatatatttttcaagaaaattatagtttttcggaaagatgttatagggnttatataggantntttnnnttnnanannataaccaaaaaaattttttaagccaattatactcaattatgtactttatttaagtgaacactggaaattttttactactctcaattcagttgaaaatgtactttatttaagtgaaaactaaaaaattttcaaatgtacattttgacaataaaaaaacactctaatatcaatttaatgaaatttagagtgtttttatttatctatattttttcaaactgtacaaagtgttcttgctttcttctgtggcctttgcaaatggaacacgaccttttattgcgttttttgtatgccattctttcttttacttgaattttgtaacggtgattaagattttcttgacatatccaccatacaggcagaatactcaactctgtaatttcagttggacttactatcaaggagttatttagataatcccactcattcattagactttgttgcgttgttgctaaatcgttaaatccttttaatactttttgatttctacagtatggacaagaattttctctgtaaaatttttctttaataactttctgatattctccagtacatacagggcatttccaccatgcattatatgttgaatttgcccttactgaagacatttcttgtttatttaatgatgaccattctttaattaaccaaggatgtgttgtttcaagatcattataaccttttgcagtcttcttaaaagaacaatatggacaacattggtcgtttttgtggcgatcagaaatttttgctttaaaacttctgtgacattttcgacaaatccaattggttaaagcatttgaatcataaaagaaggtatcaatatcaccattcagttcttttacccattcattgtttaagtacggtttaacatagcttagtgtttcatttggtttaggaatttttttattacagtaaggacatatagaattgagactattagaattattgtttgtaaacacacctagaacaatccctaatctctcctgaaattctaaatcacaacaatcacaaatccaattaaatattttattctcggtttctgacgatttcgtcacctcatcaggtttttctacattcttgctactccaaaggtcacacaactcaggataagtatctgcaattgtattataaccttttaatgcttgttcatcattacaatatggacagctatctattacttcttttcttattggaattgaacaaaggtattcaccttgacaaacagaacacttccaccaatatttttttgtttcaatgtggctcaatgctaaatgaacaggcaatccatttttatcgctccattcttcctgtaattttgggaaattatagagtatatcattgttaaaaacaagtgtatcccaatcacaacgattaggacaagtttgaaaattactattctctaagtcggttcttaaaatcatttcaattggactacaataaaaactgactttgcagcaagggcatttccaatttatgcatttagaagacttataccagtattcagaaataggtttatcattacttttatcccaaaatttctctaaataaggatgagtttcttgtaaagtattatatccttttaacatcaatttattatcacaataagggcagccttcaagatgccttttgacaacactacattcatattgaccatgacatttaaaacactgccatcttactaagatgttggataaactatcaatcatattactttttacatgagttggaataaattgcttaaaaagatttctatctgtatgtaatagggggttcgctttcactttaattgaggtatcgaatgtagctttacagttagtacaatagaaactatatcttttgattcttgaaattagctgatcaatagacaacttaaagatatggtcacatttgtcgcatttccaatttctagggattgtaacattgtcacttaacttcagatcattaaactctacatcgttttgctcccctggaagataaattttccgaagattagggtatgctttagtgtaaggtac

SEQ ID NO: 346 - DNA, 4000 bp, Escherichia coli
  misc_feature (486)..(486): n is a, c, g, or t
  misc_feature (611)..(611): n is a, c, g, or t
  misc_feature (1604)..(1604): n is a, c, g, or t
  misc_feature (1667)..(1667): n is a, c, g, or t
gggtgcgccaatccctatcgatttattcggcaaaagatattgccagcatgaccagagaagacggtctggtaaccgcagattgtcaattttgcggcgcacattatcagttagacccaaccagcgtagggtttcaggcggagcccgatgacagtgcccccgcatgagctgcgcgcgcgcttactgacagcaacagagcgttcgctggccgcctcttcggattttgatctgaaccccgtatcaaaggaaaagcgcaccgcatccctgcgcgacgcggccgtgttgattggtgtgtatagcagcgttgatggaccctgtgtcttgctgacccgccgcgccgcgcatttaaagcatcacccgaatcaagttgctttccccggtggtaaagtcgaagcaaaagatgcccatattcacgccgccgcgctgcgcgaagcgcaagaagaggttgggctcaatcctcaaaatatcgaggtattgggcagcttggcnccacatgaaacggtcaccggcttttccgtcacgcccgtaatcgggcttatttccagcccgtttacgccgcagatcgatccctgcgaagtggccgaggccttttgggtcccgctggcgcatctgangcaggtggaaaacttttcgatccatcagcggcgctggcaatcgcaaacgcgaaaatactatgctattccgttcggtccgtattatatatggggtgcaacggcgcgtattcttcgggggttggcagaccggttggtatgaatatcattcaggcagactggctcaaaaagcctggtgtggaaaaaattacacggctgttaagcgacgctgggttcgagatttattttgtcggtggctgcgtgcgcaacagcctgctcaacaggcccgtcgacgatattgatctggccagcaacgcccggcccgatcaaattcaaaatttggcgcgcgccgccaagctaaaaaccattccaaccggcatcgaacatggcaccatcacggtgatcagcgagggtacgccctatgaaatcaccacgtttcgccaagatattgaaaccgacggccgccgcgccacaattcaatatgccgatagccttaaaagcgatgcaacgcggcgtgattttacgatgaatgcgctttacgccgatgcaagcggcaagatctacgatccgctgaatgggcttgctgatctgaaagcggggcatctgcgctttatcgagaatgccgagcggcggattaccgaagattacctgcgtattttacggttctttaggttctcggcctggtatgccgatccagatttgggcttcgatcctgatgctctggccgcgattgcaacccagggcgatggcttattggggctttctaaagaacgcataaccaaagaactgttaaaattgctggctgccccaagccccgcccccgcggtggccgcgatgcgcatcaccggagtgctgcagcatgttttgcccggatctgatgataaagcccttgcaccattggtttactttgaaagcctctatgaggctccgattgacccgcttcggcggcttgctgcgctgggcggggggcaggttgaagcgcatctgcgcctaagcaaagcccaaagcaaaaccctnaaactgttgaaaacccatatagaggcgatgacaaaagcgggcgaattggcctatcggtgcaangcgccgattgctttggatgttttactgctgcgcgccgcgctttttgaaacgccggtctcagagcctgacttgagcgcggtacaaaccggtgccagcgcgcaatttccaataaccgccgaagatctgatgcccctttacactggctcagcgcttggcaaaaaactacgcgccttggaacagatctggatcacctctgggttccagctggataagacggcgttgctgcgcacattggatgttaaatagtgggcctgatactttagggctattttcaccgataaaattatattgacgcccctgataaacagcttagctcaggacaacggggcgcttttaacaattttgaagcttggttcgagcgaaataggcgcatattctaaaaggctttgatatctgcaaagggggggtcatgtttcggttttttgaagatttgatcgatcctttcgccgattaccgcgaaattgatcgcccaccgcaacggctttggccttttctacagacctattgtcaaccgtttaaatgggtcttcctgctggctttcaccgcctcggttttggtggctggcagcgaaatcggattgatctatgcgctgggatggctggtggaccagttgcagggcgatcgcgcagaaacgctgcagcgccttggaccggttttaatcgccttggcggtgtttatattgctgatcaggccaatacttacctttttcgataccgcattggtgaataatacgatcctcaccaatatggccacattggtgcgctggcgcgggcatcgccacgtaatgcgccaatctgtgggctggtttgaaggcgattttgccggccgcatcgccaaccgcgtgatgcaaacgccccctgctgcgggcgaagtggcctttcacgtgtttgacgcaatgagctatgcgctggcctatgtgatcggcgctttcttcttactgatgcaggcagatattcgccttaccctgcccttggtgctttggttcgggctctatttgttactgctgcgcttcacggtaaaacgcgttggccccgcctcaaaagcttcatcagatgcgcgttccgagttgaacgggcgggtcgtggatgcgtataccaacattcattcggtaaaattatttgcccatgagggcgaagaaatcgcctttgccaaagcgggcatcacgcaaacccgcgacaccttcatcaaggaaatgcggatttatacccgcatggatattttattaagtctgataaatggctttttgatcgtggcggtgatcgggtgggggattgcgctttgggcgcagggcagcgccagtgctggggttgtggcggcagcgtcagcgttggttttaaggctgaacagcatgagcaattggatcatctgggccgtcgcctcattttttcgcgaattgggcgtggtggccgaaggcatgcaaaccttatcacaacccgtcaccttaattgaccacccgaacgcgcagaccttacaaccacaagaggccaggattgaaataaccgagctgtcgcatcattacggccgggctcttggtggattggaaggtatcaatctaagcattccagcgggtcagaagctgggccttgtggggcgctctggcgcaggaaaatcaactttgttcaagcttttgctccggttttatgacgctgagtccggccagatttatattgatgggcaacgcatagacctggtgaagcaagacagtttgcgccgccatatcggcatggtccagcaagagagcagcctgatgcaccgctcagtgcgcgataatatccgctatgggaataacgccgccagcgaggcgcaagtgatcgcggcggccaagcaggccgaagcgcatgactttattttggacctcgaagatccagaagggcgttgcggttatgaggcgcatgtcggagagcgcggcgtaaagctttccggcgggcagcgccaacgtattgccttggcccgggtgattctgaaagacgcccccatattattgctcgatgaagccaccagcgcgctggacagcgaagtcgaggcggccattcagacaacgctttacagcatgatggacggcaaaacggtgattgcgatcgcgcatcgattgtctacgattgcgcatatggatcgaattcttgtaatggatcaggggcggatcgttgaagagggcagccatgaacagctgctggcaaaaggcgggctttatgccgggttttgggcccatcaatcgggtgggttccttgatgtggatgcagcgcagtgacacctttggcaaattggatctcgcatcacgccaaaagtgatcaggcgccgccgaaaacattgctcgccttcctgcgctgggcgtt

SEQ ID NO: 347 - DNA, 4000 bp, Escherichia coli
  misc_feature (1973)..(1973): n is a, c, g, or t
  misc_feature (1979)..(1980): n is a, c, g, or t
  misc_feature (1985)..(1986): n is a, c, g, or t
  misc_feature (2012)..(2012): n is a, c, g, or t
  misc_feature (2021)..(2021): n is a, c, g, or t
  misc_feature (2028)..(2028): n is a, c, g, or t
  misc_feature (2031)..(2031): n is a, c, g, or t
  misc_feature (2040)..(2040): n is a, c, g, or t
  misc_feature (2045)..(2045): n is a, c, g, or t
  misc_feature (2909)..(2913): n is a, c, g, or t
  misc_feature (2915)..(2917): n is a, c, g, or t
  misc_feature (2919)..(2921): n is a, c, g, or t
  misc_feature (2923)..(2924): n is a, c, g, or t
  misc_feature (2926)..(2926): n is a, c, g, or t
  misc_feature (2928)..(2929): n is a, c, g, or t
  misc_feature (2931)..(2934): n is a, c, g, or t
  misc_feature (2936)..(2936): n is a, c, g, or t
  misc_feature (2938)..(2942): n is a, c, g, or t
  misc_feature (2946)..(2949): n is a, c, g, or t
  misc_feature (2952)..(2954): n is a, c, g, or t
  misc_feature (2958)..(2958): n is a, c, g, or t
  misc_feature (2966)..(2966): n is a, c, g, or t
  misc_feature (2968)..(2968): n is a, c, g, or t
  misc_feature (2970)..(2971): n is a, c, g, or t
  misc_feature (2973)..(2975): n is a, c, g, or t
  misc_feature (2977)..(2977): n is a, c, g, or t
  misc_feature (2979)..(2979): n is a, c, g, or t
  misc_feature (2982)..(2983): n is a, c, g, or t
  misc_feature (2990)..(2990): n is a, c, g, or t
  misc_feature (2993)..(2994): n is a, c, g, or t
  misc_feature (2996)..(2996): n is a, c, g, or t
  misc_feature (3000)..(3001): n is a, c, g, or t
  misc_feature (3005)..(3005): n is a, c, g, or t
  misc_feature (3012)..(3013): n is a, c, g, or t
  misc_feature (3016)..(3019): n is a, c, g, or t
  misc_feature (3021)..(3022): n is a, c, g, or t
  misc_feature (3027)..(3029): n is a, c, g, or t
  misc_feature (3032)..(3033): n is a, c, g, or t
  misc_feature (3035)..(3035): n is a, c, g, or t
  misc_feature (3037)..(3038): n is a, c, g, or t
  misc_feature (3040)..(3041): n is a, c, g, or t
  misc_feature (3044)..(3045): n is a, c, g, or t
  misc_feature (3047)..(3050): n is a, c, g, or t
  misc_feature (3052)..(3052): n is a, c, g, or t
  misc_feature (3054)..(3054): n is a, c, g, or t
  misc_feature (3056)..(3056): n is a, c, g, or t
  misc_feature (3058)..(3059): n is a, c, g, or t
  misc_feature (3061)..(3063): n is a, c, g, or t
  misc_feature (3065)..(3069): n is a, c, g, or t
  misc_feature (3072)..(3072): n is a, c, g, or t
  misc_feature (3074)..(3078): n is a, c, g, or t
  misc_feature (3082)..(3082): n is a, c, g, or t
  misc_feature (3084)..(3088): n is a, c, g, or t
  misc_feature (3090)..(3093): n is a, c, g, or t
  misc_feature (3095)..(3097): n is a, c, g, or t
  misc_feature (3100)..(3103): n is a, c, g, or t
  misc_feature (3105)..(3108): n is a, c, g, or t
  misc_feature (3110)..(3111): n is a, c, g, or t
  misc_feature (3113)..(3114): n is a, c, g, or t
  misc_feature (3117)..(3118): n is a, c, g, or t
  misc_feature (3120)..(3121): n is a, c, g, or t
  misc_feature (3129)..(3129): n is a, c, g, or t
  misc_feature (3133)..(3135): n is a, c, g, or t
  misc_feature (3138)..(3139): n is a, c, g, or t
  misc_feature (3141)..(3141): n is a, c, g, or t
  misc_feature (3143)..(3143): n is a, c, g, or t
  misc_feature (3147)..(3148): n is a, c, g, or t
  misc_feature (3150)..(3150): n is a, c, g, or t
  misc_feature (3152)..(3156): n is a, c, g, or t
  misc_feature (3158)..(3159): n is a, c, g, or t
  misc_feature (3161)..(3161): n is a, c, g, or t
  misc_feature (3163)..(3165): n is a, c, g, or t
  misc_feature (3167)..(3167): n is a, c, g, or t
  misc_feature (3169)..(3170): n is a, c, g, or t
  misc_feature (3172)..(3173): n is a, c, g, or t
  misc_feature (3175)..(3175): n is a, c, g, or t
  misc_feature (3178)..(3179): n is a, c, g, or t
  misc_feature (3183)..(3185): n is a, c, g, or t
  misc_feature (3187)..(3187): n is a, c, g, or t
  misc_feature (3191)..(3192): n is a, c, g, or t
  misc_feature (3196)..(3197): n is a, c, g, or t
  misc_feature (3199)..(3199): n is a, c, g, or t
  misc_feature (3202)..(3202): n is a, c, g, or t
  misc_feature (3207)..(3207): n is a, c, g, or t
  misc_feature (3209)..(3210): n is a, c, g, or t
  misc_feature (3212)..(3212): n is a, c, g, or t
  misc_feature (3220)..(3223): n is a, c, g, or t
  misc_feature (3225)..(3227): n is a, c, g, or t
  misc_feature (3229)..(3232): n is a, c, g, or t
  misc_feature (3235)..(3236): n is a, c, g, or t
  misc_feature (3238)..(3239): n is a, c, g, or t
  misc_feature (3242)..(3244): n is a, c, g, or t
  misc_feature (3255)..(3255): n is a, c, g, or t
  misc_feature (3257)..(3258): n is a, c, g, or t
  misc_feature (3260)..(3261): n is a, c, g, or t
  misc_feature (3263)..(3263): n is a, c, g, or t
  misc_feature (3265)..(3267): n is a, c, g, or t
  misc_feature (3269)..(3270): n is a, c, g, or t
  misc_feature (3272)..(3272): n is a, c, g, or t
  misc_feature (3274)..(3274): n is a, c, g, or t
  misc_feature (3279)..(3281): n is a, c, g, or t
  misc_feature (3283)..(3284): n is a, c, g, or t
  misc_feature (3286)..(3289): n is a, c, g, or t
  misc_feature (3291)..(3293): n is a, c, g, or t
  misc_feature (3295)..(3295): n is a, c, g, or t
  misc_feature (3297)..(3297): n is a, c, g, or t
  misc_feature (3299)..(3301): n is a, c, g, or t
  misc_feature (3308)..(3308): n is a, c, g, or t
  misc_feature (3311)..(3312): n is a, c, g, or t
  misc_feature (3315)..(3316): n is a, c, g, or t
  misc_feature (3318)..(3320): n is a, c, g, or t
  misc_feature (3322)..(3323): n is a, c, g, or t
  misc_feature (3329)..(3330): n is a, c, g, or t
  misc_feature (3338)..(3339): n is a, c, g, or t
  misc_feature (3342)..(3343): n is a, c, g, or t
  misc_feature (3346)..(3346): n is a, c, g, or t
  misc_feature (3350)..(3350): n is a, c, g, or t
  misc_feature (3357)..(3359): n is a, c, g, or t
  misc_feature (3361)..(3364): n is a, c, g, or t
  misc_feature (3366)..(3368): n is a, c, g, or t
  misc_feature (3370)..(3370): n is a, c, g, or t
  misc_feature (3372)..(3372): n is a, c, g, or t
  misc_feature (3376)..(3384): n is a, c, g, or t
  misc_feature (3387)..(3388): n is a, c, g, or t
  misc_feature (3390)..(3390): n is a, c, g, or t
  misc_feature (3395)..(3397): n is a, c, g, or t
  misc_feature (3399)..(3399): n is a, c, g, or t
  misc_feature (3402)..(3403): n is a, c, g, or t
  misc_feature (3408)..(3409): n is a, c, g, or t
  misc_feature (3412)..(3414): n is a, c, g, or t
  misc_feature (3417)..(3418): n is a, c, g, or t
  misc_feature (3420)..(3423): n is a, c, g, or t
  misc_feature (3425)..(3427): n is a, c, g, or t
  misc_feature (3429)..(3432): n is a, c, g, or t
  misc_feature (3434)..(3435): n is a, c, g, or t
  misc_feature (3437)..(3437): n is a, c, g, or t
  misc_feature (3439)..(3439): n is a, c, g, or t
  misc_feature (3441)..(3442): n is a, c, g, or t
  misc_feature (3444)..(3448): n is a, c, g, or t
  misc_feature (3453)..(3453): n is a, c, g, or t
  misc_feature (3457)..(3457): n is a, c, g, or t
  misc_feature (3461)..(3463): n is a, c, g, or t
  misc_feature (3466)..(3466): n is a, c, g, or t
  misc_feature (3470)..(3470): n is a, c, g, or t
  misc_feature (3474)..(3474): n is a, c, g, or t
  misc_feature (3476)..(3477): n is a, c, g, or t
  misc_feature (3479)..(3480): n is a, c, g, or t
  misc_feature (3482)..(3484): n is a, c, g, or t
  misc_feature (3486)..(3486): n is a, c, g, or t
  misc_feature (3492)..(3494): n is a, c, g, or t
  misc_feature (3496)..(3497): n is a, c, g, or t
  misc_feature (3500)..(3502): n is a, c, g, or t
  misc_feature (3505)..(3506): n is a, c, g, or t
  misc_feature (3508)..(3509): n is a, c, g, or t
  misc_feature (3511)..(3513): n is a, c, g, or t
  misc_feature (3519)..(3519): n is a, c, g, or t
  misc_feature (3521)..(3525): n is a, c, g, or t
  misc_feature (3527)..(3529): n is a, c, g, or t
  misc_feature (3534)..(3536): n is a, c, g, or t
  misc_feature (3538)..(3538): n is a, c, g, or t
  misc_feature (3543)..(3544): n is a, c, g, or t
  misc_feature (3548)..(3549): n is a, c, g, or t
  misc_feature (3551)..(3551): n is a, c, g, or t
  misc_feature (3554)..(3554): n is a, c, g, or t
  misc_feature (3556)..(3557): n is a, c, g, or t
  misc_feature (3562)..(3562): n is a, c, g, or t
  misc_feature (3564)..(3564): n is a, c, g, or t
  misc_feature (3568)..(3570): n is a, c, g, or t
  misc_feature (3572)..(3575): n is a, c, g, or t
  misc_feature (3577)..(3580): n is a, c, g, or t
  misc_feature (3582)..(3589): n is a, c, g, or t
  misc_feature (3594)..(3594): n is a, c, g, or t
  misc_feature (3596)..(3596): n is a, c, g, or t
  misc_feature (3602)..(3602): n is a, c, g, or t
  misc_feature (3605)..(3607): n is a, c, g, or t
  misc_feature (3609)..(3609): n is a, c, g, or t
  misc_feature (3611)..(3611): n is a, c, g, or t
  misc_feature (3613)..(3613): n is a, c, g, or t
  misc_feature (3615)..(3616): n is a, c, g, or t
  misc_feature (3618)..(3619): n is a, c, g, or t
  misc_feature (3621)..(3622): n is a, c, g, or t
  misc_feature (3626)..(3629): n is a, c, g, or t
  misc_feature (3631)..(3634): n is a, c, g, or t
  misc_feature (3638)..(3640): n is a, c, g, or t
  misc_feature (3642)..(3643): n is a, c, g, or t
  misc_feature (3645)..(3650): n is a, c, g, or t
  misc_feature (3655)..(3658): n is a, c, g, or t
  misc_feature (3661)..(3664): n is a, c, g, or t
  misc_feature (3666)..(3666): n is a, c, g, or t
  misc_feature (3668)..(3668): n is a, c, g, or t
  misc_feature (3671)..(3672): n is a, c, g, or t
  misc_feature (3677)..(3679): n is a, c, g, or t
  misc_feature (3681)..(3684): n is a, c, g, or t
  misc_feature (3689)..(3689): n is a, c, g, or t
  misc_feature (3693)..(3693): n is a, c, g, or t
  misc_feature (3696)..(3696): n is a, c, g, or t
  misc_feature (3700)..(3700): n is a, c, g, or t
  misc_feature (3706)..(3707): n is a, c, g, or t
  misc_feature (3709)..(3710): n is a, c, g, or t
  misc_feature (3712)..(3713): n is a, c, g, or t
  misc_feature (3715)..(3717): n is a, c, g, or t
  misc_feature (3720)..(3721): n is a, c, g, or t
  misc_feature (3723)..(3725): n is a, c, g, or t
  misc_feature (3729)..(3730): n is a, c, g, or t
  misc_feature (3732)..(3732): n is a, c, g, or t
  misc_feature (3734)..(3734): n is a, c, g, or t
  misc_feature (3739)..(3739): n is a, c, g, or t
  misc_feature (3741)..(3742): n is a, c, g, or t
  misc_feature (3748)..(3755): n is a, c, g, or t
  misc_feature (3758)..(3761): n is a, c, g, or t
  misc_feature (3763)..(3766): n is a, c, g, or t
  misc_feature (3768)..(3772): n is a, c, g, or t
  misc_feature (3774)..(3777): n is a, c, g, or t
  misc_feature (3780)..(3781): n is a, c, g, or t
  misc_feature (3783)..(3783): n is a, c, g, or t
  misc_feature (3785)..(3786): n is a, c, g, or t
  misc_feature (3788)..(3789): n is a, c, g, or t
  misc_feature (3791)..(3793): n is a, c, g, or t
  misc_feature (3795)..(3797): n is a, c, g, or t
  misc_feature (3799)..(3802): n is a, c, g, or t
  misc_feature (3806)..(3806): n is a, c, g, or t
  misc_feature (3812)..(3813): n is a, c, g, or t
  misc_feature (3815)..(3815): n is a, c, g, or t
  misc_feature (3819)..(3820): n is a, c, g, or t
  misc_feature (3822)..(3822): n is a, c, g, or t
  misc_feature (3826)..(3829): n is a, c, g, or t
  misc_feature (3831)..(3832): n is a, c, g, or t
  misc_feature (3834)..(3836): n is a, c, g, or t
  misc_feature (3838)..(3838): n is a, c, g, or t
  misc_feature (3840)..(3841): n is a, c, g, or t
  misc_feature (3846)..(3846): n is a, c, g, or t
  misc_feature (3848)..(3848): n is a, c, g, or t
  misc_feature (3852)..(3852): n is a, c, g, or t
  misc_feature (3855)..(3857): n is a, c, g, or t
  misc_feature (3861)..(3861): n is a, c, g, or t
  misc_feature (3863)..(3865): n is a, c, g, or t
  misc_feature (3871)..(3874): n is a, c, g, or t
  misc_feature (3876)..(3876): n is a, c, g, or t
  misc_feature (3878)..(3881): n is a, c, g, or t
  misc_feature (3885)..(3886): n is a, c, g, or t
  misc_feature (3889)..(3890): n is a, c, g, or t
  misc_feature (3893)..(3896): n is a, c, g, or t
  misc_feature (3898)..(3900): n is a, c, g, or t
  misc_feature (3907)..(3910): n is a, c, g, or t
  misc_feature (3912)..(3912): n is a, c, g, or t
  misc_feature (3914)..(3915): n is a, c, g, or t
  misc_feature (3917)..(3918): n is a, c, g, or t
  misc_feature (3922)..(3922): n is a, c, g, or t
  misc_feature (3926)..(3927): n is a, c, g, or t
  misc_feature (3929)..(3931): n is a, c, g, or t
  misc_feature (3933)..(3938): n is a, c, g, or t
  misc_feature (3940)..(3940): n is a, c, g, or t
  misc_feature (3942)..(3944): n is a, c, g, or t
  misc_feature (3946)..(3951): n is a, c, g, or t
  misc_feature (3955)..(3956): n is a, c, g, or t
  misc_feature (3959)..(3963): n is a, c, g, or t
  misc_feature (3965)..(3966): n is a, c, g, or t
  misc_feature (3968)..(3968): n is a, c, g, or t
  misc_feature (3970)..(3972): n is a, c, g, or t
  misc_feature (3974)..(3974): n is a, c, g, or t
  misc_feature (3976)..(3977): n is a, c, g, or t
  misc_feature (3980)..(3980): n is a, c, g, or t
  misc_feature (3982)..(3982): n is a, c, g, or t
  misc_feature (3984)..(3985): n is a, c, g, or t
  misc_feature (3987)..(3987): n is a, c, g, or t
  misc_feature (3989)..(3989): n is a, c, g, or t
  misc_feature (3991)..(3991): n is a, c, g, or t
  misc_feature (3993)..(3993): n is a, c, g, or t
  misc_feature (3995)..(3996): n is a, c, g, or t
  misc_feature (4000)..(4000): n is a, c, g, or t
aatttgtcgcacagcgacagcgtttcttgtcgcaatcttcttctcccgcgcctacggcgcggtcgggtttttctttaacttccaaggaagtcagtttctgcggtgaactattaacctttgctcgaacccactttgaaaacaaagaatgattgcaacgcgcggagcgcgtggtggctttgtacttcaacgtacgcattcgggttcgtggtgatgcacctcggacgcgagctaacactcgcgtgcaaaaccaaaaactttccttcctttatttctttaagcggagaggggtctggggagagccgccaaaaagatgaaaggaagtttttgttttgcttcgctatgttgcaattcttagtttaacactttatctaaagtttggatattgatattttggatagacactgtagtatatggttaagtcaatccacacaaaagagtatgcgtacgtcgttgagcaactttgcaaagcacgaaatgaaaagggtcttacccagtccgaagttgccaagaagttaaagcgcccacaatcacacgtttccaacattgaaactggtcaacaaaggattgatgttgttgaactccaaaggtttgcgaaaatctatggaaaagagattactcactttgtaaaatagcattatctatgtatataccaacttggattttaatactcattatcgcaggagttttttattatctttacacaaagaaaaagtcggatgaagtgaagagtattaattcacctaaagtggagaatgctgacaacaacactgatacccaaaatgaggactggttagactcagagaactggcaagatattgctttagaacacatggcaaaatttcctaaacgaacaggaaaaagtcgtccaacttatgaagaaatgcttgaactagacgaaaacgaatttaaggcgtggttgtttgttaaaggcgaaggagataatcaagaacaaactctcaaagaaatgattgagcacgagtcaagaactggcagttttacaaaaactgccagagctgatattcccccacacgagcaactaatcctcaatgtatttgataaagacaaaagtgcagaaactataaaagccattaggaatttagacaaagtagccaacgaacttaaagacgacaaaaaagatgaggatattgttaaacagtctatttgggcaaaagcaacttctgattacttcaagctgtccgaaaaataaacgttagtacccctgagaacagatcaagataatttgacataccaaaaatagtgtgatagtatgtatttcgctttgcactttaaaaaaacttgcgtttgccgtagcagaaagtgtctgaaacattggactttttctgctacggcacactgtattccacattgtgttttgctagcctcttatctagcaggtaagagagaacgccgactagtagtcggagaggaaaaaccaatgtccaagtacaattacgatctgagcgtcgacggcgtgagcgtggaagcaattctcaacaaactcggtggcgtggcgggagcaaagcgcttcctgcgtgatgaactcaacctggtcgaggtcaaaccgcaattcgaacgcaacgaacatggccacatcatcatctcgattaccggcctcgccctgactggcgagcaggaaatcgagcggctgaacagcgccggattccgcatcagccgctggacgaagtcgtgtttcacgtccacgaagaaggacggctacgacaagtgccatcggttggaggacgggcatgaatatcagctcgtcatcattcccggcaaggaggttgcgcagaatcgcacgaccaccgcgctgcgggaatacgccgcaggcttcggctaccaacaagcgctggctggtgtcgtccctcgcattcgcgaagctgtctcggatgagatgatggagaaaatggggttctggtacatcgccgcgctccatgaccccatcaccgattctgtcgcctacccgcgcgtgctcnacgcgnnccggnncggcgacggtcagtgggtcgatgcgngcttcggcnaccctgnccnccagtggcntgacnacggtgcgttcgcgttcctcgtctctgcaagttgaacttgatattggattctatgtgcttgcacttgaatcctttgtccttggtttcgcgctctgcgcgaagccaattttttttgctaaaatatagacggtactaagtgaatacgcgggcgattacggtttctcgctaccgaatccagtttttatatataccagagtgttctcggctacggcttaatgcagtgtgttatatacagactcaaaagtaaaaatacttggtgcgatctgctaatgcatttaagatgccgaattcgatacagctcggagaatattcaatgagcagtggcatggacggcatttcgtacaattctgacggcaacccgaacgtgctcaacgcgaaccggaacgacgacggtcagtgggtcaatgcgaacttcgacaaccctgacaaccagtggaatgacaacggtgcgttcgcgttcctcgtctctgcaactctttttatttctcaccccgctttgtcggggttgagtttttattaagttgtccattccaaccacccaacattttaccaacctcatccagcacttcagataatgcgatatacttctttgtatcaagtgatttcgtttcccataaaaccatgagtaataacttcaatgtgtccacttttctcgtcgccagctgtacatacggtagttttttctctcgcgaaagaaacgcagcagctgatattgcttctatactttcgataaacaactcgtctattcttgcaccgagtgagtatcggtgcagttttggtaatttagcgtggtacgtatgccagagcaagtaagcttgtttgattcgctccaaaatggggagcagctttttgcggggggggggnnnnntnnntnnntnntncnntnnnngntnnnnngatnnnntcnnngcanaaaatttncncnncnnntngngannatttttncgnngnaaannaaanaaaaaanntgnnnnannatttnnntannancnnanngannannnncntncncnncnnngnnnnntgngnnnnnaaanannnnntnnnngnnnatnnnnannnntnnanntcnncnncccaaaancgcnnnatnntnanaaanncngnnnnngnnanannntncnncnncncgnnatannncnaaanntatnntnatnttttnannanaaatttannnnannntnnnnctnntnncgnnntgggaaagggncnnannangnnntnngntnttttnnntnntnnnnannncnantnnnaaaaaancanncgnngnnntnntgggtnntaaaatgnnatnntanaaanttttttnnntnnnntnnncnanatannnnnnnnnatnntntttcnnngnatnntagannctnnnacnntnnnnannntnnnngnngnantnntnnnnnttttnatgngggnnntgngggnaaangnntnncnnntngaaatnnnanntcnnnacnncnngnnnatatanannnnnannnatttnnncnatttnnaaannanacncnnaaaancnagcnnnannnncnnnncnnnnnnnnttttntntttttntcnnnananananngnngnntgtnnnngnnnncccnnngnntnnnnnntttcnnnnatnnnnantngcnntttcnnntnnnncaaanaaantanaaantaaaanngnngnntnnngtnntnnntttnntngntgggnanntttttnnnnnnnncgnnnncnnnngnnnnntnnnnagnngnanntnntnnngnnnannnnaganaaaaanngnaaannanaaannnnannannntntnntgggntnctcncannngggnannnagagannnnanannnnaaanntgnngannnngnnnttttttnnnnananntnnaaantttnnannnannnnnngngnnnannnnnncacnncgnnnnngnnangnnnananntgngngnngncngngngnngtgn

SEQ ID NO: 348 - DNA, 4000 bp, Escherichia coli
  misc_feature (7)..(7): n is a, c, g, or t
  misc_feature (284)..(284): n is a, c, g, or t
  misc_feature (573)..(573): n is a, c, g, or t
  misc_feature (579)..(579): n is a, c, g, or t
  misc_feature (1112)..(1112): n is a, c, g, or t
  misc_feature (1576)..(1576): n is a, c, g, or t
  misc_feature (1658)..(1658): n is a, c, g, or t
  misc_feature (1924)..(1924): n is a, c, g, or t
  misc_feature (1985)..(1985): n is a, c, g, or t
  misc_feature (1991)..(1991): n is a, c, g, or t
  misc_feature (2028)..(2028): n is a, c, g, or t
  misc_feature (2550)..(2558): n is a, c, g, or t
  misc_feature (2560)..(2561): n is a, c, g, or t
  misc_feature (2563)..(2563): n is a, c, g, or t
  misc_feature (2565)..(2565): n is a, c, g, or t
  misc_feature (2567)..(2568): n is a, c, g, or t
  misc_feature (2570)..(2570): n is a, c, g, or t
  misc_feature (2572)..(2572): n is a, c, g, or t
  misc_feature (2574)..(2574): n is a, c, g, or t
  misc_feature (2576)..(2576): n is a, c, g, or t
  misc_feature (2579)..(2583): n is a, c, g, or t
  misc_feature (2585)..(2587): n is a, c, g, or t
  misc_feature (2589)..(2589): n is a, c, g, or t
  misc_feature (2591)..(2595): n is a, c, g, or t
  misc_feature (2597)..(2604): n is a, c, g, or t
  misc_feature (2607)..(2610): n is a, c, g, or t
  misc_feature (2613)..(2613): n is a, c, g, or t
  misc_feature (2615)..(2615): n is a, c, g, or t
  misc_feature (2618)..(2629): n is a, c, g, or t
  misc_feature (2631)..(2632): n is a, c, g, or t
  misc_feature (2634)..(2641): n is a, c, g, or t
  misc_feature (2643)..(2644): n is a, c, g, or t
  misc_feature (2646)..(2651): n is a, c, g, or t
  misc_feature (2653)..(2657): n is a, c, g, or t
  misc_feature (2660)..(2660): n is a, c, g, or t
  misc_feature (2662)..(2662): n is a, c, g, or t
  misc_feature (2665)..(2667): n is a, c, g, or t
  misc_feature (2669)..(2669): n is a, c, g, or t
  misc_feature (2674)..(2676): n is a, c, g, or t
  misc_feature (2678)..(2678): n is a, c, g, or t
  misc_feature (2680)..(2686): n is a, c, g, or t
  misc_feature (2688)..(2688): n is a, c, g, or t
  misc_feature (2690)..(2696): n is a, c, g, or t
  misc_feature (2698)..(2702): n is a, c, g, or t
  misc_feature (2704)..(2709): n is a, c, g, or t
  misc_feature (2711)..(2711): n is a, c, g, or t
  misc_feature (2713)..(2716): n is a, c, g, or t
  misc_feature (2718)..(2719): n is a, c, g, or t
  misc_feature (2721)..(2721): n is a, c, g, or t
  misc_feature (2723)..(2723): n is a, c, g, or t
  misc_feature (2727)..(2729): n is a, c, g, or t
  misc_feature (2731)..(2737): n is a, c, g, or t
  misc_feature (2739)..(2739): n is a, c, g, or t
  misc_feature (2743)..(2744): n is a, c, g, or t
  misc_feature (2746)..(2748): n is a, c, g, or t
  misc_feature (2751)..(2752): n is a, c, g, or t
  misc_feature (2754)..(2755): n is a, c, g, or t
  misc_feature (2757)..(2758): n is a, c, g, or t
  misc_feature (2760)..(2763): n is a, c, g, or t
  misc_feature (2765)..(2769): n is a, c, g, or t
  misc_feature (2772)..(2783): n is a, c, g, or t
  misc_feature (2785)..(2786): n is a, c, g, or t
  misc_feature (2791)..(2793): n is a, c, g, or t
  misc_feature (2799)..(2801): n is a, c, g, or t
  misc_feature (2803)..(2809): n is a, c, g, or t
  misc_feature (2811)..(2812): n is a, c, g, or t
  misc_feature (2814)..(2814): n is a, c, g, or t
  misc_feature (2816)..(2819): n is a, c, g, or t
  misc_feature (2821)..(2831): n is a, c, g, or t
  misc_feature (2835)..(2835): n is a, c, g, or t
  misc_feature (2839)..(2848): n is a, c, g, or t
  misc_feature (2850)..(2852): n is a, c, g, or t
  misc_feature (2855)..(2856): n is a, c, g, or t
  misc_feature (2858)..(2858): n is a, c, g, or t
  misc_feature (2860)..(2861): n is a, c, g, or t
  misc_feature (2863)..(2865): n is a, c, g, or t
  misc_feature (2867)..(2870): n is a, c, g, or t
  misc_feature (2872)..(2873): n is a, c, g, or t
  misc_feature (2875)..(2880): n is a, c, g, or t
  misc_feature (2882)..(2895): n is a, c, g, or t
  misc_feature (2897)..(2898): n is a, c, g, or t
  misc_feature (2901)..(2902): n is a, c, g, or t
  misc_feature (2904)..(2907): n is a, c, g, or t
  misc_feature (2909)..(2911): n is a, c, g, or t
  misc_feature (2913)..(2917): n is a, c, g, or t
  misc_feature (2919)..(2923): n is a, c, g, or t
  misc_feature (2926)..(2928): n is a, c, g, or t
  misc_feature (2930)..(2941): n is a, c, g, or t
  misc_feature (2943)..(2943): n is a, c, g, or t
  misc_feature (2946)..(2949): n is a, c, g, or t
  misc_feature (2952)..(2956): n is a, c, g, or t
  misc_feature (2958)..(2965): n is a, c, g, or t
  misc_feature (2967)..(2971): n is a, c, g, or t
  misc_feature (2973)..(2976): n is a, c, g, or t
  misc_feature (2978)..(2978): n is a, c, g, or t
  misc_feature (2980)..(2981): n is a, c, g, or t
  misc_feature (2984)..(2985): n is a, c, g, or t
  misc_feature (2987)..(2988): n is a, c, g, or t
  misc_feature (2990)..(2991): n is a, c, g, or t
  misc_feature (2993)..(2993): n is a, c, g, or t
  misc_feature (2996)..(2996): n is a, c, g, or t
  misc_feature (2998)..(2998): n is a, c, g, or t
  misc_feature (3000)..(3003): n is a, c, g, or t
  misc_feature (3005)..(3007): n is a, c, g, or t
  misc_feature (3010)..(3022): n is a, c, g, or t
  misc_feature (3024)..(3024): n is a, c, g, or t
  misc_feature (3027)..(3028): n is a, c, g, or t
  misc_feature (3030)..(3032): n is a, c, g, or t
  misc_feature (3034)..(3034): n is a, c, g, or t
  misc_feature (3036)..(3043): n is a, c, g, or t
  misc_feature (3045)..(3046): n is a, c, g, or t
  misc_feature (3048)..(3049): n is a, c, g, or t
  misc_feature (3052)..(3053): n is a, c, g, or t
  misc_feature (3055)..(3056): n is a, c, g, or t
  misc_feature (3058)..(3059): n is a, c, g, or t
  misc_feature (3061)..(3061): n is a, c, g, or t
  misc_feature (3064)..(3070): n is a, c, g, or t
  misc_feature (3072)..(3076): n is a, c, g, or t
  misc_feature (3080)..(3086): n is a, c, g, or t
  misc_feature (3088)..(3089): n is a, c, g, or t
  misc_feature (3091)..(3091): n is a, c, g, or t
  misc_feature (3094)..(3096): n is a, c, g, or t
  misc_feature (3098)..(3103): n is a, c, g, or t
  misc_feature (3105)..(3105): n is a, c, g, or t
  misc_feature (3111)..(3119): n is a, c, g, or t
  misc_feature (3121)..(3124): n is a, c, g, or t
  misc_feature (3127)..(3138): n is a, c, g, or t
  misc_feature (3142)..(3143): n is a, c, g, or t
  misc_feature (3147)..(3148): n is a, c, g, or t
  misc_feature (3151)..(3151): n is a, c, g, or t
  misc_feature (3153)..(3157): n is a, c, g, or t
  misc_feature (3159)..(3162): n is a, c, g, or t
  misc_feature (3164)..(3165): n is a, c, g, or t
  misc_feature (3167)..(3167): n is a, c, g, or t
  misc_feature (3169)..(3180): n is a, c, g, or t
  misc_feature (3183)..(3187): n is a, c, g, or t
  misc_feature (3192)..(3194): n is a, c, g, or t
  misc_feature (3196)..(3200): n is a, c, g, or t
  misc_feature (3202)..(3202): n is a, c, g, or t
  misc_feature (3205)..(3208): n is a, c, g, or t
  misc_feature (3210)..(3210): n is a, c, g, or t
  misc_feature (3212)..(3214): n is a, c, g, or t
  misc_feature (3216)..(3217): n is a, c, g, or t
  misc_feature (3219)..(3220): n is a, c, g, or t
  misc_feature (3222)..(3222): n is a, c, g, or t
  misc_feature (3224)..(3224): n is a, c, g, or t
  misc_feature (3228)..(3233): n is a, c, g, or t
  misc_feature (3237)..(3237): n is a, c, g, or t
  misc_feature (3239)..(3241): n is a, c, g, or t
  misc_feature (3243)..(3244): n is a, c, g, or t
  misc_feature (3246)..(3246): n is a, c, g, or t
  misc_feature (3248)..(3248): n is a, c, g, or t
  misc_feature (3251)..(3253): n is a, c, g, or t
  misc_feature (3255)..(3256): n is a, c, g, or t
  misc_feature (3258)..(3258): n is a, c, g, or t
  misc_feature (3260)..(3265): n is a, c, g, or t
  misc_feature (3269)..(3275): n is a, c, g, or t
  misc_feature (3277)..(3279): n is a, c, g, or t
  misc_feature (3282)..(3282): n is a, c, g, or t
  misc_feature (3284)..(3296): n is a, c, g, or t
  misc_feature (3298)..(3304): n is a, c, g, or t
  misc_feature (3306)..(3307): n is a, c, g, or t
  misc_feature (3309)..(3319): n is a, c, g, or t
  misc_feature (3321)..(3323): n is a, c, g, or t
  misc_feature (3325)..(3325): n is a, c, g, or t
  misc_feature (3328)..(3328): n is a, c, g, or t
  misc_feature (3330)..(3332): n is a, c, g, or t
  misc_feature (3334)..(3334): n is a, c, g, or t
  misc_feature (3336)..(3337): n is a, c, g, or t
  misc_feature (3339)..(3351): n is a, c, g, or t
  misc_feature (3354)..(3356): n is a, c, g, or t
  misc_feature (3358)..(3359): n is a, c, g, or t
  misc_feature (3361)..(3361): n is a, c, g, or t
  misc_feature (3364)..(3368): n is a, c, g, or t
  misc_feature (3370)..(3371): n is a, c, g, or t
  misc_feature (3373)..(3378): n is a, c, g, or t
  misc_feature (3380)..(3382): n is a, c, g, or t
  misc_feature (3384)..(3385): n is a, c, g, or t
  misc_feature (3387)..(3389): n is a, c, g, or t
  misc_feature (3391)..(3391): n is a, c, g, or t
  misc_feature (3393)..(3394): n is a, c, g, or t
  misc_feature (3396)..(3404): n is a, c, g, or t
  misc_feature (3406)..(3423): n is a, c, g, or t
  misc_feature (3425)..(3428): n is a, c, g, or t
  misc_feature (3430)..(3432): n is a, c, g, or t
  misc_feature (3434)..(3434): n is a, c, g, or t
  misc_feature (3436)..(3440): n is a, c, g, or t
  misc_feature (3442)..(3442): n is a, c, g, or t
  misc_feature (3444)..(3466): n is a, c, g, or t
  misc_feature (3468)..(3468): n is a, c, g, or t
  misc_feature (3470)..(3471): n is a, c, g, or t
  misc_feature (3474)..(3476): n is a, c, g, or t
  misc_feature (3478)..(3478): n is a, c, g, or t
  misc_feature (3480)..(3481): n is a, c, g, or t
  misc_feature (3483)..(3484): n is a, c, g, or t
  misc_feature (3486)..(3499): n is a, c, g, or t
  misc_feature (3502)..(3502): n is a, c, g, or t
  misc_feature (3504)..(3506): n is a, c, g, or t
  misc_feature (3508)..(3508): n is a, c, g, or t
  misc_feature (3510)..(3518): n is a, c, g, or t
  misc_feature (3521)..(3522): n is a, c, g, or t
  misc_feature (3524)..(3524): n is a, c, g, or t
  misc_feature (3526)..(3529): n is a, c, g, or t
  misc_feature (3531)..(3535): n is a, c, g, or t
  misc_feature (3539)..(3542): n is a, c, g, or t
  misc_feature (3544)..(3555): n is a, c, g, or t
  misc_feature (3559)..(3562): n is a, c, g, or t
  misc_feature (3566)..(3574): n is a, c, g, or t
  misc_feature (3576)..(3576): n is a, c, g, or t
  misc_feature (3578)..(3581): n is a, c, g, or t
  misc_feature (3583)..(3583): n is a, c, g, or t
  misc_feature (3586)..(3593): n is a, c, g, or t
  misc_feature (3596)..(3596): n is a, c, g, or t
  misc_feature (3598)..(3600): n is a, c, g, or t
  misc_feature (3602)..(3609): n is a, c, g, or t
  misc_feature (3611)..(3618): n is a, c, g, or t
  misc_feature (3620)..(3620): n is a, c, g, or t
  misc_feature (3622)..(3623): n is a, c, g, or t
  misc_feature (3625)..(3626): n is a, c, g, or t
  misc_feature (3629)..(3629): n is a, c, g, or t
  misc_feature (3632)..(3632): n is a, c, g, or t
  misc_feature (3634)..(3647): n is a, c, g, or t
  misc_feature (3650)..(3650): n is a, c, g, or t
  misc_feature (3652)..(3654): n is a, c, g, or t
  misc_feature (3656)..(3656): n is a, c, g, or t
  misc_feature (3659)..(3663): n is a, c, g, or t
  misc_feature (3665)..(3667): n is a, c, g, or t
  misc_feature (3669)..(3673): n is a, c, g, or t
  misc_feature (3675)..(3676): n is a, c, g, or t
  misc_feature (3678)..(3678): n is a, c, g, or t
  misc_feature (3680)..(3680): n is a, c, g, or t
  misc_feature (3683)..(3683): n is a, c, g, or t
  misc_feature (3685)..(3689): n is a, c, g, or t
  misc_feature (3691)..(3691): n is a, c, g, or t
  misc_feature (3694)..(3696): n is a, c, g, or t
  misc_feature (3698)..(3700): n is a, c, g, or t
  misc_feature (3702)..(3704): n is a, c, g, or t
  misc_feature (3707)..(3709): n is a, c, g, or t
  misc_feature (3711)..(3715): n is a, c, g, or t
  misc_feature (3717)..(3718): n is a, c, g, or t
  misc_feature (3720)..(3729): n is a, c, g, or t
  misc_feature (3731)..(3741): n is a, c, g, or t
  misc_feature (3744)..(3746): n is a, c, g, or t
  misc_feature (3748)..(3755): n is a, c, g, or t
  misc_feature (3759)..(3763): n is a, c, g, or t
  misc_feature (3768)..(3768): n is a, c, g, or t
  misc_feature (3770)..(3771): n is a, c, g, or t
  misc_feature (3773)..(3786): n is a, c, g, or t
  misc_feature (3789)..(3793): n is a, c, g, or t
  misc_feature (3795)..(3796): n is a, c, g, or t
  misc_feature (3798)..(3800): n is a, c, g, or t
  misc_feature (3803)..(3807): n is a, c, g, or t
  misc_feature (3809)..(3809): n is a, c, g, or t
  misc_feature (3811)..(3811): n is a, c, g, or t
  misc_feature (3813)..(3813): n is a, c, g, or t
  misc_feature (3816)..(3817): n is a, c, g, or t
  misc_feature (3819)..(3821): n is a, c, g, or t
  misc_feature (3824)..(3826): n is a, c, g, or t
  misc_feature (3829)..(3829): n is a, c, g, or t
  misc_feature (3832)..(3833): n is a, c, g, or t
  misc_feature (3835)..(3836): n is a, c, g, or t
  misc_feature (3840)..(3841): n is a, c, g, or t
  misc_feature (3845)..(3846): n is a, c, g, or t
  misc_feature (3849)..(3851): n is a, c, g, or t
  misc_feature (3853)..(3854): n is a, c, g, or t
  misc_feature (3922)..(3922): n is a, c, g, or t
  misc_feature (3984)..(3984): n is a, c, g, or t
gtctgtnatcttcaactgtgcagggtgaacagttctatggcgacatgtggcgcacccttgaaacggagggaagttgggaaggggaggtttgggatacccgtaaaaatggtgatgtgttccccctgttagttaccgtaaagactattcatgatgccaagagtcgaattacccattacgtattttcgttttccgacattactacgactaaaagagatgcggatgcgatccataagctggctttttttgatccattgacacatttacctaatcgtcgcgctcttatngacactgtctctcaagcattgaactcgagccaacggcatatcaaaagtctggctttattgtctatcgacttggacaactttaaaaacatcaatgacactctagggcatcagctgggcgataaaattttgattgaaacggcacagcgattgcgtcgatgcgttcgaagtgatgatgccgttgcccgcattggtggtgatgagtttgtcgtagtgctggagaacttagactcgaatattgaaagtgccaaggttgaagtcgaggtggtgacgacgaagattttggctgttntcaacnagtcttatcgcgtcgatgagcaagatatacacagcggtgccagcattggagtggccctcacagataatggtcagatacttatagaagagttgttcaagcaggccgatatagctctgtatcagagcaaacggtcgggccgtaatcaaatgtgtttctttgacctggccatggaagaaacggtaactctgcaggctcagctagccaacgcactgcacagcgcggttcaattgcagcagtttgagctctattatcaggttcaggtcgatagccagcagaggcctgtgggagctgaagcgttaattcgctgggagcatcctcaacttggaatcgtgtcgcccagtgattttattcctctggccgaggcgtcagacctgattctttccattggccagtgggttttagaaactgcctgtgctcagttaaagcgttggcaaagtcaattgcacaccagcgggcttagcgtcgcggtcaatattagcccacgtcagtttcaccagtgtaattttgttgaaacggttttacaggcgattgcnagctgtaatatttccccgagtttgctaaagctagaacttaccgaaacagtgatcctcgacaataccagtgaaaccatcgagaaaatgcaccaactgcagcgggcaggagtggagtttgcattggacgattttggcactggctactcatcgctatcgtatttgactcaattgccgttatcgcaattgaagatggatcaatcgtttgtacgcaatataggtatcaaggagggtgacgatattatcgtccagacgattatcgctatggccaaaagcttagcgatcaaggtcatcgcggagggcgttgaaactgaggcccagcatgagtttcttgacgcgttgggttgcccgttatttcaaggctatctgtttggtaaaccagtacccattgccgagtttgaaaagttactggcataactatctcggcagggctgtcatgttgctgtctcttctatatttggcccttnactatttaataatatcctcattgagaagggcgctggcatcagcaactccgccagcgttgattacattgctatatcccatggnttcaactaacgtttttgcctggccagagcgattgccgctgcgacagtagagatacagctgctgactcttgttgggtaccagctgctcaatctgtgcggcaaccaactgcagctcaatatgctgtgctgaggcaagatggcctgagttccactcttctgtggttctaacgtcgataatcatgtggctgtctccttggattgcgccggcccaaaagctcagcgcgcaaatagcggttattagtaatggcttcattggcatagaatccnaaatttttggcgctactttacgggtagggccgtggcgctgcaactttgtatcggtgtattntggagncgcttcagctcggtgagtgtaagctatcaggcgaccnttctaagacgtcgataataacatccagagttaagtgtatgaatactatctcagaagaggagctacttgctcttcaagcacatgtcgaagttgagaattgtcagtggcgtaagctcaaaaaacggattcttattcgtaccggtgtgattatcgtcttgcttctgtctagggtaataatgtttaaagtgtatcctcaaacattagtccccattgtttttgaaagcgcaggtttagatgccgaaggactatcgtcactgatttctgcaaggctggtggcaggcatcgtgctcgcgggtgtgtatttttatgcagtgatgactaatagttacctgagatcggtcactgttattgccttaatggtgcctattgccttgatttgggccgacctacaaatgtatttggcatcgtcttttccagactttacgctggtagcgtcgatttctttttgcttgcggttaattaccatctccctccttacgctaaattatatggatgttagacgttaattgtcgatgccattttnnnnnnnnnanngntnannantnangnccnnnnnannnantnnnnntnnnnnnnnttnnnnttncnttnnnnnnnnnnnncnnannnnnnnngnngnnnnnncnnnnnttnanggnnnanttttnnngntnnnnnnntncnnnnnnnannnnntnnnnnngncnnnngnngncnaaannnannnnnnngnaaanngnnnggnngnnannannnnannnnnttnnnnnnnnnnnnannccccnnnaaaaannnannnnnnngnnancnnnncnnnnnnnnnnncccnaaannnnnnnnnnannnggnntngnntnnngnnnncnncnnnnnncnnnnnnnnnnnnnncnnggnngnnnnannngnnnnngnnnnnaannnannnnnnnnnnnnanggnnnnaannnnngnnnnnnnnannnnnannnncntnnccnntnncnntnaantnannnntnnnaannnnnnnnnnnnngnttnngnnntnannnnnnnnannannccnncnntnncnaannnnnnnannnnnaaannnnnnntnncnaannncnnnnnncnaaaaannnnnnnnnannnnggnnnnnnnnnnnncccnnaaannaantnnnnnannnntnntncnnnnnnnnnnnnggnnnnnaaaannncnnnnnanggnnnncnannnanncnncnancccnnnnnnaaantnnncnncnanccnnncnntngnnnnnngggnnnnnnntnnnccnannnnnnnnnnnnngnnnnnnnannannnnnnnnnnnannntnccngnnnangnngnnnnnnnnnnnnnggnnngnncnaannnnnannannnnnncnnnannannncngnnannnnnnnnntnnnnnnnnnnnnnnnnnngnnnncnnngntnnnnncngnnnnnnnnnnnnnnnnnnnnnnnantnnaannncnannannannnnnnnnnnnnnnccngnnntnannnnnnnnnccnntnannnngnnnnncccnnnntnnnnnnnnnnnncccnnnncccnnnnnnnnngncnnnncnaannnnnnnnccnannncnnnnnnnngnnnnnnnncntnncnnaanggncnnnnnnnnnnnnnnccnannntnggnnnnngnnngnnnnnanngntnaangnnnnncnttnnngnnngnnnaannngnnnnnannannnnnnnnnnannnnnnnnnnnccnnncnnnnnnnncccnnnnnaaaantnntnnnnnnnnnnnnnnttnnnnngnntnnnggnnnnntngntnggnntnnnccnnnaanggnntnncttnnaaannggnnnanngttcggcgatgctccagaacaaaatgccaatacctatgccggcaccaaagagcattgagagccatganaaattgctaaattccggcctttcatcgtcgccgcccaagcgaatattaccgaatttgctcantgctagaccgagcaca

SEQ ID NO: 349 - DNA, 4000 bp, Escherichia coli
  misc_feature (1545)..(1545): n is a, c, g, or t
  misc_feature (1979)..(1979): n is a, c, g, or t
  misc_feature (1983)..(1985): n is a, c, g, or t
acatgatgatgttcatgaagacgtcctttgtgatgaaggtgtcgcgcttcgtgatcaagcggcaacccaacaaggtgtcttgcacgatagccatcacgggcttgttggcctggggcgatacgatcattttcggtaccatcatcaactccttcacctccgcgcgtgtctcgtaagactgcggaaggtgcatgttcatttcatccccatcaaaatcagcgttgtatggcggcgtgacagacaagttcaatctgaacgtcgagtaaggcatgattcggacgcgatgacccatgatggacatcttgtgcaaagaaggttgacgattgaacaggacgacgtctccgttcaccatgtgacgttcaactttgtaaccgtactcgagacgcttctcgctcgacttcttcaagaagcgaagatcgagtcgctgaccatcctcacgaatgatgtaacgcgcaccggtctcaccaggaggtggatgcgggccgttctcgaccaatcgttgaaggcgatcgatgttgtacggcgtcacggtttccggatacgtcatgttcaacgcgatggaccacggaactccgagctcgtcgagcatcaagtttggatcgggcgtaatgacggtacgcgcagagaaatccacgcgcttacccatcaagttgcctcgaattctacccgccttgcccttcaaacgctctgaaatggatttaatgcttcggccgctgcgcgtgagcgctcgcggcatgccagccaccgtgttgtccatgaaggtcatgatgtgatactgaagcagctctgtaaattctaaaatgacgtgctgcggcgctccattttgttcttgtctctctaaatttttattcgttctcacgatttccatgagcttgaccgtcaaatcgtcctccgagcgcgtggaagcgtcgaacgacaccgacggacgaaccggcggcggcggcacgggcatcacttgcaagatgaaccaatccggacgcgcgtgctcggggtcgagacccagcgcacggcaatcctcgtcagaaatcgccttcaagatctgtaacgcgcgctccgcggtgacgatcaccttgcgttcgccaccttccggcaacagctcctcgtcgcggtgcttgaactcggcggtgatcttcattccctccaaacgatactgcggttgcgccgtcccggtgtacggacacacgctcttggttttacacgcgtcggtgagtttcttcaatcggtttttcgggttcttgattcgcatcaactgcgcaaactttgggtcctcgtccttgtgcagcaacaattgcgaagacgagtatccgacgcatctcagaattctcaacacgacgttgatgaacccatgatggtacaccggtttcgccaactcaagatgcccaaagtaacccggcgtctgcacgctgtcgcacccgtccgtctcgcacaccgcgccgcgatccatcgtccccatgcgcggatcggacaaaccccctcgcttgggtctacccttctcgtacgtctcgctcgtctcgatcgcgcacacggacattttacgctatcgcgcgnaagtttcacgttcggtcagtgcgcgctcgctcgccttcgtcgcccgcgtcgcgcgttcgccctcgccgcctcgccctctcgaagatctcccgcgccggcgctctttcgcgccttcgcttcgcgcgcgcgcgcgttcgatgcacgtacgatctcatcgggcgacaacaccccaaactgcaccgcgtttacgcggcacagctccgcggtcgagtgcgggaaccgatcgtgaacgctcatttcgtgagaaaatgcgcgcgcaagatttcgtgcttcggcgcgatcgttcgagaagacgacactttccgcgcgcggtgcgcgcgctcggggcgagcgcgcgcgcggagacgcggcgggaggaagtgttgcgtcgctcgatcgccgaagacgcgagttggaaagcgcgaggcgtcgcgctctgacgatctcagcgccgncccnnncttcagggtttagaagaaagaaattacagacgcggcgcgcgagagcgcgagagacgtcggctagagagctaaggctacttgttcgccgcccagtggcggtaccgcggcaccccggccgcgcgcacggtgtccttgaataaatacagcttgggcaacgcctcgtcccacggaccggcgatttgacgcttaccgctcgcggcgagccgaacgagcgacgccggcgcgacgacggcgagaagaaagacgccgacgacgtacgcccacgccaaagtctcgtcgcgcgcccgcgcgacggtgaacgcgatgatgtgtagtgcgaacaccacgacgagatgaagcgtcgtggagaaggcgcgaatggcgcgccagacgtacggcgataacacgtaacactcgagcgcgagcaagacgtcggcgaagacgctcgcgggatcgtccaaacgactcgccatgagcaacgacgcgaacatggacgctccgagcgaaaacgaactcgcgagctgtttcgtctcgagattcacgaacgcgtaatcgtacgtgatggcgtagagcgcgagcgcgagcgtcgcgcacgtcgccgccgtatcgtcgctcaccgccgccgtcatcgtctgacacagcggcgtcagcgccacgagccccccgagcgtgagcgcgcccaatcgaatcgaccgccacgcccttcccgcgcgcccgagcttcaccgatccctccgcgctcgatccgtcgccgcccagcgcccacgccgccagcccgacgcccagcgcccgcgtctcccaccgcaccagcgtccgcgcgcgcaccgcgccgtccgcgatcgcgccgtgcgcgccgctgtgtatcaccaccaccgcgcactgctgcgagatcgtccacgccgcgcgcgcgctcgtcgcgaacgaccgcgtcttgacgcttttgttcaatcgcatgcgcgcgagaaacgtccgcggatcggtgtgattatcgcgcagcgcgcgcgcgtcgcggtcgtagagcacgcgatagtctctcgcgcgcgcgtcgtcgcgcggcatgccgcgcgccgcgcgccgccgactgaagtcacttcgcgacgactcgatgcgagtcaccgacgacgacgacgacgcgcgcgcgcgcggcggcggccgcggccgcggctacggcggcgcgaaatcgagacgcgcgcgcgccgcgcgcgcgtcgcgcgaaccgcgcgcgaaccgcggcgcgttgccgctgaagacgcccgtcgtcgcgtccgaggacaccaatcgacgattgttcgacgacgcgtcgccgagcgacgcgcgcgatctcagcgcgtggttcgcgctcgcggacgacgcgatcgcggacgacgcgatcgacgacgcgtactggcgcgacgaggcgatgcggcgcgacgcgacggaggcgtgggggcgggcgaacgcgctcgattggtccgagacgaccgaggcggcgcgagcgcgcggatacggcggcgaccgggatcgatcgttcacgcgcggcgcggcgcgcgtgaatcacgacgtcgtgacgtacgagagaaagaaaaggactcgatgcgaggggttcgacgcgcagatgtggcgaggggtggcgagcgaggggaagcacatgtcggcgtgggagcgcgagacggcgcggagcgagcgacggcgaccggcgcgcgagacgggcgggattgaaaatttagggaattcgtgctacatcgccgcgtctttgcagttgttgcgaagcatgcgtggattcgtggagtcggttcacgaggtgtctggagacgaggacggtaaaccgttactcgccgcgctcggcgagtttttcagatcagacgcgagcgagttgagcgcgtcgggcgtgaagcgcgaaatgggtcgcgtgcgggacgagtacggagagttcgatcaacacgacgcaatggaattcatgacgcaaatgttggacacgatcgagcgcgaaatgggtgacgacgcggcgcactgtccgagtcgacaaaacttcgcgtggcgcatcgagcacgcgctatc

SEQ ID NO: 350 - DNA, 4000 bp, Escherichia coli
  misc_feature (699)..(699): n is a, c, g, or t
cgcttgcgctgcagggtttagcgttcagcggaatggtttgcgcgcaatcgtccgccgagcagcaggcgcagcaaccgattccagcatcacgcaattttattgggcttggcattggcgccttccccaaaacaccgggcagcagcgatctacgcgtaatggcattgccggtgctgcagtacaccttcggtgatgtcggctacatcacggggctaaaggccggcgtgtggggttttacttcggaagatcagtcgattcgaatcggcctgtacgccgagccacgctttggttatgacagtgccgacaacccgctcaccgtaggcatggcgaatcgcagctttgccgtcgacttgggccccagcgtgcgttggaccacgccggtgggtgtgctgaactttgattatggctttgacgtcagcagccgcagcgacggtcaggtcgcgcaattgcaatttattcgaccacttgtcagcgagattggatttcgcctgaatggcgtcgttggcgcaacatggcaaaacgcggcgatgaataattattactggggcgtgcgggcttctgaggcgaccgcgactcgtgccgcctacaccgccggcgccggtgtgggtctgtcggttggcctatccgggctgtacgctttcggcccaaccagcgccctgttttatggtgccaccattaaccggctgtcgagcgctcagtccnacagcccgatcgccgagcgcgggtttgcgccgctgatttacctcggctacggctggcgcatgtagtctcgacaagctacgtctcgtagctgggcgattcctgccccgagcgtaaccagtccggcgagacattacagatacgcgccaccacttccatgttgccgttggccggcagcgcttcccctgacagccacttgctcacggttgaaaccgccaccgaagaacctgcctgcatcgcgcaaaaagctcgcagcaactgcgtcgggcggttggggtctatgccggcgttcgcaaggctgctgcgcagccgtctgctgaacgcttctctctccttgaaattcaggtgggctgccatagcaacgggtggtgtgcgtaggtgagagttaaatcctgaacattgtcatcaatcgtgtcggctaattgcgcgtgatttcattcaatcgctacacgcaagctgggcaaatcaataccactcaccaccgccacccactcctggccactgcacatcggcgcggctggaagccagccaccgatcgccaagcactgaccagcaacgaacgggctctcgctggtaagttcgatgtgccgctgatgcagcgcgtaggcgtgctgcagcgatttatccaaccgatcacgccccataccaaagccaacaatctgcgcgccctgacgctcgaccacattcaaggtcatggttgcgttcgacacgagttgatcaaacacggtacgacttttttgcgagagggtctttgcctcgcccatcaccaggtgcgaatgaaaaccgttggcgcagactttgtcggcgtcgacccagcgctcagatttgaacgggttctgcagaatttcgagtgccagcgctaccgagtcgaagcgctgcaagaaggtctgcaacccctcaccgggctcaggcgttgagcccaaaccgaacaccagggtgggttccaccatcagtggcttggtaccgcgcagcttgatcgcggtggcattgtcctcggcgtgcaacaccgagtgctggtacagatagcccaagcgcggtaactgaaccgcctcactggtagcgattgactcgcccaaaatcattttgcggccgaccagctgccagccttcggcaacacccagggtgtgcaacgtgtcgagcactcgcacgctctcttcgcggtccaaaccgagttgctcggcctgtggctccagtagcgcgcgtttgccttgattcgcctgaattgcgtgcgcgtaagacagaagtcgggaggtatgcagcatttgcggcccctctaaatgtgtagaattggaacatgttgtaccgactttacttctacacttctaataaaatttctctatcaaccccattaaatctatagttgtgtaggtttatgtgctaaaaatcttgtatttacaaggccagctggttaagattgtgcaggttatgcattgaagaaattttcagagctttctgcttagtttttaagaaagaaacgcatggacactgcgactgctgtcaagctgctatcgatcggcgcgatttcgcgcgaaactggcattcatgtctctaccatccgcatgtgggaggcgcgctatggcgtgctgcaacccgtgcggaccgacggcggtgcgcgccggtacagcagcacagacctcgagcggctaagactgatcaagttgttggtagatcgtggtcacaagccgagcgcgctggccaagctgacgcttgatcagttgagctcggaattcatagggccacctgcccgcgctggtgcgaacgcgccggtagcgccgagaatcgcctccatgggcagcgcgacatggcgctcgttactgttcgctgatccggccatgaagccttggacccccgccgcgcattttgacgagttggcagatgttgaaagccggcttgaaacgtttgatgtcggcatcgtgctcacgcccgcgttgcagatgaacctggctaaatatctggccgctgcgctctccgtgtacaagaccaagacgctggtggtgatctatgaattcagtagcagcagcgtgattcgttttctgagtgcgcttggtatcgagtgcatcaaataccccgcagcgccgatggatctggcgcgtagcctggcatcgattgtcgagtcgcggcaggcagatgcacactcgccggcgcagccgcgatttggcatggagcggcttcacacaatcgcggcgaccgactctcacttgctgtgtgagtgtcccaaacatcttgccagcctgatcatcagcctgcacagctttatccaatacagtaaccagtgtgtgaacgactcgcccaaggatgccttgatccatgaaaaactacgggatattgcaagcctcggtatcgtgcaactggagtccgggcttgatcttgtgttggaagccgaaaaaataaatcaagtccacgccgcatgaaaccgatcgcgatttttcgtcattctgcggctgatggtccagcctacctcgcgacgtttttacagcagcagcagattccctaccaagaagtgcgaatcgatcgtggcgaccctgtcccgaagcaggccgatgcgtatgccggtatcgcgctcatgggcggaccgatgagtgttaacgatccgctgccttgggtagccgactcgttggcactgatccgcgatgcggtcgagcgcgatgtgccgttgatcgggcattgcctcggcggtcaattgatcagtaaagcgctcggcggcgctgtcacgcgtaacccgaatggtaaagaaattggttggcaccagctgcatgtgacggatgctgccttgggtcggcattggctgggtaccgatgatggcttggttgggtttcactggcacggcgaaacgttcacactacccactggtgcgagttggctggcgcgcagcgaggcctgtaccaatcaggcgtatgtgcttggcccgcacattggtatgcagtttcacatcgagatggatgcgccaaccatcgccagctggtgcgatgagggcgcgccggaagtcgatgccgcccgcagtaaacccgacgtgcatccgcacgtgatgaccacgcagcagattgcagagcgcacgccacagcaccttcccgcgatgcgcgcggtcgccgaacatttgtatcagcgctgggtcggtaatctacgcggatagcccaatgcgggcacgccgcatgactacccggctcgaccacctgcattaactgcctgcttcaaccgcctacactaactgcctggttcaactgcctgcttctgcttgctgtgcctcttgctcgcgccggtagcgcaacgatgacatcaccgatgctgcaataaacgcgataccaat

SEQ ID NO: 351 - DNA, 4000 bp, Escherichia coli
  misc_feature (1326)..(1326): n is a, c, g, or t
  misc_feature (2008)..(2008): n is a, c, g, or t
  misc_feature (2336)..(2336): n is a, c, g, or t
  misc_feature (2615)..(2615): n is a, c, g, or t
  misc_feature (2989)..(2989): n is a, c, g, or t
  misc_feature (3007)..(3007): n is a, c, g, or t
  misc_feature (3024)..(3028): n is a, c, g, or t
  misc_feature (3032)..(3036): n is a, c, g, or t
  misc_feature (3041)..(3047): n is a, c, g, or t
  misc_feature (3051)..(3053): n is a, c, g, or t
  misc_feature (3062)..(3062): n is a, c, g, or t
  misc_feature (3066)..(3069): n is a, c, g, or t
  misc_feature (3073)..(3076): n is a, c, g, or t
  misc_feature (3079)..(3081): n is a, c, g, or t
  misc_feature (3086)..(3087): n is a, c, g, or t
  misc_feature (3090)..(3090): n is a, c, g, or t
  misc_feature (3097)..(3099): n is a, c, g, or t
  misc_feature (3106)..(3107): n is a, c, g, or t
  misc_feature (3110)..(3113): n is a, c, g, or t
  misc_feature (3124)..(3124): n is a, c, g, or t
  misc_feature (3130)..(3131): n is a, c, g, or t
  misc_feature (3134)..(3135): n is a, c, g, or t
  misc_feature (3138)..(3138): n is a, c, g, or t
  misc_feature (3141)..(3141): n is a, c, g, or t
  misc_feature (3144)..(3149): n is a, c, g, or t
  misc_feature (3156)..(3156): n is a, c, g, or t
  misc_feature (3159)..(3159): n is a, c, g, or t
  misc_feature (3162)..(3162): n is a, c, g, or t
  misc_feature (3166)..(3166): n is a, c, g, or t
  misc_feature (3169)..(3172): n is a, c, g, or t
  misc_feature (3175)..(3175): n is a, c, g, or t
  misc_feature (3178)..(3178): n is a, c, g, or t
  misc_feature (3181)..(3181): n is a, c, g, or t
  misc_feature (3190)..(3192): n is a, c, g, or t
  misc_feature (3196)..(3199): n is a, c, g, or t
  misc_feature (3202)..(3202): n is a, c, g, or t
  misc_feature (3207)..(3209): n is a, c, g, or t
  misc_feature (3212)..(3213): n is a, c, g, or t
  misc_feature (3218)..(3221): n is a, c, g, or t
  misc_feature (3226)..(3226): n is a, c, g, or t
  misc_feature (3229)..(3230): n is a, c, g, or t
  misc_feature (3238)..(3248): n is a, c, g, or t
  misc_feature (3253)..(3254): n is a, c, g, or t
  misc_feature (3259)..(3260): n is a, c, g, or t
  misc_feature (3263)..(3264): n is a, c, g, or t
  misc_feature (3267)..(3269): n is a, c, g, or t
  misc_feature (3273)..(3277): n is a, c, g, or t
  misc_feature (3280)..(3281): n is a, c, g, or t
  misc_feature (3285)..(3286): n is a, c, g, or t
  misc_feature (3290)..(3294): n is a, c, g, or t
  misc_feature (3298)..(3298): n is a, c, g, or t
  misc_feature (3305)..(3310): n is a, c, g, or t
  misc_feature (3314)..(3314): n is a, c, g, or t
  misc_feature (3320)..(3321): n is a, c, g, or t
  misc_feature (3324)..(3324): n is a, c, g, or t
  misc_feature (3327)..(3329): n is a, c, g, or t
  misc_feature (3337)..(3339): n is a, c, g, or t
  misc_feature (3341)..(3342): n is a, c, g, or t
  misc_feature (3344)..(3345): n is a, c, g, or t
  misc_feature (3347)..(3347): n is a, c, g, or t
  misc_feature (3349)..(3351): n is a, c, g, or t
  misc_feature (3354)..(3357): n is a, c, g, or t
  misc_feature (3359)..(3360): n is a, c, g, or t
  misc_feature (3363)..(3363): n is a, c, g, or t
  misc_feature (3365)..(3373): n is a, c, g, or t
  misc_feature (3375)..(3378): n is a, c, g, or t
  misc_feature (3380)..(3381): n is a, c, g, or t
  misc_feature (3384)..(3384): n is a, c, g, or t
  misc_feature (3386)..(3387): n is a, c, g, or t
  misc_feature (3391)..(3401): n is a, c, g, or t
  misc_feature (3403)..(3405): n is a, c, g, or t
  misc_feature (3407)..(3408): n is a, c, g, or t
  misc_feature (3410)..(3411): n is a, c, g, or t
  misc_feature (3413)..(3418): n is a, c, g, or t
  misc_feature (3421)..(3422): n is a, c, g, or t
  misc_feature (3424)..(3426): n is a, c, g, or t
  misc_feature (3429)..(3430): n is a, c, g, or t
  misc_feature (3432)..(3432): n is a, c, g, or t
  misc_feature (3434)..(3434): n is a, c, g, or t
  misc_feature (3437)..(3438): n is a, c, g, or t
  misc_feature (3440)..(3443): n is a, c, g, or t
  misc_feature (3445)..(3456): n is a, c, g, or t
  misc_feature (3458)..(3463): n is a, c, g, or t
  misc_feature (3465)..(3468): n is a, c, g, or t
  misc_feature (3470)..(3472): n is a, c, g, or t
  misc_feature (3474)..(3478): n is a, c, g, or t
  misc_feature (3480)..(3481): n is a, c, g, or t
  misc_feature (3483)..(3488): n is a, c, g, or t
  misc_feature (3491)..(3491): n is a, c, g, or t
  misc_feature (3493)..(3495): n is a, c, g, or t
  misc_feature (3497)..(3500): n is a, c, g, or t
  misc_feature (3504)..(3504): n is a, c, g, or t
  misc_feature (3506)..(3511): n is a, c, g, or t
  misc_feature (3513)..(3518): n is a, c, g, or t
  misc_feature (3520)..(3522): n is a, c, g, or t
  misc_feature (3525)..(3529): n is a, c, g, or t
  misc_feature (3531)..(3531): n is a, c, g, or t
  misc_feature (3533)..(3538): n is a, c, g, or t
  misc_feature (3540)..(3540): n is a, c, g, or t
  misc_feature (3542)..(3542): n is a, c, g, or t
  misc_feature (3544)..(3544): n is a, c, g, or t
  misc_feature (3550)..(3553): n is a, c, g, or t
  misc_feature (3556)..(3556): n is a, c, g, or t
  misc_feature (3558)..(3558): n is a, c, g, or t
  misc_feature (3560)..(3560): n is a, c, g, or t
  misc_feature (3562)..(3563): n is a, c, g, or t
  misc_feature (3565)..(3565): n is a, c, g, or t
  misc_feature (3567)..(3574): n is a, c, g, or t
  misc_feature (3577)..(3577): n is a, c, g, or t
  misc_feature (3579)..(3581): n is a, c, g, or t
  misc_feature (3583)..(3583): n is a, c, g, or t
  misc_feature (3586)..(3586): n is a, c, g, or t
  misc_feature (3588)..(3590): n is a, c, g, or t
  misc_feature (3594)..(3598): n is a, c, g, or t
  misc_feature (3600)..(3602): n is a, c, g, or t
  misc_feature (3604)..(3604): n is a, c, g, or t
  misc_feature (3607)..(3608): n is a, c, g, or t
  misc_feature (3611)..(3615): n is a, c, g, or t
  misc_feature (3617)..(3622): n is a, c, g, or t
  misc_feature (3624)..(3624): n is a, c, g, or t
  misc_feature (3628)..(3631): n is a, c, g, or t
  misc_feature (3633)..(3633): n is a, c, g, or t
  misc_feature (3635)..(3635): n is a, c, g, or t
  misc_feature (3637)..(3643): n is a, c, g, or t
  misc_feature (3645)..(3656): n is a, c, g, or t
  misc_feature (3658)..(3658): n is a, c, g, or t
  misc_feature (3663)..(3666): n is a, c, g, or t
  misc_feature (3668)..(3669): n is a, c, g, or t
  misc_feature (3673)..(3674): n is a, c, g, or t
  misc_feature (3676)..(3686): n is a, c, g, or t
  misc_feature (3690)..(3693): n is a, c, g, or t
  misc_feature (3695)..(3699): n is a, c, g, or t
  misc_feature (3701)..(3703): n is a, c, g, or t
  misc_feature (3705)..(3705): n is a, c, g, or t
  misc_feature (3707)..(3710): n is a, c, g, or t
  misc_feature (3712)..(3712): n is a, c, g, or t
  misc_feature (3714)..(3714): n is a, c, g, or t
  misc_feature (3717)..(3723): n is a, c, g, or t
  misc_feature (3725)..(3726): n is a, c, g, or t
  misc_feature (3728)..(3731): n is a, c, g, or t
  misc_feature (3733)..(3740): n is a, c, g, or t
  misc_feature (3743)..(3744): n is a, c, g, or t
  misc_feature (3746)..(3750): n is a, c, g, or t
  misc_feature (3752)..(3752): n is a, c, g, or t
  misc_feature (3756)..(3759): n is a, c, g, or t
  misc_feature (3761)..(3764): n is a, c, g, or t
  misc_feature (3766)..(3766): n is a, c, g, or t
  misc_feature (3768)..(3769): n is a, c, g, or t
  misc_feature (3771)..(3773): n is a, c, g, or t
  misc_feature (3775)..(3775): n is a, c, g, or t
  misc_feature (3779)..(3786): n is a, c, g, or t
  misc_feature (3788)..(3791): n is a, c, g, or t
  misc_feature (3793)..(3793): n is a, c, g, or t
  misc_feature (3795)..(3796): n is a, c, g, or t
  misc_feature (3798)..(3798): n is a, c, g, or t
  misc_feature (3800)..(3807): n is a, c, g, or t
  misc_feature (3809)..(3812): n is a, c, g, or t
  misc_feature (3815)..(3818): n is a, c, g, or t
  misc_feature (3820)..(3823): n is a, c, g, or t
  misc_feature (3825)..(3828): n is a, c, g, or t
  misc_feature (3831)..(3832): n is a, c, g, or t
  misc_feature (3834)..(3834): n is a, c, g, or t
  misc_feature (3836)..(3836): n is a, c, g, or t
  misc_feature (3839)..(3843): n is a, c, g, or t
  misc_feature (3845)..(3847): n is a, c, g, or t
  misc_feature (3849)..(3851): n is a, c, g, or t
  misc_feature (3853)..(3863): n is a, c, g, or t
  misc_feature (3865)..(3867): n is a, c, g, or t
  misc_feature (3869)..(3873): n is a, c, g, or t
  misc_feature (3875)..(3886): n is a, c, g, or t
  misc_feature (3889)..(3889): n is a, c, g, or t
  misc_feature (3891)..(3896): n is a, c, g, or t
  misc_feature (3899)..(3902): n is a, c, g, or t
  misc_feature (3904)..(3904): n is a, c, g, or t
  misc_feature (3906)..(3910): n is a, c, g, or t
  misc_feature (3913)..(3915): n is a, c, g, or t
  misc_feature (3917)..(3919): n is a, c, g, or t
  misc_feature (3921)..(3923): n is a, c, g, or t
  misc_feature (3925)..(3937): n is a, c, g, or t
  misc_feature (3939)..(3943): n is a, c, g, or t
  misc_feature (3945)..(3950): n is a, c, g, or t
  misc_feature (3952)..(3952): n is a, c, g, or t
  misc_feature (3954)..(3955): n is a, c, g, or t
  misc_feature (3957)..(3961): n is a, c, g, or t
  misc_feature (3963)..(3965): n is a, c, g, or t
  misc_feature (3967)..(3968): n is a, c, g, or t
  misc_feature (3970)..(3973): n is a, c, g, or t
  misc_feature (3975)..(3977): n is a, c, g, or t
  misc_feature (3979)..(3981): n is a, c, g, or t
  misc_feature (3983)..(3987): n is a, c, g, or t
  misc_feature (3989)..(3989): n is a, c, g, or t
  misc_feature (3991)..(3992): n is a, c, g, or t
  misc_feature (3994)..(3996): n is a, c, g, or t
  misc_feature (4000)..(4000): n is a, c, g, or t
tatgaactgtttgtaatcattactccggctccttttggagtaagcagttctgcgagcagggcaccctcaaccctgccgtccagcaaatgacaccgttcaacaccatgaacacaggcttcagtcagtacattcaattgcaggcgctgtgatgaaggtaaatccggattttttttcaaccattgctgaacactttctgttgtcatttccagagaatctgagccatcaatttgcggcaatgttaatgtatccagtacaataaatttttttgcacgtaagcgcgttgccacttcaaaggcaacctgatttggatcaagaatccacaatcgtcccttttctcccagtgcaaaaggtggtagtataacaagctttgagtttgaaatttcctgacggagtgtttccaggtcaagtccgcaaacgtttccagtgaagtgtgtaccgaaatttccggaaaaagattttttctctgcaaacatgaaatgaccggttaaggtttgaagctgccgactacaactcctgaaccgagtcagtaactgccagtttgcagaagaaattgcctgttcaatcagcggtaaatgtgtttcttccgcaacaagaataccgtcttcagtttggcaaacaagaccaccatcagttagaaacttgcggatctgtgtttctgcgccatggatcaaaacgattctgataccaacttgttgcaagagcgctaaatcttcaattactctgaaattgtgaccattaagcaaatctccgcttagttgaaccacgaaagtttgctgatggaactcttccagatagggcagggaagcccgcaaattatgaataaaaccggacaactccggatcaagagaatgctgtggcatgggttatattaaaaaaaaagttgaactggaatcttcaccgcaaagtaaacaaaaagcggaagttctttcaatcgtgattcctgctttcaacagcgcaaaactgctgtcaatctgtcttgaagcccttgaaaaacaaactgcgcaaaaatcctgttttgaagttacagttgcagacgatggttccacagatgaaactttgcaaatgctgcagcagtttaaagcacgctctgagttacagcttcaatggactacaattccgaattccggtccaggcaatgcccgtaatgccggagttgctttatcttccggaacatggatcgggtttatggacgcggatgttattccacatccggactgggtaaaaaatgcacttacgctaattcagcaaaaaccggaagccggagcatttgagggccgtacagaagtcactcaacgcagccgggctacgccattcacgcatcaaacngaaaacattgacggcggacgctacccaacatgtaattttctggtccgccgaaacttagcacattttcatccggcttatcttattcctttccgggaggacacagatttagcgttcagcattttagctgcaggatttccgattatatttgctcccgaactgattgtggaacatccacctctaccttcaagctatttacggccgctggttttagcacgaagatattattatgacggtttattgtctcggagatttccccgccgttaccgtaatgatttggacgcacatcagataattggtctcaaaattccgcatttgaagaagaaattatactctttatttgtgctttctcaaattgtttttcttggatcacagcttttcggtttatccggaaagagtttgtttctggcaggaagtgcctaccttttgtgcctgctaatgactgccggagcaagtctgcgctttgcaaatttgcgggatctttcgctcaaagactggcttgtctttatttgccagcagcacgtgctgccgtgggtgatgggttattcactgtttcggggctggttggattttcgcggagaacctgagtattcggccagttaattgtgacggcaggactatacgataatttgactatttactcaaagcaattcagaatggaaaatcaccctttgaagagttgtgncagacgtcaactcctggtcttattttaatttgtcgttgaatgcagatacccggaattattcagtttggattcaaagacaaactgactcaggtcagtaaaacaaaagatttaaatcagaaaataagtgtaattcaagatgtttgttacctataaactttcagaaaaatcatttaaaaacctccggaaaaaaggagtcagtgatgttgctctaaacgaccttactgagctggagaacagggtatttccaaactcgtatatttttttgagccgtgtccggaagctccctcaggcagaagaaatcatgaaaaatgaggcggatcttttgaangcagcaaaggggtttttgcgcctggaccttctgattccgaaccgcacaatcagggaatggaccgaggctctgatttttgcggttgtagtggcaaccattgtccggacctatttgtttgcaccttatcaaattccatccggatcgatgctgccgactattcagattggagaccacatatttgccagtatgtattcctatggctcaccgattcccttcacagatatcaaactttttaaaaaacctgtactgcggggagatattataatttttccatttccnagtgacccttcggttgactacataaaacgcgcagttgggctgcctggtgagacactggaaattcggaaagaccaggttttcataaatggagaacaacttgatgagccttacgcatattatgaaccaaatgaacggagaacccgactggcgcagggtttaatgtcctcaactccggtcagccgctttggtccgattaagattccggaaggtaaaatatttgcgatgggagataaccgatacaacagtgcagatagtcgttactggggttttgttgatctgaaaacagttgccggaaaaggacagattatctactggtcgcacgatcctgatgaaaatatttttggcggatatagatttggccgtttacttgattncctgaaataataagtcancaagagcagtttttttnnnnnaaannnnnaaaannnnnnnaaannnaattccccnaaannnncccnnnnggnnnggaannggnaaaaaannnaaaaaannccnnnnggaaaaagggnaaaaannggnnccnttnccnnnnnnaaaaccnaanccnaaanggnnnnaanttnttnttaaaaccnnnaaannnnttnaaggnnnccnnaaaannnnccaanttnnaaaaattnnnnnnnnnnnggttnnggaannaannggnnngggnnnnnccnnaaannaaannnnngggngggtttnnnnnnaaantttggnnaanggnnnaattccgnnncnntnnantnnnggnnnngnnaangnnnnnnnnngnnnncnnttncnnaaannnnnnnnnnntnnncnnannannnnnnttnncnnnggnntncnaannannnngnnnnnnnnnnnngnnnnnntnnnnannntnnnnntnncnnnnnnttngnnngnnnntttngnnnnnncnnnnnnannnttnnnnntngnnnnnntncngnaaaaannnnggnantngnngnannnnnnnnggnannncntgnannngggnnnnnannngnttnnccnnnnnannnnnntngggnnnntngncnnnnnnntnnnnnnnnnnnngnaaaannnngnntttnngnnnnnnnnnnntttnnnngnnnnngnnntngnnnngnanttnnnnnnncnncnnnngnnnnnnnnttnngnnnnncngggnnnngnnnnancnntnnngnaaannnnnnnntnnnnantnnancnnnnnnnnannnnggnnnntnnnnannnnaanntntnggnnnnngnnngnnngnnnnnnnnnnngnnngnnnnntnnnnnnnnnnnnggnannnnnnttnnnngntnnnnnaannngnnntnnngnnnnnnnnnnnnnannnnntnnnnnntnannannnnntnnntnntnnnnannnannntnnnnnantnncnnnaaan

SEQ ID NO: 352 - DNA, 4000 bp, Escherichia coli
  misc_feature (958)..(958): n is a, c, g, or t
  misc_feature (1786)..(1786): n is a, c, g, or t
  misc_feature (3466)..(3466): n is a, c, g, or t
  misc_feature (3472)..(3473): n is a, c, g, or t
  misc_feature (3476)..(3477): n is a, c, g, or t
  misc_feature (3480)..(3482): n is a, c, g, or t
  misc_feature (3487)..(3487): n is a, c, g, or t
  misc_feature (3489)..(3489): n is a, c, g, or t
  misc_feature (3491)..(3493): n is a, c, g, or t
  misc_feature (3498)..(3498): n is a, c, g, or t
  misc_feature (3503)..(3503): n is a, c, g, or t
  misc_feature (3505)..(3505): n is a, c, g, or t
  misc_feature (3507)..(3507): n is a, c, g, or t
  misc_feature (3510)..(3511): n is a, c, g, or t
  misc_feature (3513)..(3515): n is a, c, g, or t
  misc_feature (3517)..(3517): n is a, c, g, or t
  misc_feature (3519)..(3521): n is a, c, g, or t
  misc_feature (3525)..(3526): n is a, c, g, or t
  misc_feature (3530)..(3533): n is a, c, g, or t
  misc_feature (3535)..(3535): n is a, c, g, or t
  misc_feature (3537)..(3537): n is a, c, g, or t
  misc_feature (3539)..(3539): n is a, c, g, or t
  misc_feature (3546)..(3547): n is a, c, g, or t
  misc_feature (3549)..(3549): n is a, c, g, or t
  misc_feature (3552)..(3553): n is a, c, g, or t
  misc_feature (3556)..(3557): n is a, c, g, or t
  misc_feature (3560)..(3560): n is a, c, g, or t
  misc_feature (3564)..(3567): n is a, c, g, or t
  misc_feature (3573)..(3573): n is a, c, g, or t
  misc_feature (3575)..(3575): n is a, c, g, or t
  misc_feature (3580)..(3580): n is a, c, g, or t
  misc_feature (3583)..(3583): n is a, c, g, or t
  misc_feature (3585)..(3585): n is a, c, g, or t
  misc_feature (3588)..(3588): n is a, c, g, or t
  misc_feature (3592)..(3593): n is a, c, g, or t
  misc_feature (3595)..(3596): n is a, c, g, or t
  misc_feature (3598)..(3599): n is a, c, g, or t
  misc_feature (3601)..(3601): n is a, c, g, or t
  misc_feature (3604)..(3604): n is a, c, g, or t
  misc_feature (3607)..(3607): n is a, c, g, or t
  misc_feature (3609)..(3609): n is a, c, g, or t
  misc_feature (3612)..(3613): n is a, c, g, or t
  misc_feature (3622)..(3627): n is a, c, g, or t
  misc_feature (3631)..(3631): n is a, c, g, or t
  misc_feature (3635)..(3636): n is a, c, g, or t
  misc_feature (3638)..(3638): n is a, c, g, or t
  misc_feature (3643)..(3644): n is a, c, g, or t
  misc_feature (3646)..(3646): n is a, c, g, or t
  misc_feature (3649)..(3650): n is a, c, g, or t
  misc_feature (3653)..(3654): n is a, c, g, or t
  misc_feature (3657)..(3659): n is a, c, g, or t
  misc_feature (3661)..(3661): n is a, c, g, or t
  misc_feature (3663)..(3663): n is a, c, g, or t
  misc_feature (3665)..(3666): n is a, c, g, or t
  misc_feature (3672)..(3690): n is a, c, g, or t
  misc_feature (3693)..(3696): n is a, c, g, or t
  misc_feature (3698)..(3699): n is a, c, g, or t
  misc_feature (3701)..(3702): n is a, c, g, or t
  misc_feature (3705)..(3705): n is a, c, g, or t
  misc_feature (3708)..(3708): n is a, c, g, or t
  misc_feature (3713)..(3713): n is a, c, g, or t
  misc_feature (3716)..(3716): n is a, c, g, or t
  misc_feature (3718)..(3719): n is a, c, g, or t
  misc_feature (3727)..(3729): n is a, c, g, or t
  misc_feature (3732)..(3732): n is a, c, g, or t
  misc_feature (3734)..(3735): n is a, c, g, or t
  misc_feature (3744)..(3750): n is a, c, g, or t
  misc_feature (3753)..(3753): n is a, c, g, or t
  misc_feature (3756)..(3756): n is a, c, g, or t
  misc_feature (3762)..(3762): n is a, c, g, or t
  misc_feature (3764)..(3764): n is a, c, g, or t
  misc_feature (3769)..(3772): n is a, c, g, or t
  misc_feature (3774)..(3774): n is a, c, g, or t
  misc_feature (3781)..(3781): n is a, c, g, or t
  misc_feature (3783)..(3785): n is a, c, g, or t
  misc_feature (3791)..(3792): n is a, c, g, or t
  misc_feature (3794)..(3794): n is a, c, g, or t
  misc_feature (3798)..(3800): n is a, c, g, or t
  misc_feature (3805)..(3805): n is a, c, g, or t
  misc_feature (3807)..(3807): n is a, c, g, or t
  misc_feature (3810)..(3810): n is a, c, g, or t
  misc_feature (3813)..(3813): n is a, c, g, or t
  misc_feature (3815)..(3815): n is a, c, g, or t
  misc_feature (3818)..(3820): n is a, c, g, or t
  misc_feature (3822)..(3822): n is a, c, g, or t
  misc_feature (3824)..(3825): n is a, c, g, or t
  misc_feature (3828)..(3828): n is a, c, g, or t
  misc_feature (3830)..(3832): n is a, c, g, or t
  misc_feature (3835)..(3835): n is a, c, g, or t
  misc_feature (3837)..(3839): n is a, c, g, or t
  misc_feature (3841)..(3842): n is a, c, g, or t
  misc_feature (3845)..(3846): n is a, c, g, or t
  misc_feature (3850)..(3850): n is a, c, g, or t
  misc_feature (3852)..(3852): n is a, c, g, or t
  misc_feature (3855)..(3855): n is a, c, g, or t
  misc_feature (3858)..(3859): n is a, c, g, or t
  misc_feature (3862)..(3863): n is a, c, g, or t
  misc_feature (3865)..(3872): n is a, c, g, or t
  misc_feature (3877)..(3878): n is a, c, g, or t
  misc_feature (3880)..(3880): n is a, c, g, or t
  misc_feature (3883)..(3883): n is a, c, g, or t
  misc_feature (3885)..(3885): n is a, c, g, or t
  misc_feature (3887)..(3888): n is a, c, g, or t
  misc_feature (3890)..(3894): n is a, c, g, or t
  misc_feature (3896)..(3898): n is a, c, g, or t
  misc_feature (3900)..(3900): n is a, c, g, or t
  misc_feature (3902)..(3903): n is a, c, g, or t
  misc_feature (3908)..(3909): n is a, c, g, or t
  misc_feature (3911)..(3912): n is a, c, g, or t
  misc_feature (3914)..(3914): n is a, c, g, or t
  misc_feature (3921)..(3921): n is a, c, g, or t
  misc_feature (3923)..(3924): n is a, c, g, or t
  misc_feature (3926)..(3926): n is a, c, g, or t
  misc_feature (3929)..(3930): n is a, c, g, or t
  misc_feature (3932)..(3933): n is a, c, g, or t
  misc_feature (3935)..(3935): n is a, c, g, or t
  misc_feature (3937)..(3938): n is a, c, g, or t
  misc_feature (3941)..(3942): n is a, c, g, or t
  misc_feature (3945)..(3945): n is a, c, g, or t
  misc_feature (3947)..(3947): n is a, c, g, or t
  misc_feature (3949)..(3949): n is a, c, g, or t
  misc_feature (3951)..(3951): n is a, c, g, or t
  misc_feature (3953)..(3957): n is a, c, g, or t
  misc_feature (3960)..(3960): n is a, c, g, or t
  misc_feature (3962)..(3964): n is a, c, g, or t
  misc_feature (3967)..(3968): n is a, c, g, or t
  misc_feature (3970)..(3973): n is a, c, g, or t
  misc_feature (3975)..(3975): n is a, c, g, or t
  misc_feature (3978)..(3979): n is a, c, g, or t
  misc_feature (3984)..(3988): n is a, c, g, or t
  misc_feature (3990)..(3993): n is a, c, g, or t
  misc_feature (3996)..(3998): n is a, c, g, or t
tgggggcggtctcccgcttcaaatgcggcctccagcacggcaaagtcagcgccgcgccggatcagctcggcgtcctttgccccacggaagcttttgcccccggtcagcagccagacggcttccaacaggttggttttgccctgcccgtttgccccgcacagaaccgtcaactgcggggcgggttccaaaacagcggcggataaattgcgataatccgtcaccgcaaggcggttcagccgcatcagcagccctccgcgatctgaacctggcggccttccagctccaccacatcgcccggcacgcattttttaccgcgcatggtgcagggttccccgttcagcttcacttctccgccctggatcagctccttggcttcgccgcccgtttcacacaggccggcaaatttcagcagagcatccaatttgataaattccgtgtggattcgtactttttccatcgtatcagccttcattcttaaagcgtaccggcagcaccaggtaaataaagtcttcgccctccaccggcaggacctttaccgggctcaaggggccgttgatctccaggcgcagcttttcgcacttggaatagcgcagcgcatccagcaggtagcggttgttgaacccgatttccatggaatcgccttccatgctttccggcgtaaactcatccaccaccttgcccagcggggtctggcagcgcacagttactttatccggtgcaaaattgatgcgcagcgggttcttcaaacgatcggtaataatcaaagaagcacgttccagcgtatcaataaagctcttgcagtcgatcacgaccttggtgcggctctctttgggaatcacgctctcataattcaggaactcgccctcgatcaaccggctcatgatggtgtagccgttggtagtgaacaccacatagcggcggtttgcatcaattttgaccggttcgtccggcccgccgntgattttcagcagctcctgcagcgtttttgccggaatgataatgcggatatcgcgggtgcattccacatcccgcttaatgatggccaggcggtaaccgtccagagccacaaccgtcaggcggcccggctcgatcacgaacaattcaccggtgtgtgcgggcttcttatcttccacagcgaccgcatagatggtcttttcgatcagctcgcgcatcatcgaagtcggaatggtcatggtattttcggctgccgtgttgggcaggctggggtaatcgctcgcgttcatggcggggatctcaaactctgccacgccgccagaaataattgccataccttcgttattcagctccaccgatacggtgccggacggcatacggctgaccatggagccaaacagctttgcttccaaaaccgtctcgccgggtacctgaacattgcactcaatgttggtggtgatgcccatttccatatcgtagccggtcagcgtcagctggaacccttcggctttcaggtaaatgccctccagcacggggatcgccgcgcggttggtgatggcgcgggaaacgccgtcgatcgcagcagacagcagcgacttgtcacattcaaacttcaatgttgtcacctcgtatataatcactaaacttacagaaaactgtgaagtgttgtagcctggcagacggttcagaaatctgaaatatccgttttgtataatccttatttgctgatgggcctgacggtgcagaacacgtaaaatgtcagggtaaactagatactttgatagtcatagtagtaggctacgttgaatctgtggaaaagcctgaaacctcngattccgaagcaatttttgaggacctggctttccgcaaaacctcgtggaaagaaaaatctcaaatgtggaaaacctgacctttcaacctgctctgtggaaaatccgtgttaattgttgaaaaatcagttgaaaatgttgaaagtctaaaactgctgtcggaacccggaatatccgttttgaaaacccggaaaaggcatggcatgttctgcatattcatgtataaacatgcagaacgccgggcgtttcattgtcaacctgcagcatgcatcaggcacggatgttcttcatgatgtcgtccacggtctccttcaggtggcggtccttgccgatgttcttctccatcgtattgatggagtacacaacggtggaatggtcacgctggaattcggaaccgatggcttccatgctcataccggtgatctcgcggatgatatacatcgacatctggcgggcggcactcacattggcgctgcgctttttcccgcggatgtcggagggaatcacattataggtgcgcgccacttcgttgatgatcttttcaatcgtaacggggatgggctgggtatcattcagtgtatccttgatggcggtcgtcgtcacgccgatgcagggggcaataccctccaacatatagtaggcgttcagctttttcactgcgccctccagctggcggatgttctgcttcagatggttggcgatgtattccgcaacgtcatcaggcagatccagattcagcaattcggccttgcgcttgacgatcgccacacgggtttcgaaatcaggcggctggatatccgccgtcaggccccactcgaaccgggtgcgcagacgctcttccaggctcttgatctccttggccggccggtcggatgccagcacgatctgcttgccggcattatgcagcgtattaaaagtatggaaaaactcttcctgcgttgattccttgcccgccaaaaactggatatcgtcgatcagcaacacatcggcttcgcggtatttctggcggaactgttcggtcgttgccattttgaccgcggtgatgatctcgttggtaaacttttcgcagtccacatagacgatattgtagtccggatggtttttgtggatctcgatctgaatcgcgttcagcagatgcgttttgcccagaccggacggtccgtaaatgaacagcggattgtaagcgccggacgggtttgccgcaaccgcctgcgccgccgcaaaggcaaattggttggacgggccgcggatgaagttttcaaaggtgaaatcataccggcccgagggcaggctggcttcatccattgggcgtttttctttggcagcctctggttcaggctgcggcacagtgaacttgacctcaacatcaaagccaagtacagccttaaacgcatccttcagcagacccgtataacggtcagacacgatcttacagataaaatcattgcggacttccagcgtgatgcagttggaattttcaaagctgaccgctttcagcccgctgatgtaatactggtacgtcgcgtcggcagtatgttcgcggcaataggctttggccgcgtccagtacgtcgttgaatgaatccatggatactccccacttttgtgttagtcaaggcaatgcactgccgccccgcaggctgccgcccaatttttgcaaacaaaacacaagccgccccccantataannaannaannncgccncntnnntccanaaaantncngcnncnnncngnnnggtnntgcnnnncngncnaaaattnntnggnnggnnggnggannnngcagcngncggcngcngnggngaanntnntnncnttnccngnccnncaaaaccgnnnnnnccanccgnngnaaggnngnccnnaannccnnncngncnntttttnnnnnnnnnnnnnnnnnnntannnnannannaanttnccccnaanannattataannnggnannattttccannnnnnnggnaanaaaagntnaaaannnngnaaaaaangnnngttttnnancaannntccancnaanccncnccnnncngnnggntnnnttncnnntnnttnnccgntnggnccnnccnngnnnnnnnnaaaanncnatncntnncnnnnngnnntngnncgccnngnngnttttttngnngnttnntnntnannaanntgncntncntnnnnnatnannnaanncnnnnangcnnccccnnnnncnnnnggnnntt

SEQ ID NO: 353 - DNA, 4000 bp, Escherichia coli
  misc_feature (917)..(917): n is a, c, g, or t
  misc_feature (920)..(920): n is a, c, g, or t
  misc_feature (930)..(930): n is a, c, g, or t
  misc_feature (934)..(935): n is a, c, g, or t
  misc_feature (977)..(977): n is a, c, g, or t
  misc_feature (1424)..(1424): n is a, c, g, or t
  misc_feature (1978)..(1978): n is a, c, g, or t
  misc_feature (1989)..(1990): n is a, c, g, or t
  misc_feature (1998)..(1998): n is a, c, g, or t
  misc_feature (2007)..(2007): n is a, c, g, or t
  misc_feature (2014)..(2014): n is a, c, g, or t
  misc_feature (2016)..(2017): n is a, c, g, or t
  misc_feature (2031)..(2031): n is a, c, g, or t
  misc_feature (2037)..(2037): n is a, c, g, or t
  misc_feature (2053)..(2053): n is a, c, g, or t
  misc_feature (2064)..(2065): n is a, c, g, or t
gaatcaatcaaaaggactatccagagatttatttgttctacctgcaaaactcctttattaaatcccagatttcaagctaagggttttaaatttaaaatttgccctttttgtggaggtaaaatagtacatcggattgatgataatatagaaacaattgtaacgagattggaagagtataaaaaacgaacccagccaatttttaaggaattagagaaaagaagatatagaatttacaaaattagcggcacaccgatgccacataagattcacaaaaaaataatttcttatttaactaaatgattaatttgaaatctccgcaggaaattaaaaaaatagcaactgccggcagaattttggctaaagttttaaaagcggttgttaaagaggcaaaaattggaactcagttaagtcaattaaataaattagcttatcaattaactaaaaaagaaggggcccagccggcttttttaggttatcagccggacggcgccagccggtcttttggcgcttcaatctgcgcttcggttaatgaaattgtagttcatggctttccaagcgattataaacttcaatccggcgatgttttaaaaattgatttcggaatagagtatcaaggattttttgctgacgccgccgtaactattggcatcggcaatatttccaaagaagcgaaacatttaataaaaactacccaattggctctaaaaaaagcggttaaacaggcaaggccaggcaagaccttaggcgatatcggctggattatccaaaaaaccgcagaagacagaggattaaaaataattaaaagtttaaccggtcacggcgttggtttaaaacttcatgaagagccgactatttataattttggcgagaaaggtaagggcgttgaattaaaaccggggatggtcttggcaattganccnatgctggctnttgnnacggaaaaaatcattcaaagaccagatgaaagctgggccacngccgacggctctttatcagcccattttgaacacacaatagtgattaccgaaagaggagcgaaggtcttgacaaaattataaacttgtgtattattaaagcataagattagaaaggccaattgtggcaaacagagggcctttaatggctctttgaaaactttataaaaaaagaaaggagggtgtgcgatggaaagatcgtgtgccaaaaaagaggaaagagagtttggaataggtatggttcacgaagggattattacccttcgtagcctcggcttaaccgctgagggctgggagaaaatgaaagatgacaaggagttggccaagaaggtggttgagctaattgaaggcgaaaaagagatttggttggaaagaattgttgcccgagagcgcgcctgccatctggctttctttgaccaagaatttgatttaacagctttcgcccagacnttaaaaaagtacggcgaaagcaaaatcagattttggcagaagcttgaaatggagcccgtatttttgccagaagtggcgatgccgcaggataccaatttccgcggctggaaagtcaagccggaatcttggttctggcagaaaattgccgaaggcagaatcttacgtcaagtcggcaacaagttggtgccaatcaaggaagttcggcttgaaggcattacggctctgattgatacgcggctcaagccgaaatatgacgccggcaagcagatgtacgaaaatgacaatttgctcggccccattattgaggacctgcgcagagccaaaaagattgccaaatacgaatacggtcctaagtcttctcgtttcggcgtttctgctgatgaatgggaaacctgtagtaagccggtattagctcaaaaacttggactggatgaatctcaaattcgtctggaacgagagattgaagctaacgtcattccccagatttatctttatatgtcccgcaaagatgatggcaagacagacacttgggaatggcgagaggaatattttgngggccgcggcnnccggctcnacggcggcnactctgncnntggcggtttggcgnatgtcnactgcaattcctctgncagccactggnnctacgggtcgtttcgtcctctggcagtgctttgaaacttgaattttgtatctttgaaccttttgaattctgagggttgagaaattaatctcaacccttttctttttttgaaattttgctaaaataataattgagagtaggttaatgtataacaatttacggattgttatcaccgaaatcctaaatatttaatggccagagtttcttaattctacggagtaagaaagtgtgccaaaattatttagagcactgcttgtctgtttctaatgcgggtgtgttaaatttaacaaagcactgccgcagaataaaatacagaagggagttttattttacaaatcaaccttcagtgataacgggggaaacaggcaatttttgaggaccgcggcaaccggctcaacggcggcaactctgacaatggcggtttggcgaatgtcaactacaattcctctgacaaccactggaacaacaggtcgtttcgtcctctggaagtctctaaataacttaaaaggacatcttttgatgtccttttgttcaacttacatatctaatccagccgccgatcatcttcccgatttcctgaagtttttcttgaagaattagatattttttgttatcaatggatttaatctcgtaagccaatctaatcagcgttttcaaaagatttactttggtatctatttctttaaggaaagacaatttttcttgtttcggtgaataaacagtttttaataaaaattccaatatctctaagattaaattttcaattttctggcctaaagaatatttttcgcttttcggaaataattttaaacattcgtgaaataatttataaaactctaaaatcttatgtaccagcggcacatcaaaaaatttagaggtttcgggggggggcattaaaagtcataatatttttgacgaaataatctcgcttgaaaatctgtttttggcttggcaggaattccggcgaggtaaaaggaataagtcagatgtccaaaaatttgagtttaatttagaagataatttatttcaacttcatcaagagctgagaaatgaaatttatcaacattcttattataccacattttgtatttgcgacccaaaattaagacggattcacaaagccagcgttcgcgatcggattttacaccacgcggtttttagaattttatatcctatttttgacaaaggatttatttttgattcctattcctgccggcttggcaagggaacgcacagggcggttgatagattggaaaggttttgtcgccaattaagcaaaaacaaccgcataaatattttcgctttaaaatgcgacatcaaaaagttttttgattcagttgaccaagatattttaatggaaattattaaaaagaaaattcaagacagcaaagtcattcggcttatagaaaaaattattagaagttttgaaacagaaaaaggaaagggtctgccgcttggcaatgttaccagccagttatttgccaatatttacttaaatgaacttgaccagtttattaagcataaattgaagattaaatattatctgcgttattgcgatgattttataattttagaagaaagcaaagagtgcctaattggcctaattcccttaatagataattttctaaaagaaaaattgaaattaacccttcattctgataagataataatcagaaaatatcatcaaggcattgattttcttggttatgtatcactgccgcattaccgacttttgcggacaagaaccaaaaagaggatatttagaaaaataaaaattaagtatcaagatttagagaggggtttaatttgtgaagaattttttaaccaaagcttgcagtcctattttggaatttttaaacactgcaaaggctataaaattaaaaagagaatttatctcttactaaacgactaattcccaaagcattgcttaaagtaa

SEQ ID NO: 354 - DNA, 4000 bp, Escherichia coli
  misc_feature (1989)..(1989): n is a, c, g, or t
  misc_feature (1991)..(1991): n is a, c, g, or t
  misc_feature (2476)..(2476): n is a, c, g, or t
acggtaacaatgagatcattattgctaatcgtaacggacgtgctattcgcttccatgaagctgctgtgcgtgtaatgggacgtactgcaacaggtgtacgtggcataacattggataatgatggacaggatgaagtagttggaatgatttgtatcaaagatttggaaacagaatctgtaatggttgtttctgaacagggatatggtaaacgttctgaaatagaagattatcgtaaaaccaatcgtggaggtaaaggtgtaaaaactatgaatattaccgaaaagactggtaaactggtaacaatcaaatctgtaactgatgaaaatgacttgatgattatcaataaatctggtatcacaatccgtctgaaagtagcagatgtccgtattatgggacgtgcaactcaaggtgtccgtctgattaatcttgagaaacgtaacgaccaaataggctcggtatgtaaagtaatgacagaaagtcttgaagatgaaattcctgctgaggaaaaagaaggaacaattataagtgatcctaatgcagatacaccgaatgctgaagacgtcacggacgtaaatgaaagtaataacgatattgaagaatagacataatattaataattaatcaaacaacaatcatgaaaagagtattattttcgatggttttattgatggctgttagcttctcatttgctcagatgaagaatgtaaaagaagcaaaaagcattgccaatgatgtgaaacctaattttaagcaagctgaacagctgattgaagaggctatgaagaatcctgaaactaaggatcttgctgacacatgggacgttgctggatttattcagaagcgtatcaacgaagagcaaatgaaaaatgcttttctgaaaaaaccgtacgatacattaaaagtatacaacagtattttgaagatgtatgagtactataataaatgcgacgatttggctcaggtacctaatgaaaaaggtaagattaaaaacaaatatcgtaaagcaaatgcttctagtatgttggctgaacgccctaatttgattaatggtggtatccaatatttcaatttggataagaataaggaagcattaaaatttttcgctacttatgtagaatcagcttcttatccgatgttggctgataaagagttagctaaaaatgatacacttcttcctcaaattgcatattatgcaacattagcggctgatagagtaggcgataaagatgctattatcaagtacgctccttcagcattgtctgataaagatggaggtaagtttgctatgcagttaatggcagatgcttataaagctaaaggtgatactgctgcatggattaaatctttggaagaaggtattcttaagtttccaggaaatgattatttctttgcaaatctagttgattattataatacttctaatcaagcttctaaagcaatggaatttgctgataagatgttaactaatgatcctaataataagttatatttatatgtgaaggcatatctttatcataatatgaaagagtatgataatgcaatcgaatactacaaaaaagctattgctgctgatccggaatatgcagaagcttattctaatgtaggtttagtgtatctgatgaaagcacaagattatgcagataaagcaacaacagatatcaatgatcctaagtatgctgaagctcaagcggcagtgaagaaattctatgaagaagcaaagcccttctatgaaaaagctagagctttaaaacctgaccagaaagatttatggttgcaaggtctttaccgtgtatactataatttgaatatgggtccggaattcgaagaaattgataagatgatgaaataatatatttctttgatgaagaaaaagaaggttacacaaaagttgccttctttttttatgctttttaaaaatatgagttcattaaaaaacagcaaaagggagcaaagtttatttattgctcccttttgctattaaacataatntngattattccactgtttaaaacactaaaattctatttcttttgatcatccgttcataacaagtaacggcgtatctgaatgaaaaatcatcttacgagcaatacttggattgaataatcgagcgaatatatttcttttgtatgaagtcaatgcgattatatctatttgattatctttgatatattgttcaagtccttttagtagattatcactcattacgacatcataatggatttcaagccctgggtattgcttgtgaaaatattcttttatgccaacaagttttatttcattccacgtatcttttgattcagcaagatgtatcaaagatactgaaaaatgaaatgacttccaactattgaaaaatgcatcaaaagctattaaatctctttgatcgaaattagttataaaagcgatctgttttacctcactgaattgtttgaatggtgtattctccggaatagctaatacggctgtacgatttcgntcaataacctcagcagttacactgccaatcagatctatatctttttgattttttcctcgtgtccccataatgatgagtttaggacgttgctctttagcgtatctcaatatttcttcttctggaatgccttcacgtaaaatacagctatatttgacatctggaaattcccccgattcaactttatcttttattttatcagataaagctttgagatcagaatgaactttgtgaataattgtttttacagattcttcatctccaatttgatagttgaatacatctccgtatggcaatgacgatgcatatataggtgtaaaatatacatgcaacaaaataatctctgcgttctctgttttagctaggttgaaggcaaattcacatgctttcatcgaataactagagaaatcgaccggaattaaaatcttatttgatttttctcctttttttgtttccttctctcctactatactttccgatagccaagcagagctttctgtgattttcagtgcatgcggtagatcgctttccttaattcgtaagcgtactccagaggatacaacaggctgtatttggttcacattatgaatgtatgtctcaataccttcattttcaagtacattttttagaatctgagctttggtatatgtcagaattgctagagttactaatttgtcttccataattgatacattttgaaggtgaacaaataagaaatcccaattgtttaacgcaattgggatttctgtttgctatattttaaacttgcacagattcggtagcctgttctttttgcatactcatattcaattcatctagaatctttaaagcccgatcgagaactgttgtatcgtctaacataacaagcccaccatctggaccgggctcaagatgtattccgacactttttccctccttgaaattatggcctccgaaaaagtttcgcacagtatctacgtgtaaaccaagttcgtctgctattcgatgcatgctaccgctgggcaatgaatctttaatcttacgaagttcattaaatgttattgttctcatgtctcataaatttaatggttagtactatgtgattttttatcacgctataaacttaagcaaaaaaaaagataaaacaaattatttgcttatcttttttttcaaaattgataaaatctattaataccttttatatcacttcaatagcagaagctgggacccatcctacttttccatcttctaagtgaatttctttccattctttcatagaattgtctttgacgtttacctttcttccttcatgaagaataaataaactagtaccactttcacttggagtacttcgcactgtgacactcggattcataactatcgcttcgttacggtttaccaaattttctttttgttgtgaagcaaaaagattagagcatactgtgattattaaaaagataatccctgaaatgaagcctatctttttccacataatctgttttgaaaatataaagaagtagagagatactatcagtagaatgaaagaaa

SEQ ID NO: 355 - DNA, 4000 bp, Escherichia coli
  misc_feature (1955)..(1956): n is a, c, g, or t
  misc_feature (1964)..(1964): n is a, c, g, or t
  misc_feature (1970)..(1970): n is a, c, g, or t
  misc_feature (1991)..(1992): n is a, c, g, or t
  misc_feature (2018)..(2019): n is a, c, g, or t
  misc_feature (2024)..(2025): n is a, c, g, or t
  misc_feature (2426)..(4000): n is a, c, g, or t
cggtagccaagcgtccacagaacttgactttagcaaccaaacacgcctccagatgttctcggcgcgtggtacgaccgtcaagagcatacagtttgccaaaggtgcgccacttgaggcagcaatcctcccgtcctctcttaccacattgaggttagagtatcttcccaacttgcaaatgggaggattgactgttgtaggctacagcaatatagagaccttcatctttgccggctgtcccggattgaactggcagacattgttaggacgttgtacgaatgtcgttcgaatcagagtcgaaggattgtcgcttgagggagacggaaccttgctcaatacctatcttaacaagaagggtgtcgatgcggagggcaatgccgttgatacctgttcgcttgtaggcagctataccttgacacgctacccatctgatgaggaattggaaacttggagagcacactacccggaactgaatatcattctgcctgaatacacgactatatcgtttgatgattcggtttcagacggagagaatattaccaacctcgacaaccttacaggatatgcctatggcaatacctacgaggcaagcgggcatatcaaccgtatattgaaccaacgccatagatgtgtggcaaagaagaccggcgcaggtgaagtaaccatttgccaactgcacgacaagaactccaactactatgcggatgcggagaacttcttgtctgcaaccgccgccgacctcacaggtggcgatggaaacgtatttatgttcgagccccattattggtacaaaggtgtgaatgaccacctgaataaaaagaaatacgcattcttcagtagcaacgaggcgtgtccgacaatggctgacagtgtgaaggtgctgcttgaggatatgaccgtaaagaaagggtatgcagtccgttcaagtgttgattacacgacacgagcagatgcagagacaacgatgtcctcagactccgttgtaaccgtaaatgttcagggctacaagcaagtccgttatccgagcctttcgtcagctttatacggagctatcttcgtggatgcagacggtaatgtcgtcaagcgtatgaaggcgacctccgacagcggtatattggatggtatgtattgttttacagacatacctgaagacgctgtttcacttgtgtttactattgtaaccgcagcaccgtttgactatgtactgcttacaaagtccgacaaaattgaagcaatcgagcctgattgggtagaacatgaagagtgcttggtaggtgtctatgaagcatatttgaaagacgacttcctgtattcaatcagtggagtcggttcaaccgcatcagtcagccaagccgattttcgtgtctatgctcggaacagaggcactggcttccagttggtggattgggaaatgcataaggatataggcaacctgttctttgccaagtatggcggtcgcgactcgcagggtatctgcggaccgggcacgcacacaaacggtagggcaacaggagcctccaatgccacaggaatgcaggacactaccgccaatgctgacggcagttggtacaagcaaacgctttcaagcgatggtacttattacccaagcggtaatgcctacgtgctgaagaatgaaggtgacgaaacaagaacggcaatcaattccccggttgtgcttggatatgagaactggcatggtaacaaagccgagtggatggataatgtcggattctgtacgaatgcggtagattacaagtgggatatcggtttgcctgatggtaccaagcgagaagttcagggcgcaaaatatagtggtaattacttttatccgaagtgtgtgatacatggcagatatatggacacaatggttgcgttgtcaggaggctctaccagtacttattaccacgattgtacctaccaaaatgccacaaagggccgtgtggtttaccggtcgaacnncaacgcgngctcgnatggcggtgtgtcgtatgcgnncgcgaattacgactcatcgtatgcgnncacgnncatcgggtcgcgtctcgccttccgcggcaaaatcgtggtggcgcgaagcgtggcagcgtacaaagcgatagtcgaaatctcgtaagcggagcaaagcgacaaagcgtaaaacgaacggcgtttgaatggttttcaaacgccgtttttatatcaaataccggcgtaagccggtcgataatatttagaaaaagggggatacctctcagaggtacatttcgttttggaaaatagaacgcttcgttcaaaaattgcgaaacgcttcgatttgcggattatacaattaaggcggagatagttcgtctggatggtattttgatgaaaatagatgaaggaaagagtatatatgctaagcttcccgtattgattgaagaatgtgagatattgttggatgggaaaccttnnnnnnnnnnnnnnnnnnnnnnnnnnnnnnnnnnnnnnnnnnnnnnnnnnnnnnnnnnnnnnnnnnnnnnnnnnnnnnnnnnnnnnnnnnnnnnnnnnnnnnnnnnnnnnnnnnnnnnnnnnnnnnnnnnnnnnnnnnnnnnnnnnnnnnnnnnnnnnnnnnnnnnnnnnnnnnnnnnnnnnnnnnnnnnnnnnnnnnnnnnnnnnnnnnnnnnnnnnnnnnnnnnnnnnnnnnnnnnnnnnnnnnnnnnnnnnnnnnnnnnnnnnnnnnnnnnnnnnnnnnnnnnnnnnnnnnnnnnnnnnnnnnnnnnnnnnnnnnnnnnnnnnnnnnnnnnnnnnnnnnnnnnnnnnnnnnnnnnnnnnnnnnnnnnnnnnnnnnnnnnnnnnnnnnnnnnnnnnnnnnnnnnnnnnnnnnnnnnnnnnnnnnnnnnnnnnnnnnnnnnnnnnnnnnnnnnnnnnnnnnnnnnnnnnnnnnnnnnnnnnnnnnnnnnnnnnnnnnnnnnnnnnnnnnnnnnnnnnnnnnnnnnnnnnnnnnnnnnnnnnnnnnnnnnnnnnnnnnnnnnnnnnnnnnnnnnnnnnnnnnnnnnnnnnnnnnnnnnnnnnnnnnnnnnnnnnnnnnnnnnnnnnnnnnnnnnnnnnnnnnnnnnnnnnnnnnnnnnnnnnnnnnnnnnnnnnnnnnnnnnnnnnnnnnnnnnnnnnnnnnnnnnnnnnnnnnnnnnnnnnnnnnnnnnnnnnnnnnnnnnnnnnnnnnnnnnnnnnnnnnnnnnnnnnnnnnnnnnnnnnnnnnnnnnnnnnnnnnnnnnnnnnnnnnnnnnnnnnnnnnnnnnnnnnnnnnnnnnnnnnnnnnnnnnnnnnnnnnnnnnnnnnnnnnnnnnnnnnnnnnnnnnnnnnnnnnnnnnnnnnnnnnnnnnnnnnnnnnnnnnnnnnnnnnnnnnnnnnnnnnnnnnnnnnnnnnnnnnnnnnnnnnnnnnnnnnnnnnnnnnnnnnnnnnnnnnnnnnnnnnnnnnnnnnnnnnnnnnnnnnnnnnnnnnnnnnnnnnnnnnnnnnnnnnnnnnnnnnnnnnnnnnnnnnnnnnnnnnnnnnnnnnnnnnnnnnnnnnnnnnnnnnnnnnnnnnnnnnnnnnnnnnnnnnnnnnnnnnnnnnnnnnnnnnnnnnnnnnnnnnnnnnnnnnnnnnnnnnnnnnnnnnnnnnnnnnnnnnnnnnnnnnnnnnnnnnnnnnnnnnnnnnnnnnnnnnnnnnnnnnnnnnnnnnnnnnnnnnnnnnnnnnnnnnnnnnnnnnnnnnnnnnnnnnnnnnnnnnnnnnnnnnnnnnnnnnnnnnnnnnnnnnnnnnnnnnnnnnnnnnnnnnnnnnnnnnnnnnnnnnnnnnnnnnnnnnnnnnnnnnnnnnnnnnnnnnnnnnnnnnnnnnnnnnnnnnnnnnnnnnnnnnnnnnnnnnnnnnnnnnnnnnnnnnnnnnnnnnnnnnnnnnnnnnnnnnnnnnnnnnnnnnnnnnnnnnnnnnnnnnnnnnnnnnnnnnnnnnnnnnnnnnnnnnnnnnnnnnnnnnnnnnnnnnnnnnnnnnnnnnnnnnnnnnnnnnn

SEQ ID NO: 356 - DNA, 4000 bp, Escherichia coli
  misc_feature (1387)..(1387): n is a, c, g, or t
  misc_feature (1962)..(1962): n is a, c, g, or t
  misc_feature (1969)..(1969): n is a, c, g, or t
  misc_feature (1984)..(1985): n is a, c, g, or t
  misc_feature (2391)..(2391): n is a, c, g, or t
  misc_feature (2397)..(2397): n is a, c, g, or t
  misc_feature (2406)..(2406): n is a, c, g, or t
  misc_feature (2408)..(2408): n is a, c, g, or t
  misc_feature (2410)..(2413): n is a, c, g, or t
  misc_feature (2417)..(2418): n is a, c, g, or t
  misc_feature (2420)..(2428): n is a, c, g, or t
  misc_feature (2430)..(2430): n is a, c, g, or t
  misc_feature (2432)..(2432): n is a, c, g, or t
  misc_feature (2434)..(2436): n is a, c, g, or t
  misc_feature (2439)..(2439): n is a, c, g, or t
  misc_feature (2441)..(2441): n is a, c, g, or t
  misc_feature (2443)..(2443): n is a, c, g, or t
  misc_feature (2445)..(2447): n is a, c, g, or t
  misc_feature (2449)..(2450): n is a, c, g, or t
  misc_feature (2452)..(2452): n is a, c, g, or t
  misc_feature (2455)..(2461): n is a, c, g, or t
  misc_feature (2464)..(2465): n is a, c, g, or t
  misc_feature (2469)..(2469): n is a, c, g, or t
  misc_feature (2472)..(2473): n is a, c, g, or t
  misc_feature (2475)..(2475): n is a, c, g, or t
  misc_feature (2478)..(2478): n is a, c, g, or t
  misc_feature (2480)..(2482): n is a, c, g, or t
  misc_feature (2485)..(2485): n is a, c, g, or t
  misc_feature (2487)..(2487): n is a, c, g, or t
  misc_feature (2491)..(2491): n is a, c, g, or t
  misc_feature (2493)..(2495): n is a, c, g, or t
  misc_feature (2498)..(2499): n is a, c, g, or t
  misc_feature (2501)..(2501): n is a, c, g, or t
  misc_feature (2507)..(2507): n is a, c, g, or t
  misc_feature (2512)..(2512): n is a, c, g, or t
  misc_feature (2514)..(2514): n is a, c, g, or t
  misc_feature (2523)..(2525): n is a, c, g, or t
  misc_feature (2527)..(2527): n is a, c, g, or t
  misc_feature (2529)..(2529): n is a, c, g, or t
  misc_feature (2532)..(2533): n is a, c, g, or t
  misc_feature (2537)..(2538): n is a, c, g, or t
  misc_feature (2540)..(2541): n is a, c, g, or t
  misc_feature (2543)..(2543): n is a, c, g, or t
  misc_feature (2545)..(2546): n is a, c, g, or t
  misc_feature (2549)..(2549): n is a, c, g, or t
  misc_feature (2551)..(2552): n is a, c, g, or t
  misc_feature (2558)..(2558): n is a, c, g, or t
  misc_feature (2567)..(2567): n is a, c, g, or t
  misc_feature (2569)..(2569): n is a, c, g, or t
  misc_feature (2573)..(2573): n is a, c, g, or t
  misc_feature (2576)..(2576): n is a, c, g, or t
  misc_feature (2579)..(2579): n is a, c, g, or t
  misc_feature (2583)..(2584): n is a, c, g, or t
  misc_feature (2586)..(2586): n is a, c, g, or t
  misc_feature (2591)..(2591): n is a, c, g, or t
  misc_feature (2595)..(2595): n is a, c, g, or t
  misc_feature (2599)..(2599): n is a, c, g, or t
  misc_feature (2602)..(2602): n is a, c, g, or t
  misc_feature (2604)..(2605): n is a, c, g, or t
  misc_feature (2609)..(2613): n is a, c, g, or t
  misc_feature (2615)..(2617): n is a, c, g, or t
  misc_feature (2620)..(2621): n is a, c, g, or t
  misc_feature (2623)..(2624): n is a, c, g, or t
  misc_feature (2626)..(2626): n is a, c, g, or t
  misc_feature (2628)..(2629): n is a, c, g, or t
  misc_feature (2631)..(2631): n is a, c, g, or t
  misc_feature (2634)..(2634): n is a, c, g, or t
  misc_feature (2636)..(2636): n is a, c, g, or t
  misc_feature (2638)..(2639): n is a, c, g, or t
  misc_feature (2641)..(2641): n is a, c, g, or t
  misc_feature (2643)..(2644): n is a, c, g, or t
  misc_feature (2646)..(2648): n is a, c, g, or t
  misc_feature (2650)..(2650): n is a, c, g, or t
  misc_feature (2655)..(2655): n is a, c, g, or t
  misc_feature (2657)..(2658): n is a, c, g, or t
  misc_feature (2662)..(2663): n is a, c, g, or t
  misc_feature (2665)..(2665): n is a, c, g, or t
  misc_feature (2667)..(2668): n is a, c, g, or t
  misc_feature (2676)..(2677): n is a, c, g, or t
  misc_feature (2679)..(2686): n is a, c, g, or t
  misc_feature (2689)..(2701): n is a, c, g, or t
  misc_feature (2703)..(2703): n is a, c, g, or t
  misc_feature (2707)..(2708): n is a, c, g, or t
  misc_feature (2711)..(2712): n is a, c, g, or t
  misc_feature (2714)..(2715): n is a, c, g, or t
  misc_feature (2718)..(2719): n is a, c, g, or t
  misc_feature (2721)..(2721): n is a, c, g, or t
  misc_feature (2726)..(2728): n is a, c, g, or t
  misc_feature (2732)..(2732): n is a, c, g, or t
  misc_feature (2734)..(2734): n is a, c, g, or t
  misc_feature (2774)..(2776): n is a, c, g, or t
  misc_feature (2778)..(2782): n is a, c, g, or t
  misc_feature (2784)..(2784): n is a, c, g, or t
  misc_feature (2786)..(2787): n is a, c, g, or t
  misc_feature (2790)..(2792): n is a, c, g, or t
  misc_feature (2794)..(2794): n is a, c, g, or t
  misc_feature (2796)..(2797): n is a, c, g, or t
  misc_feature (2801)..(2805): n is a, c, g, or t
  misc_feature (2807)..(2807): n is a, c, g, or t
  misc_feature (2810)..(2811): n is a, c, g, or t
  misc_feature (2815)..(2815): n is a, c, g, or t
  misc_feature (2817)..(2819): n is a, c, g, or t
  misc_feature (2821)..(2824): n is a, c, g, or t
  misc_feature (2832)..(2834): n is a, c, g, or t
  misc_feature (2836)..(2837): n is a, c, g, or t
  misc_feature (2843)..(2844): n is a, c, g, or t
  misc_feature (2846)..(2846): n is a, c, g, or t
  misc_feature (2848)..(2849): n is a, c, g, or t
  misc_feature (2852)..(2859): n is a, c, g, or t
  misc_feature (2866)..(2870): n is a, c, g, or t
  misc_feature (2872)..(2876): n is a, c, g, or t
  misc_feature (2878)..(2880): n is a, c, g, or t
  misc_feature (2882)..(2885): n is a, c, g, or t
  misc_feature (2887)..(2891): n is a, c, g, or t
  misc_feature (2895)..(2895): n is a, c, g, or t
  misc_feature (2902)..(2907): n is a, c, g, or t
  misc_feature (2909)..(2911): n is a, c, g, or t
  misc_feature (2913)..(2913): n is a, c, g, or t
  misc_feature (2915)..(2916): n is a, c, g, or t
  misc_feature (2920)..(2921): n is a, c, g, or t
  misc_feature (2923)..(2924): n is a, c, g, or t
  misc_feature (2929)..(2930): n is a, c, g, or t
  misc_feature (2932)..(2932): n is a, c, g, or t
  misc_feature (2935)..(2935): n is a, c, g, or t
  misc_feature (2939)..(2942): n is a, c, g, or t
  misc_feature (2945)..(2948): n is a, c, g, or t
  misc_feature (2950)..(2950): n is a, c, g, or t
  misc_feature (2953)..(2954): n is a, c, g, or t
  misc_feature (2956)..(2963): n is a, c, g, or t
  misc_feature (2965)..(2971): n is a, c, g, or t
  misc_feature (2975)..(2979): n is a, c, g, or t
  misc_feature (2982)..(2982): n is a, c, g, or t
  misc_feature (2984)..(2984): n is a, c, g, or t
  misc_feature (2987)..(2990): n is a, c, g, or t
  misc_feature (2993)..(2993): n is a, c, g, or t
  misc_feature (2995)..(2995): n is a, c, g, or t
  misc_feature (2998)..(3003): n is a, c, g, or t
  misc_feature (3009)..(3009): n is a, c, g, or t
  misc_feature (3011)..(3011): n is a, c, g, or t
  misc_feature (3014)..(3014): n is a, c, g, or t
  misc_feature (3016)..(3016): n is a, c, g, or t
  misc_feature (3018)..(3021): n is a, c, g, or t
  misc_feature (3024)..(3029): n is a, c, g, or t
  misc_feature (3033)..(3034): n is a, c, g, or t
  misc_feature (3038)..(3038): n is a, c, g, or t
  misc_feature (3042)..(3045): n is a, c, g, or t
  misc_feature (3047)..(3050): n is a, c, g, or t
  misc_feature (3052)..(3053): n is a, c, g, or t
  misc_feature (3056)..(3059): n is a, c, g, or t
  misc_feature (3061)..(3061): n is a, c, g, or t
  misc_feature (3064)..(3068): n is a, c, g, or t
  misc_feature (3071)..(3071): n is a, c, g, or t
  misc_feature (3073)..(3074): n is a, c, g, or t
  misc_feature (3076)..(3077): n is a, c, g, or t
  misc_feature (3080)..(3084): n is a, c, g, or t
  misc_feature (3088)..(3088): n is a, c, g, or t
  misc_feature (3091)..(3092): n is a, c, g, or t
  misc_feature (3096)..(3097): n is a, c, g, or t
  misc_feature (3099)..(3100): n is a, c, g, or t
  misc_feature (3102)..(3102): n is a, c, g, or t
  misc_feature (3104)..(3104): n is a, c, g, or t
  misc_feature (3109)..(3110): n is a, c, g, or t
  misc_feature (3112)..(3114): n is a, c, g, or t
  misc_feature (3117)..(3119): n is a, c, g, or t
  misc_feature (3122)..(3126): n is a, c, g, or t
  misc_feature (3128)..(3129): n is a, c, g, or t
  misc_feature (3131)..(3131): n is a, c, g, or t
  misc_feature (3133)..(3133): n is a, c, g, or t
  misc_feature (3137)..(3138): n is a, c, g, or t
  misc_feature (3141)..(3141): n is a, c, g, or t
  misc_feature (3146)..(3150): n is a, c, g, or t
  misc_feature (3152)..(3154): n is a, c, g, or t
  misc_feature (3157)..(3157): n is a, c, g, or t
  misc_feature (3159)..(3161): n is a, c, g, or t
  misc_feature (3164)..(3164): n is a, c, g, or t
  misc_feature (3168)..(3174): n is a, c, g, or t
  misc_feature (3176)..(3176): n is a, c, g, or t
  misc_feature (3178)..(3182): n is a, c, g, or t
  misc_feature (3185)..(3185): n is a, c, g, or t
  misc_feature (3189)..(3189): n is a, c, g, or t
  misc_feature (3191)..(3192): n is a, c, g, or t
  misc_feature (3194)..(3196): n is a, c, g, or t
  misc_feature (3200)..(3200): n is a, c, g, or t
  misc_feature (3203)..(3203): n is a, c, g, or t
  misc_feature (3205)..(3205): n is a, c, g, or t
  misc_feature (3207)..(3207): n is a, c, g, or t
  misc_feature (3212)..(3212): n is a, c, g, or t
  misc_feature (3214)..(3215): n is a, c, g, or t
  misc_feature (3221)..(3227): n is a, c, g, or t
  misc_feature (3229)..(3229): n is a, c, g, or t
  misc_feature (3231)..(3231): n is a, c, g, or t
  misc_feature (3233)..(3233): n is a, c, g, or t
  misc_feature (3235)..(3235): n is a, c, g, or t
  misc_feature (3237)..(3238): n is a, c, g, or t
  misc_feature (3240)..(3241): n is a, c, g, or t
  misc_feature (3243)..(3243): n is a, c, g, or t
  misc_feature (3249)..(3249): n is a, c, g, or t
  misc_feature (3251)..(3253): n is a, c, g, or t
  misc_feature (3255)..(3256): n is a, c, g, or t
  misc_feature (3258)..(3258): n is a, c, g, or t
  misc_feature (3261)..(3261): n is a, c, g, or t
  misc_feature (3263)..(3265): n is a, c, g, or t
  misc_feature (3268)..(3271): n is a, c, g, or t
  misc_feature (3273)..(3273): n is a, c, g, or t
  misc_feature (3276)..(3277): n is a, c, g, or t
  misc_feature (3279)..(3283): n is a, c, g, or t
  misc_feature (3285)..(3285): n is a, c, g, or t
  misc_feature (3287)..(3292): n is a, c, g, or t
  misc_feature (3295)..(3295): n is a, c, g, or t
  misc_feature (3298)..(3299): n is a, c, g, or t
  misc_feature (3301)..(3302): n is a, c, g, or t
  misc_feature (3305)..(3305): n is a, c, g, or t
  misc_feature (3307)..(3307): n is a, c, g, or t
  misc_feature (3309)..(3310): n is a, c, g, or t
  misc_feature (3312)..(3317): n is a, c, g, or t
  misc_feature (3322)..(3324): n is a, c, g, or t
  misc_feature (3326)..(3326): n is a, c, g, or t
  misc_feature (3329)..(3329): n is a, c, g, or t
  misc_feature (3331)..(3336): n is a, c, g, or t
  misc_feature (3338)..(3338): n is a, c, g, or t
  misc_feature (3341)..(3344): n is a, c, g, or t
  misc_feature (3347)..(3348): n is a, c, g, or t
  misc_feature (3350)..(3353): n is a, c, g, or t
  misc_feature (3356)..(3356): n is a, c, g, or t
  misc_feature (3358)..(3359): n is a, c, g, or t
  misc_feature (3361)..(3361): n is a, c, g, or t
  misc_feature (3363)..(3364): n is a, c, g, or t
  misc_feature (3367)..(3367): n is a, c, g, or t
  misc_feature (3371)..(3372): n is a, c, g, or t
  misc_feature (3374)..(3374): n is a, c, g, or t
  misc_feature (3378)..(3378): n is a, c, g, or t
  misc_feature (3380)..(3384): n is a, c, g, or t
  misc_feature (3387)..(3388): n is a, c, g, or t
  misc_feature (3390)..(3394): n is a, c, g, or t
  misc_feature (3397)..(3397): n is a, c, g, or t
  misc_feature (3399)..(3402): n is a, c, g, or t
  misc_feature (3404)..(3404): n is a, c, g, or t
  misc_feature (3406)..(3407): n is a, c, g, or t
  misc_feature (3413)..(3414): n is a, c, g, or t
  misc_feature (3418)..(3418): n is a, c, g, or t
  misc_feature (3420)..(3420): n is a, c, g, or t
  misc_feature (3422)..(3423): n is a, c, g, or t
  misc_feature (3428)..(3430): n is a, c, g, or t
  misc_feature (3433)..(3433): n is a, c, g, or t
  misc_feature (3435)..(3436): n is a, c, g, or t
  misc_feature (3438)..(3438): n is a, c, g, or t
  misc_feature (3440)..(3441): n is a, c, g, or t
  misc_feature (3444)..(3447): n is a, c, g, or t
  misc_feature (3449)..(3449): n is a, c, g, or t
  misc_feature (3451)..(3452): n is a, c, g, or t
  misc_feature (3457)..(3458): n is a, c, g, or t
  misc_feature (3462)..(3463): n is a, c, g, or t
  misc_feature (3465)..(3468): n is a, c, g, or t
  misc_feature (3470)..(3471): n is a, c, g, or t
  misc_feature (3474)..(3474): n is a, c, g, or t
  misc_feature (3480)..(3481): n is a, c, g, or t
  misc_feature (3483)..(3484): n is a, c, g, or t
  misc_feature (3486)..(3487): n is a, c, g, or t
  misc_feature (3489)..(3496): n is a, c, g, or t
  misc_feature (3498)..(3499): n is a, c, g, or t
  misc_feature (3501)..(3509): n is a, c, g, or t
  misc_feature (3517)..(3520): n is a, c, g, or t
  misc_feature (3523)..(3525): n is a, c, g, or t
  misc_feature (3528)..(3528): n is a, c, g, or t
  misc_feature (3530)..(3531): n is a, c, g, or t
  misc_feature (3533)..(3533): n is a, c, g, or t
  misc_feature (3539)..(3542): n is a, c, g, or t
  misc_feature (3544)..(3545): n is a, c, g, or t
  misc_feature (3549)..(3550): n is a, c, g, or t
  misc_feature (3553)..(3564): n is a, c, g, or t
  misc_feature (3566)..(3566): n is a, c, g, or t
  misc_feature (3568)..(3568): n is a, c, g, or t
  misc_feature (3571)..(3572): n is a, c, g, or t
  misc_feature (3574)..(3574): n is a, c, g, or t
  misc_feature (3576)..(3577): n is a, c, g, or t
  misc_feature (3581)..(3581): n is a, c, g, or t
  misc_feature (3583)..(3583): n is a, c, g, or t
  misc_feature (3585)..(3587): n is a, c, g, or t
  misc_feature (3590)..(3591): n is a, c, g, or t
  misc_feature (3593)..(3593): n is a, c, g, or t
  misc_feature (3596)..(3598): n is a, c, g, or t
  misc_feature (3602)..(3604): n is a, c, g, or t
  misc_feature (3606)..(3609): n is a, c, g, or t
  misc_feature (3611)..(3614): n is a, c, g, or t
  misc_feature (3616)..(3616): n is a, c, g, or t
  misc_feature (3618)..(3620): n is a, c, g, or t
  misc_feature (3622)..(3622): n is a, c, g, or t
  misc_feature (3625)..(3625): n is a, c, g, or t
  misc_feature (3630)..(3634): n is a, c, g, or t
  misc_feature (3636)..(3646): n is a, c, g, or t
  misc_feature (3648)..(3648): n is a, c, g, or t
  misc_feature (3650)..(3650): n is a, c, g, or t
  misc_feature (3654)..(3655): n is a, c, g, or t
  misc_feature (3665)..(3665): n is a, c, g, or t
  misc_feature (3667)..(3667): n is a, c, g, or t
  misc_feature (3670)..(3673): n is a, c, g, or t
  misc_feature (3675)..(3675): n is a, c, g, or t
  misc_feature (3678)..(3682): n is a, c, g, or t
  misc_feature (3684)..(3684): n is a, c, g, or t
  misc_feature (3687)..(3688): n is a, c, g, or t
  misc_feature (3690)..(3690): n is a, c, g, or t
  misc_feature (3696)..(3698): n is a, c, g, or t
  misc_feature (3701)..(3703): n is a, c, g, or t
  misc_feature (3706)..(3707): n is a, c, g, or t
  misc_feature (3710)..(3713): n is a, c, g, or t
  misc_feature (3717)..(3717): n is a, c, g, or t
  misc_feature (3719)..(3720): n is a, c, g, or t
  misc_feature (3724)..(3726): n is a, c, g, or t
  misc_feature (3728)..(3729): n is a, c, g, or t
  misc_feature (3732)..(3732): n is a, c, g, or t
  misc_feature (3734)..(3736): n is a, c, g, or t
  misc_feature (3740)..(3741): n is a, c, g, or t
  misc_feature (3743)..(3744): n is a, c, g, or t
  misc_feature (3746)..(3754): n is a, c, g, or t
  misc_feature (3756)..(3764): n is a, c, g, or t
  misc_feature (3766)..(3768): n is a, c, g, or t
  misc_feature (3771)..(3771): n is a, c, g, or t
  misc_feature (3773)..(3776): n is a, c, g, or t
  misc_feature (3778)..(3779): n is a, c, g, or t
  misc_feature (3781)..(3782): n is a, c, g, or t
  misc_feature (3784)..(3785): n is a, c, g, or t
  misc_feature (3788)..(3791): n is a, c, g, or t
  misc_feature (3793)..(3796): n is a, c, g, or t
  misc_feature (3799)..(3799): n is a, c, g, or t
  misc_feature (3801)..(3813): n is a, c, g, or t
  misc_feature (3815)..(3816): n is a, c, g, or t
  misc_feature (3818)..(3825): n is a, c, g, or t
  misc_feature (3827)..(3828): n is a, c, g, or t
  misc_feature (3832)..(3841): n is a, c, g, or t
  misc_feature (3845)..(3847): n is a, c, g, or t
  misc_feature (3850)..(3850): n is a, c, g, or t
  misc_feature (3852)..(3858): n is a, c, g, or t
  misc_feature (3860)..(3862): n is a, c, g, or t
  misc_feature (3865)..(3870): n is a, c, g, or t
  misc_feature (3873)..(3873): n is a, c, g, or t
  misc_feature (3875)..(3876): n is a, c, g, or t
  misc_feature (3879)..(3882): n is a, c, g, or t
  misc_feature (3884)..(3884): n is a, c, g, or t
  misc_feature (3886)..(3887): n is a, c, g, or t
  misc_feature (3889)..(3890): n is a, c, g, or t
  misc_feature (3893)..(3893): n is a, c, g, or t
  misc_feature (3895)..(3895): n is a, c, g, or t
  misc_feature (3898)..(3899): n is a, c, g, or t
  misc_feature (3901)..(3901): n is a, c, g, or t
  misc_feature (3905)..(3907): n is a, c, g, or t
  misc_feature (3909)..(3914): n is a, c, g, or t
  misc_feature (3917)..(3917): n is a, c, g, or t
  misc_feature (3919)..(3920): n is a, c, g, or t
  misc_feature (3923)..(3925): n is a, c, g, or t
  misc_feature (3927)..(3929): n is a, c, g, or t
  misc_feature (3932)..(3935): n is a, c, g, or t
  misc_feature (3937)..(3937): n is a, c, g, or t
  misc_feature (3939)..(3944): n is a, c, g, or t
  misc_feature (3946)..(3949): n is a, c, g, or t
  misc_feature (3951)..(3955): n is a, c, g, or t
  misc_feature (3957)..(3957): n is a, c, g, or t
  misc_feature (3959)..(3962): n is a, c, g, or t
  misc_feature (3965)..(3973): n is a, c, g, or t
  misc_feature (3975)..(3993): n is a, c, g, or t
  misc_feature (3997)..(4000): n is a, c, g, or t
tcctggccccttgcaatgaccaggcgcgagaaatccccgggggtctggaaaatgcgttcaactcgcacggtcagttccatgttggtggattcgatacgaccggccggcacctcgatattctcgcgccgcagggctgatgccacatcagtgactgtcaactggcgggcagcgagggcctgccggtcaagccagacgcgcatcgcgtagccgccgttgccgttgatctggacattggcaacgccgtcgataatggcaaactggtcgaccagaaagcgattggcatagtcattaagttcgaggaaattcagctgcgtgctacgcagattcaggtactggataggacgcgaatcattatctgccttggagatttgcggagggtccacatcctcgggcaatgcctgcgtgatccgggagattttctccctgatgtcattggcgcccacttcaatgtcataacccacattgaattcaaccgagacactggcactgccgtcccggctggatgacgtgatactggcaatcccttcgataccattgatctggtcctcgagaagttgtgtgacctgggtttcaaccacctcggctgatgccccgggataggaggcgctgatggatactaccggtgaggaagtatcgggatattcacgcaggggcagttccaggaatgagagtaagccgaagcataccagcagcaagctgatgacagtggcgaaaaccggacgttttacggaaatatcggaaagaatcatggcgtctcaaatcaggaagaaagtgatcaaggagtcctcaggaacctgagcgtgccatatctggctgggcggcattgcttgccatagaggtgacgctgtcactggtcatgatgctgactttctgaccgggacggaccttgttcactccgcggctgatcacgcgatcacccggcgtcaggccggacagaatttccacgacaccagggcggcggcgccccaactcgacttttacctgttgcacttggttattgtcatccaccacgtagacataggcgttaccctggctaacgatggcggaaagttccggtactaccatggagagttgctcattcagctccatttcaaccgtcattaacatccctgggcggagcaggccttccgtattgttgatatgggcgcgcagggagacagaacgggtgaccgggtcaatgcgtgagctgaccacgcgtacttcaccctcaaaaacacggtcaggataggcaatggttgaagccaagattttctggccggtacccaactgggccaggtgtttttccggtacagtgaaatccagcttgatgaacgagatatcatccagcgttgttatcaccgtgtttgccgttgccagggtgccttcactgacgttgcgaaaacccagnacaccggtgatgggcgcccggacaatacgatcttccatggccaccatgacaccttccaggcgtgcatcagccatttccatggccgcttttgctacatcaaggtcggtacgtgccacgagactgcgaccatagagttcctcgatgcggttgaactgacggcgggcttcctcggccccggccagcgcttcgtcgagccgggcggcctcggattcattggtgagttccaccaggatatcgccctgctggacaaagtcgccatcctcaaagcgcacctggctgatggtgtctgaaacctttggcaccacgtcaacagactcgttggctacggccgtagcgatggtctcgacccgctcggtgatgcgctgcatttcgaccagggtaacttcgacctgggtctcacctccccgggctccaaaagggccacccatcgcaccggcagaatcctgcagggtgcgatcgaccacgaagtagataaccagggcgagagccaggacgaaaaagataacgatgggatgacgcttgataaaagccactgttttgctccggtaagctaaagtgccagcaagaaggttctncaacatnacgcagattacaatnngctttgtacgcaaaccggtgcttgccagattcaaaacctcacggtctgggaggcaaattcacgaaatttcacatttcaaacatggtgtccggcaaaatagccggcgctggcaaaggcttgaacaagcccgaaagtccgttaaaagcccagacgcaatttgtcgccctgtcttccgggacagagcgattcaagggaagcagctaagggaggacattgagactagtggtgggcccaccagggtaaacccgagcgatgtatttgacgcgacagcgtcaggagaggggaacgcccgcaatctgtgattgcgggctggacagtccttgaggcacgcgcatttttccaaagggaaaatggtgggcccaccaggactcgaaccagggaaaacgaattatgagttaatttgttngactanatacttatntnannnnatgnnannnnnnnnnantntnnnaantntnannnanntnacnnnnnnnagnngganganntngangnnnatntnacgnannnttnngnagccgnaaatngnctcgttccnnntnanctnntttnngnnancnncangnngaaaanagttaaagncnaaanttngtnaggnncntgggnaacnctcnggnannaaannnnnannnatnncnngnanntncangntnntnanngnnntnttggncnntttnntngnnttttttgnntnnnnnnnnaannnnnnnnnnnnngntttnnaanntnntgnnantcatnnnaagncnggcgattaaaccctgcaggatcatgctgcctgtgcctggnnngnnnnngncnnaannngnannggcnnnnntngcnntaancnnnannnnaaaaaatnnnannaaaaannancnnaannnnnnnnttttgtnnnnntnnnnnannncnnnntnnnnngtgnttttttnnnnnntnnngntnntatnngnnttggnnanttngaannnntannnngnttnnannnnnnnntnnnnnnncttnnnnnaangnatnnnnagngnaannnnnngaaacnanttnancnnnnttnnnnnncccnngcgntttnnnntnnnntnnaannnncnaannnnnccnanngnncannnnngccnacnnggcnnannangnccacnnannnaannnggnnnnntnngngncctnngtnaaaannnnntnnnttntnnnccntgannnnnnngnannnnnggntttngnngnnnaaantgntnanagggnanncaggcnnnnnnngntncngnanntnncntatccntnnnanngntcntnnngcnnnntnaannannnnncntnnnnnnccntgnncnnccngngnnannnnnngaaannngnaangnnnnnnanggnnnncanngnnnncancnncnannacntcgnngncaancnnnnnttnntnnnnnccntnnnntncnntttttnngagnangnnaagcnnnggntnncntnnaannnntncnnccagnncttnntnnnncnnttngcgctnntnncnntnnnnnnnntnngnnnnnnnnngttatcannnntcnnnatngnngncattcnnnncnncctnnccnnnnnnnnnnnncngnggnnancnnggtncngnnnttnncngtnnncccnnntnnnncnnnntncnnntnccnaaaannnnnannnnnnnnnnncngntganncaaaaaaggncnaannnngncannnnngnaanntnggtttnnnagnnnttnnagnnnntatngnnagtnnngnnagntnnntganntnncnnnnnnnnnannnnnnnnngnnngantnnnncnncnncnncannnncnnnnatnannnnnnnnnnnnnanngnnnnnnnngnngccnnnnnnnnnnaatnnntgnannnnnnnannnagnnnnnncangnnctnnnngncnntnncgncnatnncngccnnntnnnnnnganannggnnnannnggnnnntncnnnnnntnnnnannnnntngnnnnggnnnnnnnnnannnnnnnnnnnnnnnnnnnaagnnnn

SEQ ID NO: 357 - DNA, 4000 bp, Escherichia coli
  misc_feature (103)..(103): n is a, c, g, or t
  misc_feature (244)..(244): n is a, c, g, or t
  misc_feature (830)..(830): n is a, c, g, or t
  misc_feature (1141)..(1141): n is a, c, g, or t
  misc_feature (1237)..(1237): n is a, c, g, or t
  misc_feature (1985)..(1985): n is a, c, g, or t
  misc_feature (2268)..(2268): n is a, c, g, or t
  misc_feature (2355)..(2355): n is a, c, g, or t
  misc_feature (2357)..(2357): n is a, c, g, or t
  misc_feature (2492)..(2492): n is a, c, g, or t
  misc_feature (2837)..(2837): n is a, c, g, or t
  misc_feature (2934)..(2934): n is a, c, g, or t
  misc_feature (2941)..(2941): n is a, c, g, or t
  misc_feature (2960)..(2960): n is a, c, g, or t
  misc_feature (2963)..(2963): n is a, c, g, or t
  misc_feature (2987)..(2987): n is a, c, g, or t
  misc_feature (2996)..(2996): n is a, c, g, or t
  misc_feature (3012)..(3012): n is a, c, g, or t
  misc_feature (3047)..(3047): n is a, c, g, or t
  misc_feature (3157)..(3157): n is a, c, g, or t
  misc_feature (3229)..(3229): n is a, c, g, or t
  misc_feature (3238)..(3238): n is a, c, g, or t
  misc_feature (3265)..(3265): n is a, c, g, or t
  misc_feature (3268)..(3268): n is a, c, g, or t
  misc_feature (3272)..(3272): n is a, c, g, or t
  misc_feature (3277)..(3277): n is a, c, g, or t
  misc_feature (3285)..(3285): n is a, c, g, or t
  misc_feature (3293)..(3293): n is a, c, g, or t
  misc_feature (3297)..(3297): n is a, c, g, or t
  misc_feature (3307)..(3308): n is a, c, g, or t
  misc_feature (3315)..(3315): n is a, c, g, or t
  misc_feature (3318)..(3318): n is a, c, g, or t
  misc_feature (3323)..(3323): n is a, c, g, or t
  misc_feature (3325)..(3327): n is a, c, g, or t
  misc_feature (3345)..(3346): n is a, c, g, or t
  misc_feature (3348)..(3348): n is a, c, g, or t
  misc_feature (3350)..(3350): n is a, c, g, or t
  misc_feature (3362)..(3363): n is a, c, g, or t
  misc_feature (3367)..(3367): n is a, c, g, or t
  misc_feature (3370)..(3370): n is a, c, g, or t
  misc_feature (3376)..(3376): n is a, c, g, or t
  misc_feature (3378)..(3379): n is a, c, g, or t
  misc_feature (3385)..(3385): n is a, c, g, or t
  misc_feature (3389)..(3389): n is a, c, g, or t
  misc_feature (3391)..(3391): n is a, c, g, or t
  misc_feature (3394)..(3396): n is a, c, g, or t
  misc_feature (3399)..(3399): n is a, c, g, or t
  misc_feature (3402)..(3402): n is a, c, g, or t
  misc_feature (3404)..(3404): n is a, c, g, or t
  misc_feature (3406)..(3406): n is a, c, g, or t
  misc_feature (3409)..(3409): n is a, c, g, or t
  misc_feature (3411)..(3412): n is a, c, g, or t
  misc_feature (3419)..(3420): n is a, c, g, or t
  misc_feature (3422)..(3422): n is a, c, g, or t
  misc_feature (3428)..(3428): n is a, c, g, or t
  misc_feature (3431)..(3431): n is a, c, g, or t
  misc_feature (3433)..(3433): n is a, c, g, or t
  misc_feature (3436)..(3436): n is a, c, g, or t
  misc_feature (3440)..(3440): n is a, c, g, or t
  misc_feature (3443)..(3443): n is a, c, g, or t
  misc_feature (3445)..(3445): n is a, c, g, or t
  misc_feature (3448)..(3450): n is a, c, g, or t
  misc_feature (3454)..(3454): n is a, c, g, or t
  misc_feature (3456)..(3456): n is a, c, g, or t
  misc_feature (3460)..(3461): n is a, c, g, or t
  misc_feature (3463)..(3469): n is a, c, g, or t
  misc_feature (3473)..(3473): n is a, c, g, or t
  misc_feature (3476)..(3476): n is a, c, g, or t
  misc_feature (3480)..(3481): n is a, c, g, or t
  misc_feature (3485)..(3485): n is a, c, g, or t
  misc_feature (3491)..(3491): n is a, c, g, or t
  misc_feature (3495)..(3495): n is a, c, g, or t
  misc_feature (3497)..(3498): n is a, c, g, or t
  misc_feature (3507)..(3508): n is a, c, g, or t
  misc_feature (3510)..(3511): n is a, c, g, or t
  misc_feature (3513)..(3517): n is a, c, g, or t
  misc_feature (3519)..(3521): n is a, c, g, or t
  misc_feature (3525)..(3525): n is a, c, g, or t
  misc_feature (3527)..(3530): n is a, c, g, or t
  misc_feature (3532)..(3534): n is a, c, g, or t
  misc_feature (3536)..(3536): n is a, c, g, or t
  misc_feature (3540)..(3540): n is a, c, g, or t
  misc_feature (3542)..(3542): n is a, c, g, or t
  misc_feature (3544)..(3544): n is a, c, g, or t
  misc_feature (3547)..(3549): n is a, c, g, or t
  misc_feature (3551)..(3552): n is a, c, g, or t
  misc_feature (3559)..(3564): n is a, c, g, or t
  misc_feature (3566)..(3567): n is a, c, g, or t
  misc_feature (3570)..(3576): n is a, c, g, or t
  misc_feature (3580)..(3582): n is a, c, g, or t
  misc_feature (3584)..(3585): n is a, c, g, or t
  misc_feature (3593)..(3594): n is a, c, g, or t
  misc_feature (3599)..(3599): n is a, c, g, or t
  misc_feature (3601)..(3602): n is a, c, g, or t
  misc_feature (3607)..(3607): n is a, c, g, or t
  misc_feature (3609)..(3609): n is a, c, g, or t
  misc_feature (3613)..(3613): n is a, c, g, or t
  misc_feature (3615)..(3615): n is a, c, g, or t
  misc_feature (3617)..(3619): n is a, c, g, or t
  misc_feature (3624)..(3625): n is a, c, g, or t
  misc_feature (3627)..(3627): n is a, c, g, or t
  misc_feature (3630)..(3630): n is a, c, g, or t
  misc_feature (3635)..(3635): n is a, c, g, or t
  misc_feature (3638)..(3638): n is a, c, g, or t
  misc_feature (3643)..(3643): n is a, c, g, or t
  misc_feature (3645)..(3647): n is a, c, g, or t
  misc_feature (3649)..(3651): n is a, c, g, or t
  misc_feature (3655)..(3658): n is a, c, g, or t
  misc_feature (3660)..(3660): n is a, c, g, or t
  misc_feature (3666)..(3666): n is a, c, g, or t
  misc_feature (3668)..(3669): n is a, c, g, or t
  misc_feature (3671)..(3671): n is a, c, g, or t
  misc_feature (3673)..(3673): n is a, c, g, or t
  misc_feature (3675)..(3676): n is a, c, g, or t
  misc_feature (3678)..(3678): n is a, c, g, or t
  misc_feature (3680)..(3684): n is a, c, g, or t
  misc_feature (3687)..(3689): n is a, c, g, or t
  misc_feature (3692)..(3695): n is a, c, g, or t
  misc_feature (3697)..(3697): n is a, c, g, or t
  misc_feature (3700)..(3700): n is a, c, g, or t
  misc_feature (3703)..(3705): n is a, c, g, or t
  misc_feature (3708)..(3711): n is a, c, g, or t
  misc_feature (3713)..(3714): n is a, c, g, or t
  misc_feature (3716)..(3718): n is a, c, g, or t
  misc_feature (3722)..(3722): n is a, c, g, or t
  misc_feature (3724)..(3725): n is a, c, g, or t
  misc_feature (3732)..(3733): n is a, c, g, or t
  misc_feature (3737)..(3737): n is a, c, g, or t
  misc_feature (3739)..(3740): n is a, c, g, or t
  misc_feature (3742)..(3743): n is a, c, g, or t
  misc_feature (3745)..(3748): n is a, c, g, or t
  misc_feature (3750)..(3760): n is a, c, g, or t
  misc_feature (3766)..(3766): n is a, c, g, or t
  misc_feature (3768)..(3769): n is a, c, g, or t
  misc_feature (3772)..(3772): n is a, c, g, or t
  misc_feature (3774)..(3775): n is a, c, g, or t
  misc_feature (3777)..(3777): n is a, c, g, or t
  misc_feature (3780)..(3780): n is a, c, g, or t
  misc_feature (3782)..(3785): n is a, c, g, or t
  misc_feature (3789)..(3790): n is a, c, g, or t
  misc_feature (3795)..(3795): n is a, c, g, or t
  misc_feature (3801)..(3803): n is a, c, g, or t
  misc_feature (3805)..(3805): n is a, c, g, or t
  misc_feature (3808)..(3808): n is a, c, g, or t
  misc_feature (3810)..(3810): n is a, c, g, or t
  misc_feature (3813)..(3815): n is a, c, g, or t
  misc_feature (3817)..(3818): n is a, c, g, or t
  misc_feature (3821)..(3821): n is a, c, g, or t
  misc_feature (3823)..(3824): n is a, c, g, or t
  misc_feature (3826)..(3826): n is a, c, g, or t
  misc_feature (3830)..(3832): n is a, c, g, or t
  misc_feature (3834)..(3834): n is a, c, g, or t
  misc_feature (3837)..(3837): n is a, c, g, or t
  misc_feature (3840)..(3841): n is a, c, g, or t
  misc_feature (3843)..(3843): n is a, c, g, or t
  misc_feature (3848)..(3849): n is a, c, g, or t
  misc_feature (3855)..(3855): n is a, c, g, or t
  misc_feature (3857)..(3858): n is a, c, g, or t
  misc_feature (3863)..(3863): n is a, c, g, or t
  misc_feature (3865)..(3865): n is a, c, g, or t
  misc_feature (3867)..(3867): n is a, c, g, or t
  misc_feature (3869)..(3873): n is a, c, g, or t
  misc_feature (3876)..(3876): n is a, c, g, or t
  misc_feature (3880)..(3881): n is a, c, g, or t
  misc_feature (3885)..(3885): n is a, c, g, or t
  misc_feature (3888)..(3890): n is a, c, g, or t
  misc_feature (3892)..(3892): n is a, c, g, or t
  misc_feature (3894)..(3894): n is a, c, g, or t
  misc_feature (3896)..(3896): n is a, c, g, or t
  misc_feature (3900)..(3905): n is a, c, g, or t
  misc_feature (3921)..(3921): n is a, c, g, or t
  misc_feature (3923)..(3926): n is a, c, g, or t
  misc_feature (3928)..(3929): n is a, c, g, or t
  misc_feature (3933)..(3934): n is a, c, g, or t
  misc_feature (3937)..(3937): n is a, c, g, or t
  misc_feature (3941)..(3941): n is a, c, g, or t
  misc_feature (3947)..(3949): n is a, c, g, or t
  misc_feature (3952)..(3953): n is a, c, g, or t
  misc_feature (3955)..(3955): n is a, c, g, or t
  misc_feature (3957)..(3957): n is a, c, g, or t
  misc_feature (3960)..(3966): n is a, c, g, or t
  misc_feature (3973)..(3973): n is a, c, g, or t
  misc_feature (3979)..(3981): n is a, c, g, or t
  misc_feature (3984)..(3984): n is a, c, g, or t
  misc_feature (3986)..(3986): n is a, c, g, or t
  misc_feature (3994)..(3994): n is a, c, g, or t
taaacttttagcaaaattcataaactcatctaatgagggtatatttatattttctcttgttgatgtatgaattgttttttcttctaatattttaggttgaatntcatttataatagggctttctatcatttttttgaatggttctgattcttgacttactttatttttaatatttaaagtctctttttggagtgattcttgtagtaagaaagaaatatcagttattattctataaatacttggnaccccatttcttgtttgatactgaattaaaccaacatttcttaattttgatttaagagcattaatagttggtctagttaaagataatttttgacctattgcattatctgatattgtgaaatctttgccatcattttgtctacatttttccaatagaaaaaaatataatgcaatagcagaagctcctaatggagatttttcatttatagaccaaaatttggttgttaattcagtataattcataattcattctcttttgctataatttcaagaacttttttcttatctattacgattaactttcccacttgagatattgcgtcatctatcatcccagagtttttaattttagaagcagttgttcttgaacagcctaatatctttgccaagcctttcaatccatacacatattctttaatttcttttttttgcccagttactaccttatgcaactctatatattctgccaccgtaaggtgtaataattgagtattaggattgatgtccatagtatttataatttattattaaataactctaaagctttttctctatcaataattatttttctgcctctttggattatngcttcatcaaatattccttgactttttaatcgagaagcgtgggttttagaacaccctattaaatctgctagaccattaattccatatacatactcttttttttctataacttcttgttctggattattaggtatttcggtatatttctgaaatgcttgtaaaaaatcaccaagagtcagttgccatattggagtgtctctatcaatattcatttttatgattttaagtcggttatcattacttccattttacattccaaagaatacttattattcattgctttttcatagagaatatctataattctgtcntcaaaggagtttccactcatcactctaattattttattataagaaattttattttctttggaaacatttgtcaaatcccctctataaaagtatttncgaagttcttctacaaattgtttttgtaatatttttcttctttctgctattctttcaggggaaacttcaatagaataataatttagactttgctctctgagccttttttcacattctataaagtatattcttgcttgttttcctttttcgtttctttccagcattgaaagttcttttgccatatctattgaaagaaggtattctttcattgggcgtcctccttttgggttttttccaatttcggaaaaaactacatagtcttgattttcaatgaatccaaattgctcaatacgctcatttatccatgctccaaaaacttttcctacctccaaaaacttatgtaattctctcgctgaaataaaagaatttccattgtgttgtgtaattttaattaactctttcatttttagattttttaggttttactgatgaattatataactgataatttttaaaaatctcttcttctgtaaagccttgttctttatagaacattaccgcttcccaaagggttagattcctgctattccttcttgctaaaccaagaactgattgttgctgatttccaagtctttttgctaattctatactgaagttattatcattcagtattttttcaatgatggtttcacttacttccataatttttatatatttgttgttaatttgtatttaaaatataactatatttatattgcgaatatataatattttatataaaatactactatttatatactttattatntaaatattattgtaaataactgattgtcagaaacaaaatttttatgaaagatagattaataatttttttagaatatttaggcattggacaaaataaatttgctcaaaatgtaggtttatctgctggatatgttaataatttaggagaaaatatcagctctcgaagtttaaataagatattgaatgtgtaccctcaattaaatgaaaaatggcttttaacaggaaaaggtgaaatgattaaaccaataaatacgcaaaaagcaaaaggaaataatagtataaanagtaatataaataacattgaaggaaatgtgacaatttcccacaatgatttttcaaatttattagagcttcaaaaagggtatcaagangnacaaaaggaattaaatgaaagattaaaaacaagtcaaaaacaaatagatacattattggaaattctaaagaataagtaattatgaaaaagattctccttgtagcattaacatttcatgctatctttttttctgcncaaaagaaagataattgtacagatataatgaagagatgggatggttgggatatttataaaaaacctaccaccgagagtgtaaaaaaatgcatctccaaagatgaaagaaaaattaaaatagaagttataaataaaggagattataaagacttataccaaattctatatttagagtttaaaaaagtaaacaataatgatttctctcctattctgaaatattccgaacacacaccaaatattgtagtggatgaaacttatgataaaataaattggagaggagaaggaggtactattaatgaacacactatatttgtttttcaaggatatagtggagtagaaagcgancccaatatacctttaaaagaaatagaaatttacgaaaccacagctcctgttttatctggaatattaagaataatgggaacatatcgcaaagattttnaccatantatacctacaaatcttacnaanacaataaatatatattcagatggnaaattattnatttcaaaagaatacnaatttagtgaacttgaaagaacaggtggaataacnatagaatttaatagtaaatgataaaataccacgcacaatttttattagacaaagaaaaagacaaccctactgctaaacttcgttataggataaaatggagtggatttatngttgcttttaatgtaggctatagaatagaagttgataagtggagtaaggaaactcaacgctgtaaaataaanactacacanggtgacaagaaagttcctgcaaatgtnatnaatngtaanatacaaanatatgaanaggngtgtgaaaanntatttanaanatttnannnagaaaataaaatacctanngntnatgaatttagannaganttnaataangnnataggnaaananaannnaantanananganannttatttnntntttttnatnanttnattnaanangannnagananaaannannnnnnntttngancaannttanaaatgnaagnanntaaaaaacnntnncnnnnntnnnatantnnnntnnnantatntnanttnnntnnagaaaannnnnnannatnnnnnnnatannntnngaatgaannaaagnannaaaantnaacnantnnnaaaannanatnttctntanaatgntnnntnnnatgnnnngntaaaangnnananannantnnnnntannnttnnnntnttnaannnaannnnannannnacanannaaaaaannatantnntnncnnnntnnnnnnnnnnnaaattnannaantnnanaantnnnnaaannaaaanccattnnnanaananaannnannttntnntntttnnntnttntanngnattgnnattttnanntgttntnantnnnnnaanaaannatantannnangnanatannnnnnttactacaattaaaangnnnnannatcnnatnatanaattannnaannanantannnnnnntttaganaaatannntananataaaatntttgat

SEQ ID NO: 358 - DNA, 4000 bp, Escherichia coli
  misc_feature (1956)..(1956): n is a, c, g, or t
  misc_feature (1959)..(1959): n is a, c, g, or t
  misc_feature (1962)..(1963): n is a, c, g, or t
  misc_feature (1968)..(1969): n is a, c, g, or t
  misc_feature (1980)..(1981): n is a, c, g, or t
  misc_feature (1984)..(1984): n is a, c, g, or t
  misc_feature (1986)..(1987): n is a, c, g, or t
  misc_feature (1992)..(1992): n is a, c, g, or t
  misc_feature (2007)..(2007): n is a, c, g, or t
  misc_feature (2016)..(2017): n is a, c, g, or t
  misc_feature (2019)..(2020): n is a, c, g, or t
  misc_feature (2022)..(2022): n is a, c, g, or t
  misc_feature (2029)..(2029): n is a, c, g, or t
acagtcagcatcaacggcagacgcgtcgaggcggtagtcggccgctccctgttcgagtgtgccgacagtctggaggtgaaggtcccctcctcatgcccaagagccggcacctgtcacgagtgcatcgtgcaggttctctccggcatggacgccctggagctacggacggaggaagagagcttcctcggtggcgacttccggctcgcctgtcaggcacggattcgtacagccgaccaagacgtggtcgccgcgtcgctcaggcggcaacagcagattgtagccgagggatcggctgatctccgggagcactgggaacttgcgccctcgactcgacgggacggtgccaacgtggttagagacggccagatcatcgacgactaccgcggcgcgatcttggggctcgcggtcgatatcggcaccaccacggtctccgcctcgctgatggacctcgagagcggtgcaaccgtggccctgacctctttcgagaacccgcagaccttcggcggcagcgacgtgatgcacaggatccactacgacggccagcacccgggcgagctgcagcgcgtgttggtcagcttcctcaatgccgagctgaaggcgatgcctggcgaccgggatcagctctacgaagtcatggtcgtcggcaacccgaccatgcgcgatctgttcctcggtctcgacgtgcagagcctcggccagaagcccttcaagtcgcagacggaacacgaccgcgacgccggccgcgcctcctccactgccgtcaccaggaaacccaaagacctcgggctgcggatgagcccggcgggagcggtcttcggcgctccgctcattgcctgccacgtcggcgcggatgccgccgcgtgcatcctcgccactcggctgcatgaggcggttgagccggcaatgatcatggatatcgggaccaacaccgaggtcatcctgggcaacaaagaccgcctgctgtgcgcctcctgtgctgccggaccggccttcgaaggcggcaagatcaggtacggcatgtcgggaattgagggcgccatccagtcagtgcggctccgcaacgggcatgtcgagatctcgaccattggcgacgtgcaacccaccggcatttgcggctcaggtctcatcgacctgatcgccgaactggtgcggcacggcagagtgaacggccgcgggcgcttcacgggtgacgcgaaggagtgcgttatcgacgaagccaccggcatcaccttcgccgagtccgatgtccaggagttggctcaagccaaaggcgcgacgcacgccggcacctcactgctcctcaagcacttcccactgccgttggcggacctgaccacgctctacctcgccggcggcttcgccaactacatcgacgtagacaactcccgactcatcggcctcacgcccgacctcccgcccgaccgcctccacaagatgggcaacgccgccgcagagggcgccaaggaactgcttctctcagtcaacaagcgtcaggaactggaccgggtcgtcggcagcatcgagcacctcgaactcgagagtgacgaggacttcttcacctacttcgtcgaaggctgcctcttcggcgagaactgacgctctcccctacccggcgtcttctccgtctctgccagcctgactcccgtccgttagcagtgacggagaatctgccctacgtcgcgcaccacctggccgggcgcctattgcgtctcagcagcatggatagcaggctggcgatcacttccgtaagtctcgctcgccggcaggggggcaagcccccctgcaccccccttggctccgggcttgctgcccggtccgctgcctcccggctccgccgggaccgcgctccgcgctggcagccgtcccgtgccgccgcccttcgccctgcttatgctcaagggaatggaacggaggccctcgttgaactgggggcgagaacgaggcggaagccgaggncgncgnnccggnngcccggcccgnnccngnngcggnacgcgcagcggcagncgcgagcgnngnngntccaacngccgccgcggacgacgcggtccgcgcccccttcagccccctcatccacccaagggctgccgtcctccggcgccccgtcgtagttgttgtgccagtgatcctcgcaccattcccagacgttgcctaacatgtcatacagtccccagtggtttggcagcttgcccttcaccgggtgtgtggtccggccggagttctcgccgtaccacgccagcctgtcgagattcgggcaccggccgtccatgctggtcagctcctgtccctcttcttcgccgtagggggcgtacagggcgccgccggtccccgcgcggcaggcgtattcccattcggcttcgctgggcaggcgggccacgtcctcgcgcggctcgggcagcagcccggtcagtcgctcgcagaacgcccgggcatcggccgagctcacctgttccacggggcgtttgtcagcttccttgggtccctccgcaaagcggctggggttcgcgccgctcaccgccttgtagaattcctgcgtcaccggcgtctcgcccagccagaagccgtcgtcgattctgaccccgtgcaccggcccttcgtcggaataccgttccgcctcgccttgcggcgaccccatgtcgaagcggcccggatcgatccagcgcagccggtggacgacctcgccgagaaccagctcggcaaacacgccgtaccgatcggcgccgaagccgcccgcccaggtgggcggttcggggggagccagcgggatgcgcaagtgcttgttcacagcgtctcctcgccgggcgaaaggggagaaggcggccgggagccttcgtcgcgggcctccgcccgcgctaccaacacccggccgccgctcggtgcttcgccccgccgggccgtcgggcccgacgggacagggtcactgcccggttcaacggggaactcatccgcaatcaacttgattgtggatgagttccaggacctccgtccattcccttgagctgggggcgagaacgaggcggaagccgaggttgtcgttccggttgcccggctcgttcctgttgcggtacgcgcagcggcagttgcgagcgttgttgttccaactgccgccgcggacgacgcgcgtcgcgtcgaggatgacgcggttcgcgcccttgggcagtgcccgaaatctctgctcagcagcttccggcgcagcggtgcgccggttgtccagtccgtgcgcgcgaggatgctgcgggcgatggccgccgcggcaccctcctcgatccgctctcgcctcaacgcctcttcacacgccttgagccgccggcgggcgcgccgacagctccgcgaactgaggcggagcgtgcccgggaagaccacgaacccgaggaacggcagcccggcctcggagcggttgaggcagggcgatttgaggtccaagtcaaggcgggtctcacaatactctcggagggcgcgctcccaccgcagcagttcgcgcgtggattgtccccagaccacgatatcgtccatgtagcgcacatagcccggggcgcacagcacctctttggcatagtgatccagcccgctgaggtagtggttcgcgaagtactggctggtcaggttaccaatgggcacgcccgccccggcatgacggcacccccgtagcgtagtctcttgtgggtgtctcccgccagccgccggctcggcgcaccggcgacgcccacaagaggctacactacaaggtcccaacggcccaagctcgtgtgcgccacagtgccgagaggcacccaggggcaagcccgtggccgcgcaacccgcggcactcgcgtagccatcgatgaccctgtcaagcaacgccaacagcggcggctccttgaacagccgggccaggagcgccttgagacgctcgtgcgagagactgtcgaagtatttgcggacgtctagcttcaggtagaacgggaactgccgcgcgaaagccgccgcgcgttccagcgccgctagcgtccccttgccaggc

SEQ ID NO: 359 - DNA, 4000 bp, Escherichia coli
  misc_feature (42)..(42): n is a, c, g, or t
  misc_feature (45)..(45): n is a, c, g, or t
  misc_feature (66)..(66): n is a, c, g, or t
  misc_feature (330)..(330): n is a, c, g, or t
  misc_feature (1997)..(1997): n is a, c, g, or t
  misc_feature (2120)..(2120): n is a, c, g, or t
  misc_feature (2888)..(2888): n is a, c, g, or t
  misc_feature (3461)..(3461): n is a, c, g, or t
  misc_feature (3506)..(3506): n is a, c, g, or t
aacataacttcagagaagataaaccaagccattccataaacntangatgtttttaattgattactntcaagacctgctaaatgttcctttatgacttgtctgaaccagaaaaataaagttgtaaataaagaggcaaaaccagcatataaaatataaacagaattgctatctgcatcgccgaggctattgatggtgctgctagctcccattactaataaaaacaaagagaaagccataaaaattgggaatctactttggtctggtacgtaatagttttgtgtactcatcttttaatgctccatttcgtgatggtctttatgatcatgatgngcaagagcctcatcatcatattcagtaatatcaaaaattgtataagaaagaataatgttttcaatagcttcaggtaactcgtttgatactagaagttttactggcaatagcgcctcttcgcctggcgctaattcttgttgttcaaagcaaaaacattctaacttttttaagtgagccgctgcatttgatggagctacgctcggaacagcctgagctgtcatttttttatctgtagtgttctttacataaaaagttgcggtgtaatatttacctgttgaaattgtcataactttttcagagggctcaaaagtccatggcatgttctcgttgtttgttgaaataaactgtaagccaagaggtctgccttcttctattacaagcttgtcagcattttctgattgaaatacttttccattaattccagttacttcacaaaaaacatcatataaaggcacaagcgcaaacccaaaagcaaacattaatggcactgcaattacgagtcgccttaaggtttttttagcctcagaattcattaatcaacctttggaggggttgtaaatgtatgataaggagccggcgatgctaccgtccactctaatcctctggcaccttcccaaacttgatctgttgcttttttaccacccattactgttttgacaacaataaataggaatagtatttgagacactccaaataaaaaggctccaactgtagataccatattccaatcagcgaactgaagagcgtaatctggataccttcttggcatgccagctaagccaataaaatgttgaggaaagaaagttacattaactccaataaacgaaagccagaaatgaagttttcctaacctttcgtcatacatatttccacaccattttggaatccagtagtacacagcagccataattgaaaaaatagctccaggtactaatacgtaatgaaaatgggcaacaacaaaatacgtatcatgatattgaaagtctgctggcgtaattgcaagcattaatccagagaacccgcccatggtaaataaaacaacaaatgctatagcaaataacattggtgtttcaaaagttattgaacctttaaacattgtagcgatccaattaaagactttaacaccggtaggcaccgcgattaacatcgtagcccacataaaaaataactcagcagcaagaggtaaaccaactgtaaacatatgatgtgcccatactacaaaagatagaatggcaatcgaaagcattgcccaaaccatagaagagtagccaaaaagctgctttcttgagaaggtctctattatatgagaaacgattccaaacgctggcaggatcattatgtatacttctggatggccaaagaaccaaaaaatatgctgaaataaaacaggatcaccgccacccgctgcattaaagaaactggttccaaaatgaatatccataagcatcatagttacagctcctgcgagaactggcataacagcaattaacaaatatgctgttattaaccaagaccatacaaaaagtggcattttcatcaaagtcacgccaggggctcgcatattcatgattgttacaacaacattaattgctcccataattgatgaggctcccattatgtgaactgagaatataaaaaatgttacgctgggcggcgcataggttgtngacagtggtgcataaaatgtccaaccaaaattaggtgccccaccttccataaataaagaagataaaagaataaaaaaagcaaatggtagtatccaaaaacttaaattgttcattctaggcagngccatatctggcgctcctatcatcattggaactaaccagtttgctaaaccaacaaaagcaggcataactccaccaaaaatcattattaggccatgcagtgtaatcatttgattatagaattctggttctactatctgcatgcctggctgaaataattcagctctaattaccattgccattgctcctcctattaggaacattgcaaaactaaaccaaagatataaagttcctatatctttatggtttgttgtgtaaagccatctagttaaacccttagcaggcccatgatgatggtcgtcatgatgattttctattactgcgctcatattttctttctctctttaatattaaatctttggttttttgtaatctacaatatcttttggaacaacgatttcaccgtcaccattttctttattgccccatgattgacgtgtatatgttatgacggctgccagctctacttctgaaagataactaaatgaattcattgcggctccttgaacaccttccataagaatttctatatttctttctttattatttaaaactacgtcgctaccagcaagggctggaaatatcccaggaataccctgaccatttgtttgatggcatgctacacaattaactgcataaacactttcacctcttgcaactaattcttctgctgtccaatctttagttgttagctcggccatcttcatagctgcttctttctttccggaaacccattcatcatattcgttttgctcaactacctttactacnataggcataaaaccatgatttttaccacatagctcagtacatttgcctctataaatacccggcttatctactttggtccaagctgtattaacaaaacccggtatggcatcttgcttgatagcaaaagcaggcatccaccaagaatggataacatcattagctgttattaaaaatcttacttttttacctacaggtattaccaccatttcatcaacttcttgtaaatagttttcgcccttgggaacaaggttgttgatttcatccatatcagttgatagattggagaaaaagcttacatcatcttctaaataattatattgccatttccactgataacccgttacctgaatatttagatctccagcctcatcatcatatatttttaccagtgttttagatgctggaattgccatagctattaatattaaaaatgggattattgtccatgcaatttcaactttatgattttcatgaaaagaagctgcaactggattcttcttctttgtatgtgcatacatcgaataaaacataacaccaaaaaccacaacgccaattgctacgcatatccaaaanataagcatgtgcagttcaaaaacttcattactaatatcagttacncctcttgtcatattgagagcgaaccaatctgccttcatgggagctgaaaaaattagaagcgcagacataattttaatctgcaaattttgtaaatatttaaaagacatttctttatcctttgagtgtgctaacaaaaataaaacttatttatatacaattataaggtatatctataattaaaacaaaatatagactgtaaatttcggtgcatatgatatctttttgaagtgttttttactagcttttaggatttttataatcttgaatattaattacattaattgattgttttttgttgttgatttccttaggtctttcctctgtaaattcacacttaacacaataaattaaattgttttcagcgttgatggctatagtatctttagcactacatgatgggcatgttgctccggcaataaactgaaccattttcattctgacatgctcttaaggtcttctgatactttatctgtttctggatttacgccaaacca

SEQ ID NO: 360 - DNA, 4000 bp, Escherichia coli
  misc_feature (41)..(41): n is a, c, g, or t
  misc_feature (1173)..(1173): n is a, c, g, or t
  misc_feature (1989)..(1989): n is a, c, g, or t
  misc_feature (2029)..(2030): n is a, c, g, or t
  misc_feature (2430)..(2430): n is a, c, g, or t
  misc_feature (2611)..(2611): n is a, c, g, or t
  misc_feature (2998)..(2998): n is a, c, g, or t
  misc_feature (3060)..(3060): n is a, c, g, or t
  misc_feature (3067)..(3067): n is a, c, g, or t
  misc_feature (3244)..(3244): n is a, c, g, or t
  misc_feature (3397)..(3397): n is a, c, g, or t
aatcttgcaattgctttctaagtttagacgcttgatagatnattgattgtctatcaggggttgcacttacggctgcagcagatggtgtaggtgctcttacatcagctacaaaatctgcaatagttgtatcggtttcatggcctatagagcttatgataggggttttgcaattaaaaataactcttgcaagttcctcctcattaaatgcccatagatcttcgattgagcctccacctctagccaatatgataacgtcacatcgattgcttgtatcggctgcttcgagagcctttatgattcttttatgggcattttctccttgaactatcgtgtcataaagaaggatatcagcaaaagggtatcttgaatttaaaactttaatgatgtcttttattacagatccatttgaggaagagatgacaccaattgtttttggagtttcagggagtgcttttttattttctaaagaaaataaaccctcagtttttaatttattttttagttggtcaaatgcaagctgaagatttccaacacctgcaggctccatttgttgcactattagttgaaagtcacccctttgttcatagagtgttggggcacctctgatcactactgacatgccattttcaggggaaaactgtattttgcgctgactaagacgaaaaaaagcacatctaatttgcccgtttgaatcctttagagaaaaataccagtgcccagaagagggtctagataaatttgatatttcaccttgaacccagcaatgaggtatgttttgttcaattgaatttctacataattttacaaaatctgaaacagagtaaatttcatcaagatcaaacatcagctttgagatgaacaaacaccgcccctgtaccgcccatatcttgagggcaagaacaaaaagctaaaacctgaggatgctgcttaagatagtgaactacttgagatttaatgatagatagaccgttatttgagtggtagcctttgccatggattatatgtataaatctctcgttagagtggaaatgaataaaccttgaaagtgactggcaagcttcttcgatcttatgaccatgtaggtctatagatggggtagagccaatatttccttgcttcatttttttaattatttttggcgacaatccaactttgaaatgaattacaggctcngagcctgaaatatttggctcgtacaaatatttatagtcttcaaaaggtttattcagtttatttttgaaaggctggtttttattattgctatccttgtcaatagttttttgttgttcaacggcatttctaaataaagatttatcgctttcatcaatcataatggtaataaattttatgtataaaaaaaccctcaaaggagggttttaattataactatgatttttgctatttagatattaacctgctaaaaaccaaattaacaatctaattttatagagctttaatttgggagataaggcgagacttttttctggcagcttgatttttatgaattaagcctttactgacagcctgatcaacattcttttgcatcactttgaagccactaatggcctctttcttatttccagcagaaattgcagaaacaaccttcttaacaaaggtgcgaactttagctcgaatttgtgaattatgttggttacgttttactgcttgtcttgcgcgtttctttgatgctgctgagttggccatattgttttatttaatggttaaattacaaaaacatgaattatagagtctcacctgtatttatgcaagtattagtttgcaccaacttaatttgctagtgatttaacgtattgaagtgtttttttcttattgagcagtaagtgccaggtttttccgccttgagatttccataaagacacagctcttatgccagctaaaagtagagcccttatatggtttgcagtgtgacggtttgtgaggtagatttgttcacccctgaccataatagtcggattgaggctgccaagngtatttttgtaaagttcagcaagtctagcaattgaattgnngtgatgaatgtcaaaaaattcctgtttattaataagactaatttcattggaaatctgatttaacaaatctggttttttcattaattttttttcaagattaattaatgctgtcgcatacaacatcacattatgcatatctattgactttttctcgaataaaaactttaaagaatcaaaacctatttttaaatcttctggagaggtgaaaatttcatcaaccgagtcgctttcattaacaatgctatttaagcttgctctattagtgtggctatcgcattgtccggttgaggcgagttggtgtactaatgctgtagattgaaatatgcttgccaatgctagggtttgttttgctgttttattcattagccttagatttaattacgcttccaccaaggcaaanatcgtcatcataaaaaacgactgactgaccaggtgttatagctctttgagtgtctttaaaatcaacttttatacaatcaccatctagcataattaccttacattcttgagatgcttgacgataacgtattttagcatcacatgtaagtggaaaattaggggctttatctatccagtgaacnctgtctgctacaagtgaattgtgataaagcaaagggttgtcaccctgaacggcgactattttatttgattcgattagtttatctgcaacaaaccatggctcaggagaatcactaaatccaccaccaatctcaagtcctttgcgttgaccaattgtgtagaaaggaagaccatcatgatgtttaataaatcgcccatcttcatcaacaatatcgcctttctctttaggcagaaaattagtcaagaattctgcaaatggcctttcacctataaagcaaattcccgttgaatctttcttttcagaatttataaagttattattttttgcaatttcacgaacatgttttttgtttatttcaccaagcggaaataagctttgagagagttgntcttgatttagtaagtgaaggaagtagctctgatctttattgccatcaattccagtttttangagatantttttattattttcagcaattcttgcgtagtgaccagttgcaattttattggcaccaaggtcttttgcataatctaagaatgctttaaattttattttctggttgcacaatacatcaggatttggagttctaccttttttatgctcagacaaaaaattctcaaagacgtcttcccantattcgtgtgagaagtttactgtgtgaagctttatgcctagttggtcggcaacctgctgtgcatctgataagtcttgagatgcactacaatatttgtcatcgtcatcctcatcccagtttttcataaacaaagcttctacttgaaatccttgntctagaagaagaaaggctgcaacagatgaatcaacacccccagagaggccaacaataattttattagcagtgatactcattactcttgatcgtaggcgctgacaatttttttaaccaattgatgcctaacaacgtcatgagcatcaaaattacaaaaagcaatattgtcgatgttatgaagaattttaattgcatctataaggcctgattggtttggaacaggtaggtctatttgagtgatatctcctgtaattaccatcttcgaaccaaatcccattcgagttaaaaacattttcatttgaggtatggtggtgttttgagcttcatcaagaataatataagcctcatttagggttcgacctctcataaaagctaatggggcaacctcgatgacttgcttctctattagcctatttactctttcaaagcctataaattcatagagtgcatcatatatagggcgcagataagggtcaactttttcacttagatcgcccggcaaaaaacctaatttctctccagcttcaacggcaggtctaactagtactattcttttaatgttggagctttcaagagcctcaacggccctcgcgactgctaaat

SEQ ID NO: 361 - DNA, 4000 bp, Escherichia coli
  misc_feature (1512)..(1512): n is a, c, g, or t
  misc_feature (2632)..(2632): n is a, c, g, or t
  misc_feature (2677)..(2677): n is a, c, g, or t
ggtgtgtaattcggccgaaacatcgtcgtgccggtctctttaatgctttggcccaaggcttttgccgcgatcgcaacaccgttcacattcgataatttaccttggtcggtcccaaatcccagtgcggtgtaacgcttgacgtgttcaacactctcgaagccttcgcgggtcgcgatttcaatcgcagccgccgagacatccaattgataatcgacgaactggggcggtgccttggccgtcggcaaaggatggggcacctgaaacaaggcctgcaacgcgaagccgatgctttcgctacccgatattgcaagacttttcggcgcgtcgaaccccagtctcgatagcgcttggtgcgcagcgatcgcgccctgctctaaactttcgcccaaagcaaactccccggtcacagcgccagcaaacaacagtcgctcgtgatcaggattcggtacaaagccacaaacatcttcgcgccaaaccggccgatgccctagatgagccgacaaatgcacaacgggtgaatagccgccagagcttgcgatgacatctgctgccagctttctgaccggacccaatcgagcatcagcttgggcatcaaaatcgcaaacaacagccgctttaaccgaggcgccacccaccacgtcaacgaccactgccccctgaatgaccaccacgccagctgattctgctcgtgtaaccaggctcgacgttggggcggcgcgcgcatcgaccaccgttgcactgccggtccccgccgccaaccaatcgattgcagcctgatagccagcgtcgttattggtcgcgaccactaaggcattaccgggccgaacgccatagcctttcaaatagactgatacagcgcctgccagcatacaacccggcacatcgttgttggcatagaccaggggccgttcatgggcaccgctggccagcaccacttcccgggcccgaatacgatgcatccgctgccgggctaacccttgggtcacggtcggcgcaagatgatcacgacaacgctcgaccactgtgacgaagttgccatcgtgaaacccggtcgccgtggatctcaagaggacctcaacattggccgcagccctcagcgcatgaagcgttgcctgaacccaaacacgcgccggcgcgtcgtcaacctgatcatcgctaaagcgcagccaaccgcccggtgtgggattttcatcaacgatgatgatccgagcaccagaaggttgggccgtcagggccgctgcaaggcccgccggtccggcaccgataatgagcaggtcacagtgccgattgatcttgtcgtagatctcaggatcgggttcggtcggcgcaaaccctagacctgccattttacgaatcacgcgctcagccgcatgccagactggctgtgaatacatcatcgttttgtaataaaacccggggggcatcatttttcctgcgagcttgccaaccatcgccatcgcatcccactcgaggctgggccaaccattcgtcgttcgacagaccagaccctcntagagcgcttgttcggttgctcgaacatttggcacctgggtgctcggcgtggcacccacttggagtatcgcgttgggctcttcgaccccggcggctatgatcccccgcggccgcccgtacttaaaactgcgaccgacgattttgacgccattcgccaacaaagccgaggccaatgtatcgccgcgaaaaccttgcagcgtgcgaccattaaacgtgaacgttatgggcacatcccgatcgattagacgaccctctgcaattcgattaacttgtttcattgcaacagcgcctcatctttgaccggttgcgcacccatcgcataggtttgctcgatgtcgtaggtcaccgtatctcgcacaacattaaaaaaccgccgacagcctgccgcgtgataccacatttcatgatgccgtccacgtgggtttcgacgaaagtacaggtaggtgccccactgcgcatcactgcagcttgctgggtcgtctgggcgcgcaagatgggcctccccgctgtaatgaaactcgggttcatctcttaattcttggcaataaggacaatgaattcttaacatgctgctctcataaagatctaatgcgcgacgccggctgcaccgtgctcatcaatcaatgcgcccgaataaaatcgatccagcgcaaagggtttggccaaagccggaatctcatcactcgccaagcagtccgcaaagacatggcctgaacccggcgttgccttaaaaccgccggttccccagccgcaattaaagtacaggttttcaaccggcgttttgccgatgatggggcaggcatccggcgttgtgtcaacaataccgccccattgtcgattcatcgggacccttgagaacattggaaataattcaatcatcgcagcaagggtatgctcaatgacgggcatcgagcctctctgaccataaccggtatagctatcaatacccgcaccaatcaccagatcgcctttatcggactgggagacatagccatgcacctgattcgacatcacgacggtattcaaaatgggtttgatcggctccgagactaaagcttgaagtggatgcgattcaatgggcagctcaaagccgccgtaaccggcgagcacacccgaattncccgcgaccacgcagcccactcggccggcatggatcaccccatancgatcggtaaccaccccccgtagctgatcgccttcaagctcgaagccggtcacagcacacgcctgcaacagatcaacccccaaagcatccgcagcgcgagcgtatccccaagcgaccgcgtcgtgccgcgcaacgccacctcgcggctgccaagaggcgcctaaaatgggataccgcctagcgcttgtaatatcgatatgcggcacgatctttttgacacccgaggcatccaaaacttcgccgtcaatgccgttcagccgattagccgaaacccttcgctcgatatcgcgcatgtcttgcagggtatggccaaggtttaaaacgccccgctgcgaaaacatcacgttgtagttcagctccgttgagagggtctcccaaagcttcaacgaatgttcgtacaggtgcgccgcttcatcccagagatagttcgaccgaacaatggtcgtattgcgacccgtattgccgccgccaagataccctttttcgatgacggcgatattggtcacattgtgcaccttggccaaatagtaggccgttgccagaccatgtccgccgccaccgacgatgatcacatcgtagtgcttcttaggttcagggttacgccaagatcgctgccaattttgatgatgcgacaaagcatgcctgaataaactaaacgctgaaaaccgttgcacctaaccctcgcctaacccttccggatgtttcgatgcgtcttgctctgcatcatggtttgccaaaataccaaaagacgtctcccgcctggcgaaggccaaggcctcactggcgatgtttggaatcaaaccggttgcttcctctgtgaggactaaattcgatcccagggttacccgcagcgagcgttctgatttcggcgataagctcatatatttcttatacgtgcgattaaaatgtgcggtcgactcaaaaccacagatcgacgaaatatcgacgattgagcaggtcgtttggcgcagcagctgtttggcccgttctaatcgaacctttaggtagaaccgagagggcgtaatgcctagaaaattcaggaacaagcgctccaactgccggcgcgaaacccctgagtaggcggccacgtcaaccagatcgatcggctcttcgatattagcctccatcaattgcaccgcactggccaattttggctgactcgcaaacacattattttccatccgcaaccgctgtggctcctggctgtcccgaatgcggtcgcacacgaacatatccgatatcgcattggctaatggcgctccgtaatgatcggcgaccagatgcagcatcatatgcagcgcgacatcgccgccggtacaggtg

SEQ ID NO: 362 - DNA, 4000 bp, Escherichia coli
  misc_feature (921)..(921): n is a, c, g, or t
  misc_feature (1214)..(1214): n is a, c, g, or t
  misc_feature (1367)..(1367): n is a, c, g, or t
  misc_feature (1385)..(1385): n is a, c, g, or t
  misc_feature (1397)..(1397): n is a, c, g, or t
  misc_feature (3305)..(3305): n is a, c, g, or t
  misc_feature (3496)..(3496): n is a, c, g, or t
  misc_feature (3502)..(3502): n is a, c, g, or t
  misc_feature (3518)..(3518): n is a, c, g, or t
tgtgtcaataaaactaaactatcaggtggccgcgacgcaacctttttttaggatgataaatttttcttatctcgtgctctactttcatctaaaacgtgaatgatcggcgggtggacccagtctgtaacatttataagaaaaagctgacagcttccgacattgcctgaacgaatgaacaggcataaattgttaaactaagtgaagtgagaagtggaatgagaagttttcgaccttgatcatgcaggaacgcatggcgcgaacagaatggagtaataaatgaaaaaagtcgcaatagtggggttggggtggttaggtatgccactcgcaatgtctctggccatgaaggggtatgaggttgtcggcagcaagactacgcctgacggcgtcgacgccgcgcgcatgtgtggtatcaactgtttccctctggtcttcaagccggagatggagtgtgaagccgccgatctggacgtgctattaaatgtcgacgcgctgatcatcactctgccggcacgccggacggtggaaggcagtgagctctattttcaggcggtgcagcagctggtggacagcgcgctggcctataatgtcggccgcatcatctttaccagctcgacgtctgtttatggtgatggcacgggaaccatgcgcgagaattcgccgctgagtccggtaacgccgagcggcagagtgcttgaggagctggaaaactggttccatcgcctgcccaatacctcggtcgatgtgctgaggctcgcaggtttagtgggggccgatcgccatccgggaaggttccttgctggcaaaactgacgtgcagggcggggatgatggtgtgaatctggtgcatcaggatgatgtgattgaggccatcacgttgctgctcggtttgccaaaaggcgggcacacctacaacttatgcgcnccagtgcatacgcaaaagcgtcacttctatccggcctttgctcgccagctggggctgaccgaaccgcagtttgctgaagttgctgaaaatcagccgaagggcaagttaatcgacggcagtcttatctgcaaagagctgggttttgagtatcaataccctgatcctgaaatgatgcccgtgagttaattagctagttagctaatcaattgaataaaccctctcaatcaatagagggttttttttcggttagatataaagaccgccgatgaataacaggaaataaggtgaaaaantttcactgttaacgttttcagttcaacttttaattatttattgttcgatattgagctgcttttattaccaataaaatgacaaatgtgtgatggatattttaattattctttactgttgctgggtgaaataaatttctaacagccttaaaccgncttctgctagcgcttttnggccggtgaatnccatgccttatgttgtccgcgtaataaaattcctaagactagtctgagcatttcctcttcgatggcataaaactctttttaggtttgcccctaaagtttccgttccctgtgccgataccccagttgcccgcagatcgggccgcacacttcaccctgacttctgtatcctccctgagggcagaaggttttctgctgcaaaaattatttgttacacaccttgactttgtacacttataaagccgtacttactgacggtatccccacgcttattcctgaattaacctgaaaaaccttcctaaacagtacttcaacgaccattttttaaagaacaagctatttttaaagcaatctggattttttgctatcaaaagtcacttttgtgaatttttaggctaaaaatgatgcattaatcatgtttttgtatggttaatttggctttatttagatgttgtactaaatgatctaaaaatgaatgaaaaaacggggctgagaagggattttaagacgcatttttacttttggataaattttgagctgtttttttactcaaatcactctttttggataaaaataagttttatttttgtgacgcacatcacactttatccaaaattcgctgagggcgagattgtatgtgctaatgattcggggttacatttgcgtcgtattaagattaatcctaataatgtatgtaaaagcgtttcactgaatgacacgcaatcacagcaacggaccctgccgaaaagctacaactgataaattattaaatttaattagccgtgaaattgtcacatttatagtttacatcaggaactactttgtattggcggtgaatcataaaccgcgagataaacccgttttgtcctcgcaaacatttctttgaaaaaatgaaatgtgatgttcatcgtccaatggccaattgttttgatagtaaaaaaatactctgtcggacttaaaaaccaaacagtgattatatctatcaaccagttatgaattcatagctgacggtatggggtaaacaagcatgtcagaattgcttaaacatatttatgacatcaatctgtcatatttgctgttagcacagcggttaataaacgacgaaaaggcttccgcgatgttccgcttggggatcgacgatgtcatggctgatgcgttggggagccttactttgccgcaaatggtgaagttggctgaaacgaatcagttgctgtgtcagtttcgtttcgacgacagcaagacaattgaacgtctgacccaagagtcgcgagtggatgatcttcagcaaatccacacaggtatcctgttgtctagccatttgctgaaagggctttcagctaaagacagcagcgcctctaagaaaagggcataaccatgtcctcgataaaagcatcatcgacaccgaaagaggcttcggccaaacccgtcgagaaaagtattgttcaggaagcgcgggatattcagttagcgatggagttgatttcgctgggtgcccgtttacagatgctggaaagtgaaacgcagcttagccgtggtcggttaatcaaactctacaaagagctgcgtggtagccctccaccgaaagggatgttgccgttctccaccgactggttcatgacgtgggaacagaacattcactcctccatgttctacaacgcctacaccttcttgatgaagagtgggcattgcaatggcgttgaggcggttatcaaggcatatcgtctgtatctggagcagtgtccagagcagccgggtgaagcgccaattttggctctgactcgtgcatggacactggttcgattcgttgacagcggcatgctgcaactctcttcctgtaactgctgcgatggttcttttattacccatgcacaccagccacgtcacggttttgtgtgcagtctttgccaaccnccttcacgagcagtaaaaaaacgtaaactttccccggaagctgccgatagtacatctcaagagctggacgaaaaggtcaagcgcgcggtttgagatgatgtgggcagcatagtgcgaaaggtcacgtgatgctaaagagtggtgaaatgccactctttacaatacctccccaacatccccaatagttttgnttgtcngctgacaagacaaaanctcaattctctcttcaagcgcgcttcctctggtctggcctatacccaaaagccacatcgaattaaggaatcatcgtgctagtactcatcggttacatcgtggtcctgggctcagtttttggcggcttcatgctggttggcggcgagctgggcgcgctctatcagcccgcagaactgctgatcatcggcggcgccggtattggtgcgtttctggtcggcaacaacggcaaagccatcaaatcgacacttcgcgcactgccgaaactgttccgcgcatcgcgttacagcaaggcgctgtatatggatctgatggcgctgctctatcgcttactcgccaaatcgcgccagcaggggatgctgtcgctggaaaacgacatcgataatccgcaggaaagcgatattttcactaattatccgcgcattcttgccgataaacatttggtggaatttctcactgactatctgcgtctgatggtcagcggc

SEQ ID NO: 363 - DNA, 4000 bp, Escherichia coli
  misc_feature (121)..(121): n is a, c, g, or t
  misc_feature (1571)..(1571): n is a, c, g, or t
  misc_feature (1970)..(1970): n is a, c, g, or t
  misc_feature (1991)..(1991): n is a, c, g, or t
  misc_feature (2015)..(2015): n is a, c, g, or t
  misc_feature (3393)..(3393): n is a, c, g, or t
acttggatatgtcattctaccaggttgcttttcaaatgaagaagtaaataatcttcgcaaagccatgacaacagtctttaatgagaagactgaggctaacataattgaaaagtcttcgggngtagttcgtactgcaatgggtctacatcttcggagcaagatttttgatgatctcacgcggcaccctaatttttttgaacctgcgtgccagatacgtggtcataatctttatattcagcagacaaaaattaacgtcaaagctgcctttactggtgaagtttggcaatggcattacgattttgcaacccatttcggagaagatggagtgcccaaaccactggctttgaatttacatgtctttcttgatgatgttactgaattcaatggtccacttttcttcattcccaaatctcataaatatggttctgcaccatcaaaactggatactgtcactacgaattatccattatgggttgttgatcagcagactgtcaaagctattgtaaaagaaaatggaattatatcggctcgtgggaaagctggtacagttgtgatttttgtagataacttggtacatggttcagcacataatatgtcacccttggacagagcaattttttcagctattcttaatccgtgcgataatgctcaaaccaaatttgctcgaccagaatacaaacatgggcgagatttcaaacctattaagacttcatcttataaaagtctgttgatttgattatttatttaaaataggtataccttaaaagccttgggattcacatttaacaagcatttcgaaactagaggcgggataaataaaaaaattataaaattttcaaatcaaaaagaaaatttacagatccaccaattaagaaagtccagagaaaaaatataaaaatataataataagttcgcattgaacctaatataggaagactaaatgtttttatttagaccggatcttgttcaaagtttgatataaacaaaataaagaaagaaaaaatatttgaaaaatcaatcaacaaggaagttagaaaaagatcttttaaagctacatactaaagattttactgataaggataaactcacagttctacatcttatattggacggtaaaatagctgatgcaaaagatatgttgaaacctcaaggtgtacccgaaaaagaggtagacaatattattcaagaatacaaaaaaaataagaaaaaatttactaaaacatggagaagataaattaattgaatgtggcgcaaaaaaagaaaagaacatagaatttttgatagaataatgcttgcagtttttctattagttgcgttcgtttacatagtgaaatttcttatggggtttttttaaaaagaatagttaaaaattttatattaaattaagaggaccgctaatcatcacagtccagtagaggaaaataaaagcgtaaaaaaaaataattctcattttttacgccagccctaccactactgataagaatacaagaataagtgcccaggatatataagatttcggtgactttcgtagaggatatttagttgcagttctcattgagcgtctatgtagngagagattgtgtttaaaaattgtcggaggaaataaaagagaaagaattttttgtcgcagttaagaacctggtggtcggcgaattgtaaaccgattgagcacctgaatatgattgccaacacctcacctcgaaacttgaggcgggataaataaaaaaactatctctaagcgtgtttctgttttaaagaattattgtcctataaaatataggacacttatactagacttgtacctaggctccgtttagacattttgagaacaaagagaaggctaaccgataaccagatctagtttcttttttcccagtctttcatttccggaaggtgtaataaggtacgtttctcctaggttcatagccaattcgttctcgctatccattaagatcatgtgcatgaagaanaccatacctggttgcaaaacnactggatttccagtgtaaagcatnggccaatccatccagtttggagaaaaagttgttccaagagaatagccgcaggcattcattctagattttttatatcccaaacggtcaaaaacatcggcatgtacatcaaatacttcaccaactttatttccaggttttaatttattttcacagctttttaaagcttccacgcaagccgcatacatttttttttgcttgtcgtttacttttccaatcggtatcgttctgaacaaggcagagtggtagtgtttataagttcctgcccattctaaagaaagttgatcaatctcatctaattttcgtttttcactttgatagcgacaaagtagagcgttctttcccgatccaatgataaactcgttagcagggtaatctcctccacccttaaaaataacaccttgcatttcagccaatatttttgcctcatcttgcccagcgtgtgcatatttccatactgcttccatagcattgtctgcaagttccgctgccttttttacataaactatttcagtgggagatttagtaattcttaaataagaaattaattcagatttatcatgaagggatgcaaagttttctaatgaattatttaatcgaatggcattccttccagttaaaccatatgcttcatactcaacccccagattagatttctctaatcctaattctgataaaatattctttaattcatcagcaggattagcattatctttatccatccaaatccgaatatccttaataatggaagtattttgagcctgtcttaaatctggtgccctagttaataagattaaatctcctttagaagttaaaattaaagattgaaaatatacataaccaaatgtgtcgtatcccgttagccaatacatagactcttgtctgaacattaataaaccatccagattttctttctttagtttagcaataactttagattttctttctaagaattcttcttttgtaaaatgaatagccattaattttatttaattggtttatttttacccctcatgaaaactaaaactaagcatccatttttggtataagaagaatgggctgaaccaggttcaaaagttacaaaatctccttttttaagaactttattatcaggatcaattaactctccatctagcattagaaactcttcataatttgtatgttcatgagataagctcttagctccagggtccatttttaatacgtaagtaccttgtccggtttctttattgtaagtaatcttgtgccaactcattccaggaactaccgaaccataattatcaaatggttcaaattttacattaaaagggtttgttatttttcttttattcactcgacaaactgttttaggttgggttctaaataattaggtcctttcatnactttacctttttcattatgaataggttttccatccttacctaatttactcatgtttgctctttgaacttctttaaaacatttatctaaattaatcccgtaggcataaccagcgccataagttacatataaaatatcagttaaggcatccgcaatttcttttaaattttttgttttcattgcatgttctaactcatttaattcctcttttatcagatcaaatcgaagtagcatggttttgtcgtttggaaattgaggtttagttctaactatttgaccgaaagcttccataaatgtttttacgtcttcaaaattgctcatatttaaatcctcctttatttagcagtccaaccaccatccactaatatggatgttccagtgatcatagaagaggcatctgaagcaagaaaagcaacagcggttgcaacatcactgactttagcgatacgaccgagtggaatattattaattatttctcttttaaattttttgttattgaaaaactttttagtcattggtgtatcaacaaaagttggacaaaccgtgtttacacgaatattgttttttgctaaatcaacagccattccttttgttaaaccttctaagcc

SEQ ID NO: 364 - DNA, 4000 bp, Escherichia coli
  misc_feature (3860)..(3860): n is a, c, g, or t
  misc_feature (3955)..(3955): n is a, c, g, or t
  misc_feature (3969)..(3969): n is a, c, g, or t
aagggttttgagggtgttgccagatgccgtccttaactatttgacgaaagaagagtcgaattttgagggattcggtacggacgagcatcaaacttgcgcgaggagatttattttaagaaggagtaaagagatgacgacgacgaccggcaaagacagcattaactttacggtggaaggtgtggaagttgagcggccattcgtgagataccgcgggtgtaggagtgctacggctggatcgattacagaacgaaatgccgcgagcgagtcggtgtcgaacgcgtctttggagattacgagcgttcggccgttctcgatggcgttgaaacgtctcggcgacttaaaggttgcgtgccaacgcgcaaacgttcccattgagaatatggtgccatttttcactccgaagactggaaaaaagagaaaagctgccgaggcaatgaatggaatcgagaaagaagaagtatccgttttagacatttcttctacgccgctttccgtcatggctataccgcgactggagaagcaagccatagtgacttgtcttcgtcgcgagttgcctttatcacttggattctctagcgatgaagaatatttagaatcattcgcggcgtttcatcacttgagcatcgataaaggctcactcattgaccgaactgtcagaccagacgtacaagcgaagaaggagtattatggcttcagatacgccgatgtagtgtttgagaatacaacggaaagatgggtttatccgatcactttgttgcttaaacagaacggcgcaaccgaaatagctgcgagaaataccgaggaattctcgcaatcgttgatcgtgaagaactttgcggaaagtatcgagtctacgacgcatttgggcatctccgtctcgttttttcgagacgaagagaacggtgcaatagaacgagaggcgatggctaacgaacttgctaatagtgatgatattttggacgcaagtgcgaatcagatttctatagacccgctcttacaggcgctgcaaacgcactcgccgccgtttctcgggtttcgcttggccctggatgagtatatcgacccggttcttgaaaatactccaaacactagacgacgtttgcgaagagcgtcgtcgatttcagccggagcaaacttcaacgatgtcgtgcacgacttcagaggattgcctacgcaaagtacggtaccgttgacgcttgatttaaaccaaccgctcgcgattgatgagcaagatagaatggacgtggttcgggcgcaacaacgccactttctattgaatagcccggttcaagacgaggaagtagcgatggcgttcacaacgttggatgagaggaagacgaaggaagcaaagacgatagagaaagctacaacgataaaaacgccgccgccgcccaaagcacgcgtgccacacttttctaaaagtagcacgaagacgacgacaaagccgccaccaaagaagatgaaaagtgaagaaaaaaattcctcgacggagagattcgatgcaatatcggagattttgcgagacgcagaggagaaaactcttctgtcgaaaagtggaggatcgaaatacctcaccatagacgatttgctattcttcttggaatattctgatccaaacgtgggcgcagactgtcgcaaaaagattgggaggcgaaacggtttcggtcgagcagacgtgatgaaggtcgttctgcaactcgttaagaaaaccgcagcacgaagaacatttcgcggaaggaaggacagagttgcatgatgtgggtaccgttggtgctactatctgctgtactatattcgttattattagaaaagagaaacacaatcgcatacgttgtaatgctaataagagagacatacacacagacattttttctaaaacatcttagccgcgacatctttgacaaccgccgcgatcttgccttcatcctccgcgctcaacgcgccaattgaactcgcattgattgattctaccacgtctgcaatattaatttttgcttgcgcaatgcacgcgttggcaaattctagcatttttgctccgcttacgtcttctctctccgcgaaggaggttttcgtcatagcgtaaacgcctatgaacgattcagcaatcgatcgtacctcaccgggcgtttgtttcataaataacccgaccgcgtcggatttcgcgtttaactttctcttctcttcgccggacttgccgtacgcagacatgtcgtcggattgcatgagttgtaaacgaagctctaacgcgttgatttttttaaacgcttgcgcttgccccggcgcgccgatgcgactgacggacattttttgatcccaaatccatcctgtttcaggatcgaaatctttgataaacacttgcccgtctgtgatggacataaactcctcaaccaacggacgcggttgcgtgtacgcattttccggtgcgctcgtttgattgttgcgtttggcgtaattcgtagtgctcgacgcttgcgatgctgcttcgcctttctttttcaacccatccgcgagcttcttttgcaacgcttctggcatgttctcgaagtttgcaaccgtttctcgcgctttttgcatgtaatcaatcgatccttcaccatttaaagaaccggtatagtctttgtcgtacgcgccaattggatgcgtcatcgctcctaacaacgtgatcgacccaccccctaatttatcattcaatcgagctactctttgtaaagtcgttcctaaaaaccgtctgcgctccgccatggcggcgctcactaacattccttcaatctcttctttgttttcgtcggattcgtcgtctaattttgcatccggagcgagttcggccatttctcgcgcgaatcctgtcatcccgctaaaatcgtcgacacacaagagcgcgtcttggccgcttttacgcgcgccttccgcgatagcgaaagcggttaaagtagcgacgtatctttccgcaattgtggcatctttggaaactgtcactacagttgtcgatgtgttcgtattttcttcttctaaaacgttgagcgctctggcgatttcttgcgatttctctttactcgcacccaccgcggcgtacacgcaccgaacgttgctctttttttgcgcgctcacggacatctgtaaaaactcagaaactcccgtgttcggttcaccggaaacgagcaaacactgtcctcttccaatcggtgtcaaaacatccacggcggacgcgccggtaatcaaaggcgtcgtgattggtttcctcgcgtccactggcggtggatccgcgactaaattctcaccactttgttcgctcaaatacgcttccgagatggattgaaatccgctcgcgctcgttggcgcccccaacgcggaaacaattcttcctctcaaatccttctccggcggaatctgaaacgctttcgatttacttttcttgttctcctcgtccatcttctccacctccaacgcgtccccgactttaatctctgccacgttatccgaatccggcacgtgcaccgcgcccaacttcgtcgctaacatcgcgaacgatttcggctccctgtgacttaacaaaatcgccttcgcttgtaacccgggaaagcgcaacaccgatccgagttgcacgctcgaccgcaaaccttccaaaacgagcaaaccgcccggttgaatcgaagtcaccgttcccgtttgcccaatcgacgtttgcccgtccgtttcttctcgcgtggcgtcgataacttcctgtccttcaaacgcgtctaccccttcttcgccgccggcgaaggcacccgcggaggaggagaaggcacccgcggaggaagaggaggcggtttttgaaaacacgccgatcgtattcgcgttcctctcgtcgttcttcccgntctttatgtcgtcctctgtttctcttccggttgcctttgcagaaaaagacttcgacgaatgaagcgaagtgcgcgaagaaaaggaagacaaagangcgtatcttccacntccgccgccgcctttccctgcgcttctctgc

SEQ ID NO: 365 - DNA, 4000 bp, Escherichia coli
  misc_feature (61)..(61): n is a, c, g, or t
  misc_feature (75)..(75): n is a, c, g, or t
  misc_feature (243)..(243): n is a, c, g, or t
  misc_feature (267)..(267): n is a, c, g, or t
  misc_feature (291)..(292): n is a, c, g, or t
  misc_feature (329)..(329): n is a, c, g, or t
  misc_feature (448)..(449): n is a, c, g, or t
  misc_feature (459)..(459): n is a, c, g, or t
  misc_feature (465)..(465): n is a, c, g, or t
  misc_feature (512)..(512): n is a, c, g, or t
  misc_feature (528)..(528): n is a, c, g, or t
  misc_feature (570)..(570): n is a, c, g, or t
  misc_feature (573)..(573): n is a, c, g, or t
  misc_feature (578)..(578): n is a, c, g, or t
  misc_feature (580)..(580): n is a, c, g, or t
  misc_feature (716)..(716): n is a, c, g, or t
  misc_feature (973)..(973): n is a, c, g, or t
  misc_feature (1538)..(1538): n is a, c, g, or t
  misc_feature (1985)..(1985): n is a, c, g, or t
  misc_feature (1991)..(1991): n is a, c, g, or t
  misc_feature (2479)..(2479): n is a, c, g, or t
  misc_feature (2485)..(2485): n is a, c, g, or t
atgccttttgaacctgctccggaagtggattgataggtagaaaccaccactcgtttaatanttgcggcctgatgnagagggttgagcgcaaccaccatttggattgtggagcaatttggattagaaattatgcctttgtgtttgaacaccatttgcgggttgatttccggaacaacaagcggtacatccggatgtaatcggaaagcactgctgttgtcaatcaccactgtaccggcatcaacngcatgaggtacaaattctttgctncgcccttttccagcagaaaaaaannccaaatctactccttgaaaagattttgtcgtcagttnttcaacagtgatttgttcaccacaaaactcaagtttctttccaacggaacgttcggaagcaagcagttttaaattgttaataggaaatttacggagttccaaaagtttaagaaattccnnaccaacagcnccggtngcaccggcaatcgcaacatttttcaaatttatttttttgtgaaaggnatattaaaatattttnttattactaattgataatgagtgtccactgaattctgtatanatnaatantnacagaatcaagggggcatcagttcagaagttttcaggttcctgctgacttataatgttttcggcaaactgaaacatagctgtcgtttccgccgatctgtatttgctcaccggactttaacggctctccattctcancaagacgaagtaccatgttcgcttttttaccacagtgacagatagtctttatttccaccagttcgtctgcccacgccagtaaatgcagacttccttcaaaaagctctcccttaaaatcagtacgcaaaccataggccagtacagggatcccaagtttatcaacaatctctcctaatgcataaacctgggtttttgtcaaaaattgagcttcatcaagcaaaacacagctcaaaggagtttttttgtcaattttctcngtcagagcaagtaaatcatcttctgactcaaaactggctgcatccgactccagtccaattcgtgaacgtaccctgtcggggttataacgatcatcaacttttggcttaagtaccagtgttttcattccacgctcacgataattatatgctgactgaaggagtgtcgtggtttttcctgcattcattgcagaataataaaaatacagcttggccatctgtgtcagagaaaaaaatgatggtcacaaaaaacaccattcttttctttggacgaatggtagaaaaatctatgagctaagtataattcttctggaaaatataaaagtggtaattttagcaacaaataagaaaataataaaggaagaaattacatgaaagcattgtggaaggggcaaggcacacttgttgctcatatttattaagccccggagagtggctccgccacttgaatccttttacaaattcatgaatttaaatcctgagcctagcatgacctgggatttgctccatattcactccggggtgtagcctcaaaagatacagactccccaaacatatttcaagcagnaattataaaaaaaaatatttttttgaaatattttttttcagacttgaagactattttttttagttcatcccatacctctgatttatttatttttatttcttttttggattttattacaaaaaaagtaagaaacaaaaaaaaataaatttcataattattttcacgaaaaacatttttatctttgtaaaaaatttcacttgaagttttgttagcactctagtatagtgagtgctaaaaggattttattcgaaaaaataaaggttattatggacacccaaaaatttacagaaaaatcgctgtctgccttggaaaatgcacacaacgatgcagttcgtcgtaaaaactccgagttgtccacagtccatcttttgagttccttaacttttcaggaaaatggtttagttcccaggattttcgaaaaaatggagatcgattctgaaaaatttncacagncactggaatcatctttgaagtctttaccgactcttagcgggagttcagcaggaagagtgggcgctagcggtgaaatgaatcaggccttggtgcgagccgaagatgaagcaaaaaaactgcaggacgaatatgtaagtgttgaacatcttttgctggcattgaccgaggagggacgtaagggtcctgcaggaaaaatattggctgagaatggagttacccgtgaacgtttaatgggtacaattcaggatgtacgtggaggacagagagtgacaagtcagaatcctgaggaaacatacgaggcacttgaaaaatatgggacagatctgagtcagcgtgcacgtgatggaaagctggatcctgtgatcggtcgggacgatgaaattcgtagagtgatacaggtactttcgcgtcgcacaaaaaacaatccggttctgattggagagccgggtgtaggcaaaactgcaatagccgaaggtttagcacagcgnattgtncgaaatgatgtgccggacagtttaaaaaataaaaagctggtttcgcttgatatgggtgccctgattgccggagcgaaatatcgaggtgaatttgaagagcgtcttaaagcagtcctcaaggaagttgtagattcagatggacaaataatgcttttcattgatgaactgcatacagttgtcggtgcgggaaaaactgaaggttctatggacgcaggaaatttgcttaaaccaatgctggctcgcggcgaactgcattgtattggtgccactactctggatgaataccgaaaacatatcgaaaaagaccctgcactcgagcggcgttttcagcaggttttggtggatcagcccacagttgaggatacgatttcgattttacggggcttaaaggaacgttacgaaatacatcatggtgttcgtataaaagatgcatctttgattgccgccgcaacgctttctcaacgctatatttcggatcgctttcttccggataaagccatcgatttgatggatgaagcggcagcgcgtttaagagtagaaataaattccatgcctgctgaaatggatgaaatatcacggcgaatactgcaattgcaaatcgaaaaagaagcactgaaaaaagaaaatgatactgcttccaaagagaggctgaaaaaactgtctaaagagttggcagagttgcagcacagctttgacaatttgactctgcaatgggaaaaagaaaaatctgctttacaggatatgagtgaattgaagcaggaaatagaagaagtgcgtctgcaaattgaacgtgcacggcaggactataatttggaagaggcagcacgtttggaatatggtgaacttccggaactggaaaaaaggctgaaaaccacacaatctgaagaacaaagcggcaagaatcaactactcaaggaagaagtagatgcagaggacattgccgaaattgtaggacactggaccggaattcctgtgcagaaactgattgaaggagaaggcgaaaaattgttgcgacttccggaacagctgcatcaacgagtggttggacaggatgaggcgattgatcttgtttcggatgcagtaatgcgggcacgctccggaatcaatgatccaaacaagccgcttggaagttttatatttttgggcccaacaggtgtaggcaaaacagaattggcacgggctttggcagaaaatttatttgatgatgagcagaacatgatccgcattgacatgagtgaatacatggaaaaacatgcggtttcccgtttaattggtgcacctcccggatacgttggctttgacgatggtggacaactcactgaagcagtacgaagaaaaccttacagcgttttgttgttcgatgaaattgaaaaggctcactttgatgtttttaatgttttgctgcaaattcttgatgacggaagacttactgactcacacggacgtaccgttgatttcaaaaacacactggtaatcatgacttcgaatattggcagtcaaaaattgatcaaccaa

SEQ ID NO: 366 - DNA, 4000 bp, Escherichia coli
  misc_feature (29)..(29): n is a, c, g, or t
  misc_feature (84)..(84): n is a, c, g, or t
  misc_feature (93)..(93): n is a, c, g, or t
  misc_feature (132)..(132): n is a, c, g, or t
  misc_feature (225)..(225): n is a, c, g, or t
  misc_feature (255)..(255): n is a, c, g, or t
  misc_feature (297)..(297): n is a, c, g, or t
  misc_feature (432)..(432): n is a, c, g, or t
  misc_feature (464)..(464): n is a, c, g, or t
cactatgccatccatacccctatacaacntgacatgcgtttctaccagaagtacctggacaaaggccttcctccggtagaagcngcctatgcnactctcattgagggtatggacaaaagtctgggagacatnatggattatctggacaagaacaacctgacggaaaacactatcctcatcttcatgtccgacaatggcggtttggcggcccatacccgcgccggncaactgcatgtccagaactatccgctcaanagtggtaaaggttccgcctacgaaggaggcatacgtgaaccnatgattgtccgctggccgggcatcgtagcgccccaaacccaatgcgaccattacctgatgatagaggacttcttccccaccatccttgagatggcaggcgtagacaactatacaaccgtacagcaacgcgacggnatcagtttcatgccattgctcaccggaaaagntaaaatgaaagaccgtgatatctactggcattatcccaatagctggggtccttccggcccgggcatcggagccacttgctccatccgttcgggcgagtggaagctggtgtattatttcggtgacggtagacgggaacttttcaacatccccgccgacatcagtgaaaaacatgatatggcccgagagaagcctgaagttgtcaaagagttgtcacggaaattaagtaattacctccggtctgtggatgcgcagcgccctctgttgcgtgccacccgccaaccagctccctggccggacgaaatatagaaaaaagtatgaaacgaaacctttccctcctccttgtgtccctgctttttgcagggacagctcttgcccaagaacataatccgggcagcgtacagccggatacgattcagaaatcctccgagaaatctttccggaaacaacgctctccacgaacagaccatggcccggtaggtatcaatatctccttatggaaaaacatctccacacagcggactgataccataggaagcacctgcttcaatctgggtgtgttctcctccatgaaccgtctgaatggcctcggcatgaatattcttggcagtgtaaccggcagggatgtgaacggtgtacagatggcaggtctgtcaaatatggtggggggaagcatgcgaggcatgcagatagcaggaattaccaacatcaatggcaacaaccttatcggagtatccgtttcgggactggtaggtatcaccggaaaccatgcgcaaggcgtcatcatttccggtctggcaaacatcagtggggactataatcgtggcgcctccataggcggcctgttgaatatcagcggagaaggtgcttccggcatacactttgccggactcgccaatatttccggtggaaatttcaaaggattttcaggggccggcctgctaagtgtaatcggtgaagacttgaatggcatgcagatgtccgcccttaccaacatcaccgccggagatatgaccggtgttcaggtttccggcctgggcaatgtggtgggtggtacagcccgaggattacaaataggcgctgccaatatggccatacgtgccaaagggcttcaaataggtctattcaactactacaaagaaaaattagatggtttccagttgggattagtcaatgccaatccccaaacaaaagttcaactgatgtttttcggtggtaatgccaccaagctgaatgtaggtgcccgtttcaagaaccggctcttctataccatcctcggtggcggtacccattatctggattttggcgataagttttccgctgccctcttctaccgtgccggtcttgaattaccgctctacaaacagctgttcatcagcggagatctgggataccaacatatagaaaccttcaagaacaaggactacggcattccggcacgtctctatgccctccaggcacgtgtcaatctggaataccacctgaccgagcgctttggcatattcctcaccggcggttatggcggcagccgctactacacccaagggaaaacctatgacaaaggcatcattgtagagggcggggtgacgatactgaaattataaattattgtttctccttaatcagccccgtcctatacgccaccagcagtttcatcaaatcctgaatctgcgtaacgagttcacttcctttatccgtatccttcaccatcatacgctgcgaattgaattcgacaaccagggttgtagacttgatgtcttgtccttcttcaatggctttctgacggctctggaacggctcatgctgcaccaactgcaagccgtgggaatgatataccagcgtatatcccgcaattcccgtttccggctgataggcttttgaaaaaccaccgtcaatcaccagcagcttaccatccgctttgatgggtttctcacctttaatggtctttaccggtacatgtccgttgatgatatgcgaatgtggccccggcttcacgccgaactcttcaagaatgcggtcacacacctcagcctcgttgcgcaaagcatagtaatgccctttcgtctccttatgcaatgttttgtcggccacaaaatagcgttcaaaggtagccatcttgtctttatcgaaggaaggggcatccggtccgcaccacatgtaccagacataatccagtgcaaactgtttctcgtccgaaccgtcctcgtcaaagtaagcggtacgtatcagctggtcggtctttttcagcaacttacgtccccagtattccttttggccgatgcggacatgtttaaaactgccgtccgcattcagaggcacggaagcatgataaagcaggttactgttgcacaccagatacatgccgccatacgtaaacaagcagcgcatgtgcttcttcatcttctcgctgttcatgaaagaagaatgaatccggtgcatcagttcgcgctcttcgtccgacagacgatacgggtccgccgggtctacggtggggaaattcacatcgcgcaacggatattccttgccttcgtatacaaacacaccacgctcgaaatccaccagatgcagcagtttccggttctccataccgaactcaggacggcggctgatgatttccgcctccagtttcaactggataaccgtaatcgccttgtgcatctgtgtaatcagccgcaaggtcttctcattgtattccgcatcggcaaagttcattttcggcgcaaagatggtgcaagggtcatccgcataggtatccatggcaaacgttgcaagcggcaacagattgatgccataaccatcctccagcgttgctaaattggcatagcgcatcgacatacggattacgttggctatacaagcatcattacccgatgcggcacccatccacagaatatcgtggttaccccattggatgtcgaaattatgataatcacagagagtatccatgataatatgcgcacccggtccgcggtcgtatatatcgcccacgatatgcagcgagtcgatggtcaagcgctggataaggttgcacatcgccacaataaaatcatccgcacgcttcgtagagataatggtactgattatgacattgatataggcatgcttgttaggttcgatgctcgattcgtgcaacagctcttgaatgatatacgagaactctgctggaagtgccttgcgtactttcgaacgggtatatttggacgaaacgttctggcatacttttaccaactggttcagtgttatcaaataccagtcatccaggtccgtttcctgctccttgataagttgcagcttctcttccggataataaattaacgtacagatttccttcttctcactttcgcgcagtgtatgcccgaatatttcgttcaccttacgtttcactgcccccgatgcattcttcagcacatgctgaaaagcctcatactcgccatgaatatccgtcagaaaatgctctgtacctttcggcagattcagaatggcctccagattgatgatttctgtactggcatcagcaatggtaggaaaactgcgtgat

SEQ ID NO: 367 - DNA, 4000 bp, Escherichia coli
  misc_feature (1)..(5): n is a, c, g, or t
  misc_feature (7)..(10): n is a, c, g, or t
  misc_feature (12)..(13): n is a, c, g, or t
  misc_feature (15)..(17): n is a, c, g, or t
  misc_feature (19)..(21): n is a, c, g, or t
  misc_feature (23)..(25): n is a, c, g, or t
  misc_feature (27)..(32): n is a, c, g, or t
  misc_feature (34)..(35): n is a, c, g, or t
  misc_feature (37)..(40): n is a, c, g, or t
  misc_feature (42)..(43): n is a, c, g, or t
  misc_feature (45)..(45): n is a, c, g, or t
  misc_feature (47)..(50): n is a, c, g, or t
  misc_feature (52)..(52): n is a, c, g, or t
  misc_feature (54)..(60): n is a, c, g, or t
  misc_feature (62)..(84): n is a, c, g, or t
  misc_feature (86)..(95): n is a, c, g, or t
  misc_feature (97)..(100): n is a, c, g, or t
  misc_feature (102)..(104): n is a, c, g, or t
  misc_feature (106)..(106): n is a, c, g, or t
  misc_feature (108)..(111): n is a, c, g, or t
  misc_feature (113)..(115): n is a, c, g, or t
  misc_feature (117)..(120): n is a, c, g, or t
  misc_feature (122)..(130): n is a, c, g, or t
  misc_feature (132)..(137): n is a, c, g, or t
  misc_feature (139)..(139): n is a, c, g, or t
  misc_feature (141)..(143): n is a, c, g, or t
  misc_feature (145)..(151): n is a, c, g, or t
  misc_feature (154)..(154): n is a, c, g, or t
  misc_feature (191)..(192): n is a, c, g, or t
  misc_feature (255)..(255): n is a, c, g, or t
  misc_feature (300)..(300): n is a, c, g, or t
  misc_feature (1979)..(1979): n is a, c, g, or t
  misc_feature (1983)..(1983): n is a, c, g, or t
  misc_feature (1987)..(1987): n is a, c, g, or t
  misc_feature (1991)..(1991): n is a, c, g, or t
  misc_feature (1995)..(1995): n is a, c, g, or t
  misc_feature (3449)..(3449): n is a, c, g, or t
nnnnncnnnngnncnnntnnntnnnannnnnncnngnnnngnnangnnnngntnnnnnnnannnnnnnnnnnnnnnnnnnnnnngnnnnnnnnnngnnnngnnngngnnnngnnngnnnngnnnnnnnnntnnnnnngncnnngnnnnnnnggngcgcgcgttcggcgaagcgagagtgcaaacgttcgcnnttggtccgagacacggcgtcttcgtcactgattcgggaaacgcgcacgctttcggttggaacntgtatggctcgtgtgggctcggcgatactttcggtgatttcgtcnccaagccgacggtaattgagagcttgagacgcgtcgacgtgcgcgtcgattcggtggcgtgcggcgacgcgttcacacttctcctctcgacagacggctatctgtacgccaccggctccaactcggacggccaactcggcgtgcacgaatcagacgtctcacgaggcgcgtcgactcgaacgccgacgctcgtggaaccaccgaacgggatcgacgcctttgtatccgttcgatgcggccctcgacacgcttcggcgctcgccgacgacggcgccgtctacctctggggatccaacgaccacgctcagctcaccggctggaacgaacacggaaatggcgcagacgacatcgtcgttaccctacatcccccgttcacgagagccgcgccagctgtcggccgacgcgtcgtccatcacgtatgtggccgagcgcactgttcaattttcatcgacgaagtcgatttatgatccttcacaacaccggtgaccttgtagataatttgagcatttcattccattcgcagttcgtcctttccgaataccgcgcatccctcccgtcgcgttctctttcgcgttcgcgcgctcataatggctaagccctagtcgctagggtttatatctatgagagttgtatctctgcgaggatttgtgcgagtgcccaccgcccgtcacacgctggcgcgtcgcgaccacttggcacgttcgaccgcgagagccgatgcgcgcgcacgcgatgaccaaatctgcgtcttcgcgcgcgcatgctccgacgcgcggcgcgagagagcgccgcgcgagcacgagcggacgcgataagatgacgtcgtcctgtggtggatcggtcgtctcgcgtcgacgacgcgaaacccgagcgagggcgacggtgacgggcgaaaagaaaatagagaacgatgcggagacgccgagttgggcgacagaaatgtcgacgcgggtgatgagcgggattttggcgacggcattggcggcgacgtgcgcgacggagcccgcgttggcggcttcggagtcgacgaggttgtccatcagagaagagattcgtcgcgaggagcgcgccgtggtggatgaggtgattcgcgacgaacagattggactcgaggcgatccgtgagggcgcgacggcgggtgaacgtctggatatgtttttggaaaaagagcccccggtggcgatcttcttcaccgccatgctcctcgtaaacggatcctttggtctcatttacaccctcttcgtccgcgaaaccgacgccgggccgggcggggagttcggcaaaggcatcgtcgcccttcgcaaggaggttgtcaagggcatattcgcctttttcaactccgccttgggtagatacaccacgcgcgacggcgagtcttcgtagttcgctcgccgctcaaccgcacctcgatgtaacattaatctcagcgccatcgcttccccggtatcaatcatcacatttttccctctttcatttgtatacctttcccgcgctctccgtcgcatcgtcccagatcgcgcgctgcgcgttccttggagagcctctttcgttcgctcggctgcgacgacgactgagagtaacactaaaaacgcgaacacccacgcgaatggagcttgaagtccatcttcactcttcgtcgcgtcgcgaacgaccggcggaaaccgcgagcgaacgaacgnacgnacgnacgnacgnacgtggagacacctcaccgacgatgcacaccgaacgcgacggactcctcggcgcgtcggcgtcgtcggcgtcaccgaatccatcggctgcggatgaatactttgacgcggaaccgcgcgcgcgtcgagcgcgtacccgcgcgatggcgttcgtcgcgctcggcgcgttggcgacgatgtgcgtcggtgcggcgatgacggatgatatgcttcgacacacgcgacggattcggggagacggggaggttgggaccgacgcgaggcgaacgccgcgtttgggcggattgccacaggtgacgccggcgccgccgtggaagggatactcgaatggtgggatggtcgcgacagagtttatggcgatgaatgatctggaccaggtgccgatgacggaggaagaggtagacgcagccaagtacgtgacgccgttgggtgtgaatggttttgaagcgtcgaggtatttggacggggagaataagacgagacgcaagttagagacgccgatgatgatcatagcgttggacgcgagcgtgaaggatcaaaagaaggctctcgatctcaaggcatcgattgaaagatcgtaccggctcgagccgactcagagtttggtgacgctcgagagcgcaacctatcccgcaaggtggccagagactatcgaactcgcggatgaagccgtcgaagagttgaccaagttgcggccgtacggggcgctgtactacattcaaagccttcacagcgcgcacaaaaacaacgacacgcttcctcgcgccgcgatgggagtgtcgcatcacattgggtgcttgttttctcacatgcgcatgtggcggttacacgccaagagacacaaccaatggtccttcatctttgagagcgacggcggatggtggctcggtgcgcctccgaagcatcttcagagcatcgtcgaccacgcgccgcatcgcgcggatctcatctttaccaagagaggtttcgtcaactctggtcagtttgtcaagcagtggaaatcgggcgaagacatgatgtacatgtaccgcgtcaaccggatgatcggcggcgcgggtttatcgagctacctcatcggcccgaatttcgtcgataaaatttacgagcaaatcgtcttccaccgcggggcagacatggtagacgcttggttgatgctccgcatgtgcagcacgaaggatgagcgatacacgacgtacaagagccggatcaactgcttccacgccgagtcaaagttgaaacccgcgcgacaagtcggcggttatcttccggaatggtacggcatcgatgagaccccgcgcgatacggataactggaacgagtggctcaagtacgagcgcaacggaacggcgtactacgagcgagcgagcgagcgaatggctgcgtggaacgccgcgcaagaggaaaagcgggcgctcaaggctcaactggcgacggagctcggcgaacccgcgcccnaattgggacgcgagcagaccgtcagggagcgacgccgacgcgcgcgagcgctcaacagacaaatccgcgccaacgctcgaggccagcaaccagcggcgcgcgaatagatcacacatcagagacttttttgattgtagtttttacaccaggtacacacgcgttgggagtttgacatcacatcacccgttctccaaccgctctctcctgacctcaactgaggaaaacgcgcgcgcgcctcacaacgcgaccgacgcgtcggatcggccgacccatcgcgcgcgtgcatcgacgcgagaggaaacaagacgtttgccgacgcgtgaagagccgcgcgtgaagacgaagaaccgacgacgacaaagggaaggatggatgacgagatcaagtttttgagaagaccggtggacacgctgcgcctcggactcgccgcggcgcgtgaggttggaacgtcgaagacgaaacacccggtgcaagcgatgcaagaggaggtgcgtgaaaagacggagcgacgacggcggcgactacgatcacggaacggcgatgcgcgcatc

SEQ ID NO: 368 - DNA, 4000 bp, Escherichia coli
  misc_feature (4)..(4): n is a, c, g, or t
  misc_feature (94)..(94): n is a, c, g, or t
  misc_feature (154)..(154): n is a, c, g, or t
  misc_feature (1012)..(1012): n is a, c, g, or t
  misc_feature (1052)..(1052): n is a, c, g, or t
  misc_feature (1198)..(1198): n is a, c, g, or t
  misc_feature (1203)..(1203): n is a, c, g, or t
  misc_feature (1358)..(1358): n is a, c, g, or t
  misc_feature (1450)..(1450): n is a, c, g, or t
  misc_feature (3337)..(3337): n is a, c, g, or t
  misc_feature (3356)..(3356): n is a, c, g, or t
  misc_feature (3482)..(3482): n is a, c, g, or t
  misc_feature (3608)..(3608): n is a, c, g, or t
ggtngcgcctttcatgggccctttcatagctccagcaccgcaacctgtgcaaatattaaattcacgcaaacccaactgataacctacttttttngtatattgatattcggtttcacctattgaatgtccaccccagcaaactactaaatttggntccgtcaagtctctctgtaatcctgtattacgtaaaatatgaaagacaaaatcagtgattgaagacgattgatttaaatcaaaacctcctttttttgaaagttctgtaccaacaaacacaatatcacgcagcaccgaaaacagatgttcattgatgccctgaatcaactttccatccacaaatgctttgggcggtgcattgcggatttcaagcttgatgctgcgagtctgctgtacaacttcaatgctgaaatcggggaaactttcgaacatttcttttccgctgtcagtgtgactgtcactgttcagcacagcgagggcacagcgtcggaacagttcattcagtcctccgttttgaggatcactgagttggcgaatttcttgttgtgaaaggaaatctaggataccttttggacgaatactggcatccataatttacaggctgggaaaaaggtttgaaataaagaaatgaaaagcttagtttagcggcaggaaagagtttttaagaggcacaagaagattagttcatggctttaattgctggattcctgattttttgatgagttgaggaattatttttagtgccctctgctcaccgatttgtatttacggactgaccagtccgtttaacaacttgctcaattgaactgactgcttgctggtgcagaggcagatggcactcccgcagatgcgccgccaactgcaaacgaactgatgccacgttttgtttcacgactgccgcattccggacagtcaatttgtgaatccatttcagaaaaccgacgaagttctgtaaatccacttgtgcattgctgacactggtattcataaagaggcatttttctcctgcattaaatanttgaaaaatcagtgttttagtctatcatgttttatgttgnaaatcaatcagttttagtactgtgctagattgtcgctgaaatttcttgagacttttttgaattaactgatgagagacattttaatgatataataatatactgaaacagaaataattcaggctaaatagtaaacaaactaatgtaantgaanttaaatcactgtttgagaaatccgcaaaataatcattattacaagcagggatactaaatattatcttgtattttaagacaggattaccatagaatcaaacgttccaacaatagccaataaacgtatttttaggctgttttaatcaaagtacttantcagagaataattatgaagttcattaaagtatctttagcaattttcatttcacttttattgtttagccaaacaggcagcgcccaagagtctnctgccgaaaacacgaagcagagttcaacaggaaccgaggatgtcactggggattttgtttttcacaaggtgtctgcaggagataacaaaaaagtatttcgcgatgctgtgacaggacacattgtcagtaacaaagggatacagaatttttatgctgtgcctgcagttgaaaccaaatggctaggcacaataattaattctgaaatcgaatggcataaacaactgcagaaacttgaacagacataccgtaaaacatttcagagacgtgctgagctaaaatccggccaaagcgatcgtgcagtacgtataggaaactacagcttgaatatttctaaacttgaaaaagagattgctgaaatacgtcggcaaattgtccagattaacgttgatcagcaggtttatattaacagtcttcgcaaaacgccgatcacgactctagttgctatcaaaacgctttatacgcctgatttaatgagcagcaaggacaaacttgatgtgcttaacagcgcaattttcaacagtatggaagaaccggtgttgggccatataagctcgacttacggaaacagtatcaccattccatttcaatccggacatattcgcgtgacctacatgtatccggaaaatatcacgtattttgattctgaagcaaatgaacatgtctatctgtttttgcgcgtggaagcctaccctttttcaacaggcgcttcaaacgatggaactgttgaggacagaggagtaggagtagaaatcctttcaaatattaagcaaatccagtcttacctcaacacaaaagaagttggtgataaacgtttaatggactggctgatcaaagaatatagcaatcaaaaactcaacaatgatcatctgttgaacttgatcacaggcaagttaggtgatttcaaaatgttccgcaatggtctaaagcagagtatttcagagctacgttcaaaagtaaaaattatcgttgctcaaagggattcgcttgttggcagtggagacgcggaaattatcgaagctgaatacaaacaagcaaaaaatctttatcatcaattctatgcaacaagaaatgtactgactcaggagaagtatactcttgaaaacgatgtgatgttcagtttcttccacatggaaggtgaatcaactaagaaaaacgctaacactgaacaaaaacaaatgctggattcaaatgttgcatcaaatattcctatcagcggcagaccactgaaagatatttttactgatatcctgattactgcaaatcaaaaaaggaaacttaatctgcagaactatcgtgaaagaatttaccgtgcaaacgaagaacagacacagctcattcagggtgcattagagtgggaagtgaaaagtgaagaattcagcattttgaaacttactcgtggaaatgtaggttcaagaagccattttgtactgcatcttgcaaaacgcagcagtctaatttccaagcctggctttcctgcaccaaaaagcggtgtctgcaagtcaacactcttgtttaaacgtggaaaaaatgcgatgcgtaactcttcaaaacctgcattggataaactcgcaaaatgcctgcgtaaatacccaaaacaaatgatccagattactggtcatactgacccactcaaaccggattatggcgaaggttcaaaattcagtaatgttactttaggcttaaaacgcgctgaggcggtcatggactctttaattgcgctggacttcaaccctggccgtttcattgtagtcagcaggggagcaaaggatcctgttgccattggaagagaaaagaaagacctcgagaaaaaccgaagagttgaaattatctcaacaccaaaggaataatccgatccttaattaaactaacagctttaacggatttgcnggtagagtttcaggaactnctcaacaaagtaagtggcgaacttctcagtgtacgctgagtggcaagccatgctaccccaacgcttaaagctgtaactccgataatgctgcctaaacttgtctgccaagtccatttccagagattntcaaaaaaccaccaggaaattccgtaagacattattaagctgaaagccaccccgaacaagcctgcaaaaatacccagcaccgcaaattcaatttgtatcatcttctggatgtcggaaaatctggcnccaagtaccttaagcagattcagctcccagagtcgtccctcaacttcgtgacgtgcaattgaaaagacaaccaccaggcctgccagaattgagagataggccatcagcctgagcgccaaaaccatttgatcagaaattttcaagactcgcccaaccatgcgtgtcacatcaatcacggaaacatttggataatcactgacaatccggttttgcacattcagccggagtgatgcgtcaagaccgcctattgagcctaaaaatgttccgggggcatcttctaaaactccgggttgaaaaagaatgaaaaaattcggttgaaaactattccactgtacccggcgcaggttgatgacgatggcctcgaccaaaacttcctgcacattaaaggtcaa

SEQ ID NO: 369 - DNA, 4000 bp, Escherichia coli
  misc_feature (791)..(791): n is a, c, g, or t
  misc_feature (1157)..(1157): n is a, c, g, or t
  misc_feature (1523)..(1523): n is a, c, g, or t
  misc_feature (1529)..(1529): n is a, c, g, or t
  misc_feature (1857)..(1857): n is a, c, g, or t
  misc_feature (3574)..(3574): n is a, c, g, or t
  misc_feature (3697)..(3697): n is a, c, g, or t
ctggtttattcgttctgcatgaagggcataaaattgaaattaaagataattccatgcgcgaatggaaagagattcgcttggaagatggtaaggtagggtggattcctgcttctgcgatagaagtgatttaagagtatccattgctaaatatagaagcccgtatgaaataaaggaaactatttccttttacttcatacgggttctttttgtatttatgagaatgttaaacatataatggaaaaatacagataaatagtttgttttatctttttttttccttaagtttatagcgtgataaagaaataacaaagtattaaccattaaatttatgaatatgagaacgataacatttaatgaactccgtaagattaaagactcattacctagtggtagtatgcatagaatagccgatgaacttggacttaatgttgacactgtaagaaatttctttggcggtcataactttaaggagggtaaaagtgttggaattcacttagaacccggtccggatggcggtttagtaatgattgatgatactaccgttcttgatcgggctttaaaaattttagatgaaatggcaggtgaaactgctgaacctgttcaggcttaagaaaagaaagtaaagaaggatcccaattgctgagaaacaattgggatttcttgtttgttttgtaaataaatataatagacgacttatggaagataaattagtaacattagcgattcttacgtatgctaaggcacaaatactaaagaatgttctcgaaaatgaaggtattgagacttacatncataatgtaaatcaaatacagccggttgtatcttccggtgtgcgtgttcgtataaaagaaagcgacttaccgcatgctttgaaaattacggaaagctcggcatggttgtccgaagaagtagtgggagagaagatgccccaaatagagaaaggcagtaataaggtcttgattcctgtcgatttttcaagttattcattgaaagcatgtgagttcggttttaattttgcaaaaaacatagatgctgaagtagttttgcttcatgtatattttacacctatctatgcgacttcattgccatacggtgatgtttttaactatcagttgagtgatgaagagaatgtccggaatatattgcagaaagtacantcggatttgaatgctttgtccgataaagtaaaagctaaagttacatccggagagtttcctgatataaaatacacttgcgtattgagagaaggcattccagaagaagagatattacgctattctaaagaaaatcgtccgagaattatcatcatgggaacgcgtggtaagaatcagaaagatattgatttgattggtagtgtaaccgctgaagttatcgagcgtagtcgcgtaccggttttagccattccggagaatacaccgttcaaagaatttaacgctgtaaaacgtattgcatttattacgaattttgaccagcgcgacttgatagcttttgattcattaatcaatagtttaaagccattttgnttctcngtttctttaatacacttagctgatgtaaaagacacttggaatgagataaagttgggtggcattaaagagtatttccaaaaacagtatccgcaattggaaattcattatgatgtagtgaagaatgatgacttccttaatagcttggatgaatatattaaaactaatcacatagatattattacattgacatcatataagcgaaatatattttctcgtttgtttaatccaggaattgccagaaaaatgattttccattctgatacaccattgctggttatctatgggcggcctaattgaaatgataattttaatctgtctaggtaaggangtgggctaccgctaaatgctgaattagttttagtggagtccacttattttttatcttttcatggttatactattacatgtcccatttcctatgtttgtgatgtaatatcaatattatgtttaatatataacaccataaactaaaataaacctttatccttctctaatttggaagaaaattataccaaagatagcttacatattcaagctatctttggtatagtagcaattcaattattgcatcaatttttctatttcatcaaattcaggacccatttgtaagttataataaactctgtataatccatttagccacaaatctttctgttcaggtttcagttctcttgctttttcataattaggtcttgccttttcatagaaaactttcagtgtagcttggtcttctttgtattttggattattgacatcagtagtagctttttcagagaaatcctgagcttgcaggcaatagattaagcccaagttggaatatgcttctgcatagttaggatctacttcaatggttttgttgtagaattcaatggctttttcataatctttcatgttatgataaaggtatccttttacgtacaaatagaatgtgttattaggatctttagccaacatatcatctgcaaactgcattgcttcgtcaaacttattattattgctataataatcaatcagatgtccaaagaagaatgaatgttcaggatacttttgaataccatcttttaaggaagcgatccacttgacagtatcaccttgagctttcaatgctgtagaaataaattccatggcatatttacccacttctttgtcctcctttgcataaggtgcatatttcaacacgcttggataatcttccattttggctgcagctaagcttgcataataagcaatttggggcaatacagtatctgtttgaagcagattctccttttcaaacataggattgatggcaatgtctacataagttgcgaagaaatccaaagcctctttattcttatctaaattaaagaactggataccaccgttaatcaggttgggacgcgcagctaatatagcagcactgttcgatcttctgaacttatttttgattttacctttttcgttaggaatctgtgcaagttcatcgcatttaaagtagtatttgcacatattcagtgcgctgttatacactttaagagtatcataaggctttcttaaataagcattctccatttccttttcattgattctcttttgaataaagccggctacatcccatgtttcggcgttgtctttggtttcagcattgttcagagcttcattgatgagcttctctgcttgtgcaaaatccggttttacgtcgttagcgatgctttttgcctctttcacgctcttttcctgagcgaaggtaaagcctgccgcaagtagtaaaaccattgaaaataatactcttttcatgattgtagaaaattttaaattaatattgtgtctattcttcattttcattgtttactatatcgttctgagttttttctgatgcatcgctatcctcttctgcaatgatatcctcttcggtttccgaggtaactttacatacggagccaatttcatcattacgtttttcaagattaatcagtcgtactccctgcgtagcacgtcccattatacgaacatctgctactttcagacggatggtgatacccgatttattgataatcattaaatcnttctcatctgttacagacttgattgttaccagtttaccggttttatcggtgatattcatagtttttacacctttaccgccacggttcgtcttacgataatcctcaatatcggaacgcttaccntatccttgttctgacacaaccatgattgtctcagtttcagggtctttgatacaaatcattccgacaacttcgtcttgtccgtcttcatcaagcgtcatgccgcgtacaccggtagctgtacgtcccattacgcgtacggcactttcgtggaaacggatggcacgtccgttacgattggcaatgataatctcattgtcaccgttagtcatgcgcacttcaattacgcggtcatcttcgcggattgtaatggcattgacaccattttggcgaggacgggaatattgttcgagcaatgttttctta

SEQ ID NO: 370 - DNA, 4000 bp, Escherichia coli
  misc_feature (1991)..(1991): n is a, c, g, or t
  misc_feature (3783)..(3788): n is a, c, g, or t
  misc_feature (3791)..(3792): n is a, c, g, or t
cccgaaactgcacgccacggcgccgccgccgccgatgcagcgcgatccggatatcgagcgcgaggtcgtagagcacatgcgccgcgccggcgccctcgatgcgctgcgcgagtcgacgatcgccgcgctcaaaacgaacgaagagctcaaaacctttgccgaattcgcggtgcgctcgagtcaggcgttgcgagatccgtacgcgcgctcgaggtcgcgaaaagagctcgtggatgagttgttcgtggagattgagcaacggctgatggatgaagtgcgagcgaagacgtttgagacgttgacggagacggaggcgggcgccgtggggcgagaggcgtacgagagaacgtacgccgcgcgagaggatgtcaagcatgacgggcgttgattgcgtgcgtgcgaggtgtaggattgttaaactagcgttgatttagcgttgaaatgtacagtagatagagtattacgcgaatgttttgtgaagaacgtatagcgagggtgcagtgaactgcgagcacatttctaaataacattttttctattttttttctcaatgatagcttctagtcgcggcaccgagggtagcgatgccgtcgccgagcgcccacgatgcctcaacgtcttggttcttgtagcggattttatcgagcatgtggatcgtttcggtgtcgctcacgccgtaaccagtcgtgagcagcgcgtaaatgtacgtcaactccaagcataaataatcaacatcaacctttgccgcgacggcgaatgggaattcactcgcgagtttggcttgaggcgtcacgcatgcatgcgatgcggcagtcttgaatgcgccggccgtggtggatacgatcgtcgacggcgtctttggatgcggcgcgaccccggcttgaacaccgcgctcgacgatatacgacatgacatacaatggcgtctttctcggtgtcgtccacgccccagcgaacgaacacggtcctcgtccgcacttagttctattatcttcttcaaatgtctctatcacagcggcgagacaacgcttgaaatcggtccctaacgttgcgcttccctttgcctcgtacgtctcacccggctcgagaccgtagcaatcctttgtacacgtgtcttgaacgctaccaggtaagcacgggtgcgtgccatcttcatcgcgcttaccaaatcggtacaatttcgctcgcacggcgatgagaccgtatcccttgaagctatgaatgtacgcgctgtacgcgctaaacggcgtctgaattttacgcacatacccgctcggcgccttatccataatcgcgctcccgaccgcatacgcgatttgtgtcgagcctccacctaaatcaataacagctacagtggactcgggtgattttccgagtcgttctaataaatagttcgtcgcaacccagccatgcgcgccttcgtctaccccatccataatcgaaacaaacgtttcgctctgcggatgaaagcccgcgcgcgcaatcttcgctcgcacgctatccatgatggcatccgcagcgccctgaccttcaggcattaatcgaagtccagcggtggcgcgaacgctgaacggcgtcgccgagcgcgcgagctcgggaaccactgacttggcgcgagagatgagttcgtcgagcgatgcgctcgcggcgtccgcagaagacccgtacgacttcaaccctggctcgatggcgtgaaagtactccgaatgcagtcgctcgcggccaaaatagtccgtctgaaacgtaaagacgtgaacgcgagagccagttgagccagcgtctaacacgatgctaaatctttttgacgttcgagtcgaggcaaagcctacggcgtctgaccacagcgtgaacgtgaccgtgagtgcaatgacgacaatgaaaaccacgagtgtggtgagcgaccgcggcgaactcgccgcgcgtgttggggcgaatgccatggcgcctcggatgcgcgcgcggcgcatgcgaggccgagtttgcggtcgatangtagccgcatacatgagagtgcactgcgaggtcatagaggcgtgaatgatagtattattacaacagtatgagttttatcgttatggtaccgtagagttacactggacatcgccgacgaagtggctttctcgccaagagaagcgcgacgcacatcgctccggcgagcgcggcgagcatcgcaaaaaatccactgggagtgtcaaacgtcggataagtcgcgccaagcaagccactgaagtagttgccaaaaaagtatgaaccaaaccaaagcccaatgatcgcgctgagcaagccttcgggggctatttttgaaatgtacgacagcgccaccggaaacgtgtacaattcgccagccgtgaggaaaatttgattcaacacaatccaaatcacgctcactcgcacgggcgacgcatgagagtcgaccgggagtgcgccaaacattagaaccgcaaacgacgtggcgagtaaaccacatccgagggcgattttggtcacttggtggggttcggaattcgtcttcgcttgacgttcccacaccatcgtcaccgccggcgtgagagctaataccaacgccggattgagcgccgcgacgaactctgtaggcaagccgtgtaaattaatgtgctcatccgcaaaaatcattagcgttgatccttgctgctcgtatacgacggaaaatgccacgccagcgacgcatacgatgagcgtcgccatcatcgcgttgccgttctcccgcatcaaatccaacatctttgcaaacgagttcttctcattcaccgccagcggcgatgtcaaaggcgtggtatctccgccgaattcttcgtcgcgcacatccaacgtcgtcgcatcaattacttccactcgtgaatctaagatgtacctcctgttcgtcgtgtaaatgaccaacgcgcacgccatgccaatcgccgcgctcgcgaacgccgcaccgtaaccaaaatacacgcgaacggttcccgcaatcagcggcgagaagaacgctccgatattaatgcaacagtaaaaaattgaaaacccttgatcgcgtctcgggtcatccttggcgtacaacgcgctcagctgcgtcgacatggatggtttaaacgccccgttcccgacgcacaccaaaaccaatccaatcacaaacgcccactcactcgccatcgccgcgtacccaatcgccatgattgtcgcaccaactaacgccgaacgatgagaaccgagaatggcgtcagaaatcacccctccgaacaccggcgtgagatacgtgaggcacgcaaaccaaccgtacaaacgcgcgctcgtctcctccgccgccaccttccgcgccgccatcgcccccgcactcgcggcatgtgttgagaaatcatacccactcgccatctgtcctatcgcccgcaatccaaacacccgatcgacatcgaacgtcgcgtccgagagaatcttcgtcgcgtacaacaccaacagcgcgcgcgctgcgtagtacccgaaccgttcccacatttccgtcgcgcccacgaccgcgagaccgacggggtggccgtaaatcgttttacgtcgcgcggtgccgccgctgccgccgccgctggcgctaccgccgagacgcggcgaacgcgcgcgcgatgcgccgagaagcggttcagcatcatctcccgcgccttcgacgtccccgcgcgcggcgcgatcgtcatccgtcgacgacgacgacggcggcgccgacggcatgcgcgcacctctcgtctcggcctccgtgcgcgtccctgtgcgcgcgtgttccgtgcgcgcgcgcgcgcgnnnnnntgnngcgctggagtgccgcgctggcgcccttcacttcgcgtcgttcgccgaccgagtccgcacgcgcgcgcacgctcgaacgcgcgcacacacacgcacgcatggcgcacgcatcgctcgtcgcgtcgcgcgcgcccgcgaccgtcgctcgcgcgcgcgcgcgcgctgggcaccgacgttcggttggattaatcattccagcgcgtggcgaa

SEQ ID NO: 371 - DNA, 4000 bp, Escherichia coli
  misc_feature (1987)..(1987): n is a, c, g, or t
  misc_feature (1989)..(1989): n is a, c, g, or t
  misc_feature (2981)..(2981): n is a, c, g, or t
  misc_feature (2983)..(2984): n is a, c, g, or t
  misc_feature (2989)..(2996): n is a, c, g, or t
  misc_feature (2998)..(2998): n is a, c, g, or t
  misc_feature (3000)..(3004): n is a, c, g, or t
  misc_feature (3006)..(3006): n is a, c, g, or t
  misc_feature (3008)..(3008): n is a, c, g, or t
  misc_feature (3011)..(3011): n is a, c, g, or t
  misc_feature (3013)..(3013): n is a, c, g, or t
  misc_feature (3015)..(3018): n is a, c, g, or t
  misc_feature (3020)..(3021): n is a, c, g, or t
  misc_feature (3023)..(3024): n is a, c, g, or t
  misc_feature (3027)..(3027): n is a, c, g, or t
  misc_feature (3029)..(3030): n is a, c, g, or t
  misc_feature (3032)..(3035): n is a, c, g, or t
  misc_feature (3037)..(3041): n is a, c, g, or t
  misc_feature (3044)..(3049): n is a, c, g, or t
  misc_feature (3051)..(3053): n is a, c, g, or t
  misc_feature (3055)..(3055): n is a, c, g, or t
  misc_feature (3058)..(3058): n is a, c, g, or t
  misc_feature (3060)..(3064): n is a, c, g, or t
  misc_feature (3067)..(3072): n is a, c, g, or t
  misc_feature (3074)..(3083): n is a, c, g, or t
  misc_feature (3085)..(3086): n is a, c, g, or t
  misc_feature (3089)..(3089): n is a, c, g, or t
  misc_feature (3092)..(3100): n is a, c, g, or t
  misc_feature (3102)..(3102): n is a, c, g, or t
  misc_feature (3105)..(3107): n is a, c, g, or t
  misc_feature (3109)..(3109): n is a, c, g, or t
  misc_feature (3112)..(3114): n is a, c, g, or t
  misc_feature (3117)..(3118): n is a, c, g, or t
  misc_feature (3120)..(3125): n is a, c, g, or t
  misc_feature (3127)..(3127): n is a, c, g, or t
  misc_feature (3134)..(3136): n is a, c, g, or t
  misc_feature (3138)..(3139): n is a, c, g, or t
  misc_feature (3141)..(3141): n is a, c, g, or t
  misc_feature (3143)..(3147): n is a, c, g, or t
  misc_feature (3149)..(3158): n is a, c, g, or t
  misc_feature (3160)..(3164): n is a, c, g, or t
  misc_feature (3166)..(3166): n is a, c, g, or t
  misc_feature (3169)..(3170): n is a, c, g, or t
  misc_feature (3172)..(3173): n is a, c, g, or t
  misc_feature (3175)..(3175): n is a, c, g, or t
  misc_feature (3177)..(3178): n is a, c, g, or t
  misc_feature (3180)..(3180): n is a, c, g, or t
  misc_feature (3182)..(3183): n is a, c, g, or t
  misc_feature (3185)..(3186): n is a, c, g, or t
  misc_feature (3188)..(3191): n is a, c, g, or t
  misc_feature (3193)..(3198): n is a, c, g, or t
  misc_feature (3200)..(3206): n is a, c, g, or t
  misc_feature (3208)..(3211): n is a, c, g, or t
  misc_feature (3214)..(3217): n is a, c, g, or t
  misc_feature (3219)..(3220): n is a, c, g, or t
  misc_feature (3222)..(3222): n is a, c, g, or t
  misc_feature (3224)..(3225): n is a, c, g, or t
  misc_feature (3228)..(3228): n is a, c, g, or t
  misc_feature (3232)..(3236): n is a, c, g, or t
  misc_feature (3238)..(3239): n is a, c, g, or t
  misc_feature (3241)..(3246): n is a, c, g, or t
  misc_feature (3248)..(3248): n is a, c, g, or t
  misc_feature (3251)..(3251): n is a, c, g, or t
  misc_feature (3253)..(3253): n is a, c, g, or t
  misc_feature (3256)..(3256): n is a, c, g, or t
  misc_feature (3258)..(3268): n is a, c, g, or t
  misc_feature (3272)..(3272): n is a, c, g, or t
  misc_feature (3278)..(3279): n is a, c, g, or t
  misc_feature (3281)..(3281): n is a, c, g, or t
  misc_feature (3283)..(3284): n is a, c, g, or t
  misc_feature (3286)..(3287): n is a, c, g, or t
  misc_feature (3289)..(3292): n is a, c, g, or t
  misc_feature (3296)..(3309): n is a, c, g, or t
  misc_feature (3311)..(3311): n is a, c, g, or t
  misc_feature (3313)..(3315): n is a, c, g, or t
  misc_feature (3317)..(3319): n is a, c, g, or t
  misc_feature (3321)..(3321): n is a, c, g, or t
  misc_feature (3323)..(3324): n is a, c, g, or t
  misc_feature (3328)..(3331): n is a, c, g, or t
  misc_feature (3333)..(3334): n is a, c, g, or t
  misc_feature (3338)..(3345): n is a, c, g, or t
  misc_feature (3347)..(3348): n is a, c, g, or t
  misc_feature (3350)..(3353): n is a, c, g, or t
  misc_feature (3355)..(3355): n is a, c, g, or t
  misc_feature (3357)..(3358): n is a, c, g, or t
  misc_feature (3362)..(3366): n is a, c, g, or t
  misc_feature (3368)..(3373): n is a, c, g, or t
  misc_feature (3376)..(3381): n is a, c, g, or t
  misc_feature (3383)..(3383): n is a, c, g, or t
  misc_feature (3385)..(3386): n is a, c, g, or t
  misc_feature (3388)..(3391): n is a, c, g, or t
  misc_feature (3393)..(3396): n is a, c, g, or t
  misc_feature (3398)..(3399): n is a, c, g, or t
  misc_feature (3402)..(3402): n is a, c, g, or t
  misc_feature (3404)..(3404): n is a, c, g, or t
  misc_feature (3407)..(3408): n is a, c, g, or t
  misc_feature (3411)..(3416): n is a, c, g, or t
  misc_feature (3418)..(3423): n is a, c, g, or t
  misc_feature (3425)..(3426): n is a, c, g, or t
  misc_feature (3428)..(3431): n is a, c, g, or t
  misc_feature (3434)..(3436): n is a, c, g, or t
  misc_feature (3438)..(3444): n is a, c, g, or t
  misc_feature (3446)..(3447): n is a, c, g, or t
  misc_feature (3449)..(3450): n is a, c, g, or t
  misc_feature (3452)..(3452): n is a, c, g, or t
  misc_feature (3455)..(3456): n is a, c, g, or t
  misc_feature (3461)..(3461): n is a, c, g, or t
  misc_feature (3463)..(3463): n is a, c, g, or t
  misc_feature (3465)..(3466): n is a, c, g, or t
  misc_feature (3468)..(3468): n is a, c, g, or t
  misc_feature (3470)..(3473): n is a, c, g, or t
  misc_feature (3475)..(3476): n is a, c, g, or t
  misc_feature (3478)..(3482): n is a, c, g, or t
  misc_feature (3484)..(3485): n is a, c, g, or t
  misc_feature (3487)..(3491): n is a, c, g, or t
  misc_feature (3493)..(3498): n is a, c, g, or t
  misc_feature (3501)..(3501): n is a, c, g, or t
  misc_feature (3503)..(3503): n is a, c, g, or t
  misc_feature (3505)..(3506): n is a, c, g, or t
  misc_feature (3508)..(3513): n is a, c, g, or t
  misc_feature (3515)..(3515): n is a, c, g, or t
  misc_feature (3518)..(3525): n is a, c, g, or t
  misc_feature (3527)..(3527): n is a, c, g, or t
  misc_feature (3531)..(3534): n is a, c, g, or t
  misc_feature (3536)..(3536): n is a, c, g, or t
  misc_feature (3543)..(3544): n is a, c, g, or t
  misc_feature (3546)..(3546): n is a, c, g, or t
  misc_feature (3549)..(3551): n is a, c, g, or t
  misc_feature (3553)..(3553): n is a, c, g, or t
  misc_feature (3555)..(3563): n is a, c, g, or t
  misc_feature (3565)..(3570): n is a, c, g, or t
  misc_feature (3572)..(3572): n is a, c, g, or t
  misc_feature (3576)..(3576): n is a, c, g, or t
  misc_feature (3578)..(3578): n is a, c, g, or t
  misc_feature (3580)..(3581): n is a, c, g, or t
  misc_feature (3584)..(3584): n is a, c, g, or t
  misc_feature (3586)..(3587): n is a, c, g, or t
  misc_feature (3589)..(3598): n is a, c, g, or t
  misc_feature (3600)..(3600): n is a, c, g, or t
  misc_feature (3602)..(3608): n is a, c, g, or t
  misc_feature (3611)..(3611): n is a, c, g, or t
  misc_feature (3614)..(3614): n is a, c, g, or t
  misc_feature (3618)..(3618): n is a, c, g, or t
  misc_feature (3622)..(3622): n is a, c, g, or t
  misc_feature (3624)..(3624): n is a, c, g, or t
  misc_feature (3626)..(3627): n is a, c, g, or t
  misc_feature (3629)..(3631): n is a, c, g, or t
  misc_feature (3633)..(3638): n is a, c, g, or t
  misc_feature (3640)..(3642): n is a, c, g, or t
  misc_feature (3644)..(3647): n is a, c, g, or t
  misc_feature (3649)..(3652): n is a, c, g, or t
  misc_feature (3654)..(3657): n is a, c, g, or t
  misc_feature (3659)..(3659): n is a, c, g, or t
  misc_feature (3661)..(3661): n is a, c, g, or t
  misc_feature (3663)..(3667): n is a, c, g, or t
  misc_feature (3669)..(3672): n is a, c, g, or t
  misc_feature (3677)..(3679): n is a, c, g, or t
  misc_feature (3681)..(3681): n is a, c, g, or t
  misc_feature (3683)..(3684): n is a, c, g, or t
  misc_feature (3686)..(3687): n is a, c, g, or t
  misc_feature (3690)..(3693): n is a, c, g, or t
  misc_feature (3696)..(3696): n is a, c, g, or t
  misc_feature (3699)..(3699): n is a, c, g, or t
  misc_feature (3701)..(3704): n is a, c, g, or t
  misc_feature (3707)..(3709): n is a, c, g, or t
  misc_feature (3711)..(3711): n is a, c, g, or t
  misc_feature (3714)..(3715): n is a, c, g, or t
  misc_feature (3718)..(3720): n is a, c, g, or t
  misc_feature (3723)..(3724): n is a, c, g, or t
  misc_feature (3728)..(3728): n is a, c, g, or t
  misc_feature (3731)..(3731): n is a, c, g, or t
  misc_feature (3733)..(3745): n is a, c, g, or t
  misc_feature (3748)..(3751): n is a, c, g, or t
  misc_feature (3753)..(3753): n is a, c, g, or t
  misc_feature (3755)..(3755): n is a, c, g, or t
  misc_feature (3758)..(3761): n is a, c, g, or t
  misc_feature (3763)..(3768): n is a, c, g, or t
  misc_feature (3773)..(3774): n is a, c, g, or t
  misc_feature (3776)..(3779): n is a, c, g, or t
  misc_feature (3782)..(3783): n is a, c, g, or t
  misc_feature (3785)..(3792): n is a, c, g, or t
  misc_feature (3795)..(3795): n is a, c, g, or t
  misc_feature (3797)..(3797): n is a, c, g, or t
  misc_feature (3799)..(3803): n is a, c, g, or t
  misc_feature (3805)..(3806): n is a, c, g, or t
  misc_feature (3809)..(3811): n is a, c, g, or t
  misc_feature (3813)..(3815): n is a, c, g, or t
  misc_feature (3817)..(3821): n is a, c, g, or t
  misc_feature (3823)..(3827): n is a, c, g, or t
  misc_feature (3829)..(3829): n is a, c, g, or t
  misc_feature (3831)..(3831): n is a, c, g, or t
  misc_feature (3833)..(3834): n is a, c, g, or t
  misc_feature (3837)..(3839): n is a, c, g, or t
  misc_feature (3843)..(3843): n is a, c, g, or t
  misc_feature (3845)..(3846): n is a, c, g, or t
  misc_feature (3848)..(3852): n is a, c, g, or t
  misc_feature (3854)..(3858): n is a, c, g, or t
  misc_feature (3860)..(3863): n is a, c, g, or t
  misc_feature (3866)..(3866): n is a, c, g, or t
  misc_feature (3868)..(3869): n is a, c, g, or t
  misc_feature (3871)..(3872): n is a, c, g, or t
  misc_feature (3874)..(3874): n is a, c, g, or t
  misc_feature (3876)..(3879): n is a, c, g, or t
  misc_feature (3881)..(3882): n is a, c, g, or t
  misc_feature (3886)..(3886): n is a, c, g, or t
  misc_feature (3888)..(3888): n is a, c, g, or t
  misc_feature (3890)..(3890): n is a, c, g, or t
  misc_feature (3893)..(3897): n is a, c, g, or t
  misc_feature (3901)..(3905): n is a, c, g, or t
  misc_feature (3908)..(3909): n is a, c, g, or t
  misc_feature (3911)..(3912): n is a, c, g, or t
  misc_feature (3914)..(3917): n is a, c, g, or t
  misc_feature (3920)..(3927): n is a, c, g, or t
  misc_feature (3931)..(3938): n is a, c, g, or t
  misc_feature (3940)..(3941): n is a, c, g, or t
  misc_feature (3943)..(3946): n is a, c, g, or t
  misc_feature (3949)..(3949): n is a, c, g, or t
  misc_feature (3951)..(3951): n is a, c, g, or t
  misc_feature (3953)..(3955): n is a, c, g, or t
  misc_feature (3957)..(3957): n is a, c, g, or t
  misc_feature (3959)..(3971): n is a, c, g, or t
  misc_feature (3973)..(3975): n is a, c, g, or t
  misc_feature (3977)..(3979): n is a, c, g, or t
  misc_feature (3982)..(3982): n is a, c, g, or t
  misc_feature (3984)..(3984): n is a, c, g, or t
  misc_feature (3986)..(3989): n is a, c, g, or t
  misc_feature (3991)..(3994): n is a, c, g, or t
  misc_feature (3997)..(3997): n is a, c, g, or t
  misc_feature (3999)..(3999): n is a, c, g, or t
gggagctgctacgtcagttctggatgtccacgccgatgataacgtctgtgcgatgggagaaagcgacgaaggtctgcaaatccgtcgagatcttgtacgataaactcgaaggagtgaaaagttcgctcccttccgcccaccgacatatcgcttctcagcgccttaggccgctgctcggtgcgtttgattctgcgttgacgttttatgatgacgagaaaactcgtcgtcctcaggcgtacgctgactttgagaagacagcgacgcaagaaaattcatagattgatcaattagacgtagccatgaaatcaatcatagaagatttagatgcagcgcgtcctcgattttgacaagctcaaagtagggcggcagaggtcttcagtgcctcctcactcttcaactcgagacgtgtcggcgacggattcgatactagctcggtagcctgcgcgcactgtcaaaaacatgtttcgtcaggcgctgaaggccgcgcgacgcgctcgcgcgcaggcgtttcgtcacagtttagctcagcgtcgtggtcatgccaacgccaatcgtgggacgtcgtgcgcggcgtccgcgctcggtgcctgccgcgatggacgctcgaccgcggcgtcaagcgcacgatcgtacgtcgcggcgagcgcggcggcgaataactcgttgtacggctctatgctcgtcgagcgcatcccagtcgtaattcccgaagccccggcgtgggagcgcgagtacaaggaatggagcgaagcgcgacgcgacaagtttagggtgaaactccccgatcaaatagtcgaagcgaaaggtttattagacaacttgccggattttgagccggcaccgagagagacggaggcggatcgcacgggcgacagaagtacgctgcatcgcaaacttcccgagttcctcttcctcgtcgtcaaggaaaaagacggcaagtggggcttcccaaagtctaaacacgatgacggagagacgatgcgccaaacggctgagcgatcgctgaaagctttcgcgggagattctttagagtgttgggtggtcgggaatgcgccgcagggtcactacgaaaccgccgacggcacgacattttattaccgcggttcatacatcgagggtgagttagaattgcaagatggttacgtcgagcacgcgtgggtgacgaaagaggagctaggtgaatactttgacgccgatcatcacgatttgttgaagagaatgctttagaattgcgcggcgacgtcgcgaatagctttgtgtaagaggcgggaaatttgtagccttaatcgtgttgctttcaacgttttacactcgatcttccgctttgactatctaactatcgatacacatctcgaacctctcccacatcgcgttctctacgccgtaggcgccgtccattgcgtcttgttcgtcagcttgttgtggtaatatggccgtccgagcttgtcgtaatacatcacccatccctccaccatcgcccccttcgcaccacccgtcgcggtttccgtctttgctggttcttcttcgctctcagacacctcctcccccgccgcccgtcgcttctctcgttcctccttgcgcatctttttcttggcgtacgccttggcctcgcgcgccatcttcctaaagtctggctccttcctcgcctttggtgcgctctgcggcggctctatgacgaagcactcgcgcggccatcgattggcccaatccacgttcccattcatgcaaaacgccgcctgatgtccctcgatcccgcatatgttacacccgtgtatggacgacccttgcggtcgtcgcagtttgtggtgcttctccatgcttcgtgcgcgttatcgcgcgttcgaacgcgcgtcgacgcgcgcgcgcgtcgtcgtcgtcgtcgtcgtcgtcggctcttcgctcgcgtcgcgcgtcgctcgggacgatcggacgcaccgccgcgtcgcgtcgtcgtgtgacgcgcgcggcgtcgttggaaattcacaangngctagggttcagcaaatgtccatcccgggcgcgacaaatggcgcgcgcgcgacgccgcgtgacgcctctttgacgcgcgcgtggggttgagaaaatggtgaacgtacgtcgagacgatggcgacgcactcgacgcgttcgacgcggcggctcgacgcgcgacgcgacgcgcgcgcgcgcgatgggacggcgcgggacgcgcgcgcgttagggctcgcgagcgatcgcgctcgagacggtgatgactgacgacgacgacggatccgatgcgcgcgaacgcgaacaggtgccgaaatctaagaagacgttctgcaaggggtgcaagaagcactccgcgcacaaggtgacgcagtacaagacgggcaaggcgagcctgtacgcgcaaggtgcgtggcgcgcgaaaaccctacgatggatgacggtcgacgcgcgcgatcgcgcgcgcgctcgagcgatggcgcggatgcgacgcgcgcgacgacgcgcgcgtgaaacgtattcttctcgtcgacacgcgtgactgacgactcgatgcgcgattcgcacaccgaacacagggaagcgtcgttacgattccaaacaagcggggtacggtggccaaaccaagccggtgttccacaagaaggcgaagacgacgaagaagattgtcttgcgcttgcagtgcggtacgtgcaaacaagtccacatgcacccgatcaagcgttgcaagacgttcgaaatcggcggtgacaagaagaagcacgtgacgacgaactactaggcgcgtcgtgcgtccgggattcaaaagtctcgcgcgcgaagacgcacgtattagcacgggtcttcgcgctctttcttagtgtggtgggagtcggtagattcagtcgaggttgtaagctcgagtaatcgtataaaaatttcttcgccatcgcggcgtcgcatcgtccgtcgcgcgcgtgagacgagtcgcgcaaagcgtcatcgtctcgtcgtcgtcccggtctcaacaccctncnnttgcnnnnnnnngncnnnnntngncgncncnnnngnngnngangnngnnnnannnnncgnnnnnncnnnanaanannnnngannnnnntnnnnnnnnnncnncgncgnnnnnnnnngntgnnngncgnnncgnngnnnnnncnacgacgnnntnntngnnnnncnnnnnnnnnntnnnnntnatnntnntntnntncnncnncnnnngnnnnnngnnnnnnntnnnnaannnngnngngnngangatnnnnncnncnnnnnncntcntnttntnnnnnnnnnnngcgncgacgnngntnntnntnnnngcgnnnnnnnnnnnnnnantnnncnnngngnngccnnnnannaagnnnnnnnngnngnnnntncnncccnnnnngnnnnnnttnnnnnngntnntnnnngnnnngnnggngntgnngcnnnnnncnnnnnnannannnntcnnngnnnnnnngnngnngncgnnggtgntntnntngnnnnannannnnntnntnnnnngnnnnnngcngncnncnnnnnngncgnnnnnnnngntggnnnncntcgtcgnngnggnnntntnnnnnnnnnannnnnncntctncncnncgncnncnnnnnnnnnntncnnnnnnntcntcntcgncgcngngnngnnngnnnnnntnnncnnnnannnnannnntnanannnnncnnnncaacnnntngnngnngtnnnncancancnnnntgnnnanccnnccnnncgnngtgntgntnnnnnnnnnnnnnggnnnnangncgnnnntnnnnnnaacannannnncgnngnnnnnnnntgntntnnnnncnncgnnntnnntnnnnngnnnnngnantnnttnnncgangnngnnnnncnnnnngnnnnccncnncnncntnnnncnncgtngngncgnnnnncaannnnntcnncnncnnnntcnnnnnnnngatnnnnnnnnannannnnacnancnnngnannnnnnnnnnnnntnnnannnatnangnnnngnnnnttntnc

SEQ ID NO: 372 - DNA, 4000 bp, Escherichia coli
  misc_feature (330)..(330): n is a, c, g, or t
  misc_feature (722)..(722): n is a, c, g, or t
  misc_feature (729)..(729): n is a, c, g, or t
  misc_feature (1949)..(1949): n is a, c, g, or t
  misc_feature (1951)..(1952): n is a, c, g, or t
  misc_feature (1961)..(1961): n is a, c, g, or t
  misc_feature (1964)..(1964): n is a, c, g, or t
  misc_feature (1967)..(1967): n is a, c, g, or t
  misc_feature (1969)..(1970): n is a, c, g, or t
  misc_feature (1990)..(1991): n is a, c, g, or t
  misc_feature (1999)..(2000): n is a, c, g, or t
  misc_feature (2009)..(2009): n is a, c, g, or t
  misc_feature (2012)..(2012): n is a, c, g, or t
  misc_feature (2018)..(2018): n is a, c, g, or t
  misc_feature (2381)..(2381): n is a, c, g, or t
  misc_feature (3136)..(3136): n is a, c, g, or t
acttgtactcgcaaagttctttctccccgtcgtccgggtcgattttgatttgcttccagtcctcaacgtgaatgccgcacttgtggcaaataaattcgtcgcagtctatgtagtcccggttctcgttgtatgtcagcggttgcaggctctccggggcaatggtcggttcggcattcaaactgccctcgatcatctgcactacactggttttgattttcccgtgtgtcagctcccctttcagtgcatactctatgttcttgagtacctgcatgaaatggtttgcatcaaccagacgtttttctttcattttcttttcccgctttctttctnggcgttcgcttcttctttggcaaatccggtatcgtcaccacaatatccctttgtttctccatttccgccgggattgcctcgaccagacttttgaatttttgcaaggtttgaacctccgtcgccgcgaaaatgaactgcgccagttcttccggtgttccctgctggacggaatgaccgtccgggtatgttgtgatcgtcatttttcttcgcctttcagtttcagttccactttcggcatgggctgatccgaacggttcatcggttcatagaaatcgacccactgtccaccctccgggaagtcgtgccacgcaagcgcgtaccggatcgtcagccaaacggtttctgctctgtatgcttctttcatggttgtgtcgatagatgcaggcggaacnttctgcntccaaagtgcgtccatgccctgccgcatctggttacgaagccgcatacacttgagaaaatccgcttcgtggtctttatgaaactgctttcgttcttcggtcgtgtggcaccgcttttccatcttgtccacataatcccagcagcaaacctcattggtgaagtcctcaaactggcccatgcggaaccggaggtattcttcgcacgcctgcttcacggcctgtgctgtctcccggctcatggtgatggtcacggcctcaacctctgccggggtcttattttttgttaccattctgtcacctcaacaaatcctgacagccggggcaccgtagccatcccgtaccagaaccccctctttttccgtaaaaaacattgtcgtcttgaacggaaagtttgctctgtcgatgccagcttcggcggcagcatcggccagcattttgcacgggccgtaatcactcccgatggaaaagccgaaagcttgaatgcttttcgcgtattcctcaatgctttttgccaatgccgccttgaatgtgttcagctgatccagcgtaacgctctgtcgcatcgtatccgcaaggaagcacactgcaacagaggtaaagctatcgtctccgttgctatgcggctggtgatccatcagctttccagcccaccagctgacagccttttcaatatcatcctttgccaaaatcataccgtttccccgcctttctttttcagaggttcaggccccgttccatagtccggcacccagccgcccggccagtcgtgccgctggctgcgttcgtatttcttgaccattgcggccagctgaatagcttccaccgctgcgtggattgccacatcataaatgagattcaggtgctcccgcttcatgggttcgtttctcttgacatctcgccacagccggattgtcaagccaaagtggagcttccgcacctcgtctatcagttcgtccagttcttcccggatcaccgcatacccttcatgcggacttgcgaacatccgaaagcggcggtttgctgccgccagctccttctttgccagagcacggacatcttttgtgataacgtccatggttattcctccgcccggctcttgatttcagccagcagatcatccaatggaacatcggcgaggcaaaacccggcttctccttcatcctcggtagagacccagagtgtagagggaaagtacaaagcggggcgaacaccataggagtngnngtaccagtngtngtngnnggagccatcggtgttgacgnnccagacgnngctgctatngcnggtgtncggagagcaattcggcgtaccgtaaggcgtcgccaaccaccacggcgtatctaccttcgggatcagccgccaatactttccatactgacgcagggtcaacaggccgattctgtattcaacggttccgtattcggtctgtccggttgtgtcctgcaggtcgatcttgaacggaataaaagtatccagcggcgtacccttctcggtaaactctgccagacagttacccagatacttcataacatcgctccggcgcagatcgttgggacactccgggtcgtcgccgtcacggaacggcattttcgtccaaatgtcctttgccagcaccagacaaccgtgttcgtctgcatccagcttcacaaactntttgcccagcgccttgaagatgccgccatttttcacattgcccaaagttgtgcttttcaaaatcttgctcatggtcgtttctccttcttattactcctgctgctcggaatccttttcggcgttcaaatcatcgaacgtctgttccggttcttcctgttcaccgatgtgagtttctgccagcattgcaaccagttcttgcagctttgcttctgcgtagtccggcaccgtatatgccataacggcggctcgtaccctcatgccgttcttcacgacataataaaccgttccgtcggtttgttttctctggtaatagcggataaaaccgttattcttaatttcatcctccagcggcgcaaggtgcgactgacagataatgccgaccatgtggcgatcctcggtcacaagcgggataaggatttctccactgcagtaaataccgatgcccagtttcttcacttcgacttcatccttaattgtgtcgtcaagattgaaaccctgaaaatcaattttgtatgcacagtcgaagtcgttgtaaaccaccttttcgatcatggtatcctcgctgattcccagcatagcgcccatctggttgcggttcagcggacgcgggaaaccggtagcgcagtaaatcgccgacgcagttccaatgtagaaatcatcactctcgtcgttatggaaaacattgcagacaagctgccgcttgaccatctttgtcagccctgaaagtttcatcttttgaccacctccacgtccgntttttccgtttcactaaacctcggataaaaggtcattgcgcacatccgtgcctcacggagtgctgcatctgagctttttgcgtccagcttgtacggtagctgcatcttgtttttcgtgtagctgtcaatgccgaacagcatgatactgaactttgccattttctgctcctttctgctcattttctttcggtgggcacttccgggcttgaaccgggcggggcctattccctatgctcatataaaaaggagccgccgctctgggcggctccaaaagatcagttgatgccgttgataatggggatgctgttaccatcgccaacataggcaggcagttcaccgttccagcgggattccacgtcggtgatcttgtagtattccagcaggttgctgttcagactgtcgttcaaggcgcggtttgcttccgcctttttctctgcaacgtacaactctgcgtccgctgcaaccttagacttttccgcttccgcattggctgcgatcaggtcagcgtccgccgtggcctgtgcttcgacacggcgcttgtcggcgtcagtctcggctttttccttttcctgctgggccttgacctttgcttccaccgcatcggtaaaggtatcagtgaagtcaaaattggttacgctgatatactgcaggtcgatgttgtactgtgccagcacttcccgcagtttcgtgtccatctgggaagcgactgcatcccggttagaaatcaggctgcttgcatcgtagtgggcaactacagctttcaccgtttcaaggacacggggagtaatcagggtgtcctcatactttttgccgacctctttgtagatggtcattgcatttgcctgattgatccggtagccaacc

SEQ ID NO: 373 - DNA, 4000 bp, Escherichia coli
  misc_feature (1)..(7): n is a, c, g, or t
  misc_feature (9)..(11): n is a, c, g, or t
  misc_feature (14)..(14): n is a, c, g, or t
  misc_feature (18)..(21): n is a, c, g, or t
  misc_feature (23)..(41): n is a, c, g, or t
  misc_feature (43)..(51): n is a, c, g, or t
  misc_feature (55)..(59): n is a, c, g, or t
  misc_feature (62)..(64): n is a, c, g, or t
  misc_feature (66)..(67): n is a, c, g, or t
  misc_feature (69)..(69): n is a, c, g, or t
  misc_feature (72)..(72): n is a, c, g, or t
  misc_feature (77)..(78): n is a, c, g, or t
  misc_feature (80)..(87): n is a, c, g, or t
  misc_feature (89)..(96): n is a, c, g, or t
  misc_feature (99)..(100): n is a, c, g, or t
  misc_feature (102)..(105): n is a, c, g, or t
  misc_feature (108)..(108): n is a, c, g, or t
  misc_feature (111)..(111): n is a, c, g, or t
  misc_feature (113)..(115): n is a, c, g, or t
  misc_feature (117)..(125): n is a, c, g, or t
  misc_feature (127)..(132): n is a, c, g, or t
  misc_feature (134)..(134): n is a, c, g, or t
  misc_feature (137)..(139): n is a, c, g, or t
  misc_feature (141)..(141): n is a, c, g, or t
  misc_feature (143)..(145): n is a, c, g, or t
  misc_feature (148)..(150): n is a, c, g, or t
  misc_feature (152)..(152): n is a, c, g, or t
  misc_feature (156)..(157): n is a, c, g, or t
  misc_feature (160)..(162): n is a, c, g, or t
  misc_feature (164)..(165): n is a, c, g, or t
  misc_feature (171)..(172): n is a, c, g, or t
  misc_feature (174)..(179): n is a, c, g, or t
  misc_feature (182)..(187): n is a, c, g, or t
  misc_feature (189)..(194): n is a, c, g, or t
  misc_feature (196)..(196): n is a, c, g, or t
  misc_feature (198)..(198): n is a, c, g, or t
  misc_feature (200)..(200): n is a, c, g, or t
  misc_feature (203)..(204): n is a, c, g, or t
  misc_feature (206)..(207): n is a, c, g, or t
  misc_feature (209)..(209): n is a, c, g, or t
  misc_feature (211)..(212): n is a, c, g, or t
  misc_feature (214)..(214): n is a, c, g, or t
  misc_feature (216)..(216): n is a, c, g, or t
  misc_feature (219)..(228): n is a, c, g, or t
  misc_feature (231)..(231): n is a, c, g, or t
  misc_feature (236)..(237): n is a, c, g, or t
  misc_feature (239)..(247): n is a, c, g, or t
  misc_feature (250)..(251): n is a, c, g, or t
  misc_feature (253)..(253): n is a, c, g, or t
  misc_feature (255)..(255): n is a, c, g, or t
  misc_feature (257)..(260): n is a, c, g, or t
  misc_feature (262)..(263): n is a, c, g, or t
  misc_feature (268)..(271): n is a, c, g, or t
  misc_feature (273)..(273): n is a, c, g, or t
  misc_feature (276)..(282): n is a, c, g, or t
  misc_feature (284)..(286): n is a, c, g, or t
  misc_feature (288)..(288): n is a, c, g, or t
  misc_feature (291)..(291): n is a, c, g, or t
  misc_feature (293)..(293): n is a, c, g, or t
  misc_feature (295)..(296): n is a, c, g, or t
  misc_feature (298)..(298): n is a, c, g, or t
  misc_feature (302)..(304): n is a, c, g, or t
  misc_feature (306)..(308): n is a, c, g, or t
  misc_feature (310)..(310): n is a, c, g, or t
  misc_feature (312)..(312): n is a, c, g, or t
  misc_feature (314)..(318): n is a, c, g, or t
  misc_feature (320)..(321): n is a, c, g, or t
  misc_feature (323)..(324): n is a, c, g, or t
  misc_feature (326)..(334): n is a, c, g, or t
  misc_feature (337)..(341): n is a, c, g, or t
  misc_feature (344)..(346): n is a, c, g, or t
  misc_feature (349)..(349): n is a, c, g, or t
  misc_feature (351)..(352): n is a, c, g, or t
  misc_feature (354)..(354): n is a, c, g, or t
  misc_feature (356)..(363): n is a, c, g, or t
  misc_feature (366)..(366): n is a, c, g, or t
  misc_feature (369)..(371): n is a, c, g, or t
  misc_feature (373)..(376): n is a, c, g, or t
  misc_feature (378)..(380): n is a, c, g, or t
  misc_feature (384)..(385): n is a, c, g, or t
  misc_feature (387)..(387): n is a, c, g, or t
  misc_feature (391)..(391): n is a, c, g, or t
  misc_feature (394)..(397): n is a, c, g, or t
  misc_feature (401)..(402): n is a, c, g, or t
  misc_feature (404)..(407): n is a, c, g, or t
  misc_feature (410)..(411): n is a, c, g, or t
  misc_feature (413)..(415): n is a, c, g, or t
  misc_feature (417)..(423): n is a, c, g, or t
  misc_feature (425)..(428): n is a, c, g, or t
  misc_feature (430)..(430): n is a, c, g, or t
  misc_feature (432)..(433): n is a, c, g, or t
  misc_feature (437)..(437): n is a, c, g, or t
  misc_feature (440)..(443): n is a, c, g, or t
  misc_feature (446)..(451): n is a, c, g, or t
  misc_feature (453)..(453): n is a, c, g, or t
  misc_feature (457)..(460): n is a, c, g, or t
  misc_feature (463)..(465): n is a, c, g, or t
  misc_feature (467)..(468): n is a, c, g, or t
  misc_feature (472)..(482): n is a, c, g, or t
  misc_feature (485)..(485): n is a, c, g, or t
  misc_feature (488)..(488): n is a, c, g, or t
  misc_feature (490)..(491): n is a, c, g, or t
  misc_feature (493)..(493): n is a, c, g, or t
  misc_feature (496)..(500): n is a, c, g, or t
  misc_feature (502)..(502): n is a, c, g, or t
  misc_feature (505)..(507): n is a, c, g, or t
  misc_feature (509)..(514): n is a, c, g, or t
  misc_feature (517)..(518): n is a, c, g, or t
  misc_feature (520)..(525): n is a, c, g, or t
  misc_feature (527)..(527): n is a, c, g, or t
  misc_feature (529)..(534): n is a, c, g, or t
  misc_feature (536)..(546): n is a, c, g, or t
  misc_feature (548)..(548): n is a, c, g, or t
  misc_feature (552)..(552): n is a, c, g, or t
  misc_feature (555)..(556): n is a, c, g, or t
  misc_feature (558)..(558): n is a, c, g, or t
  misc_feature (560)..(560): n is a, c, g, or t
  misc_feature (562)..(563): n is a, c, g, or t
  misc_feature (565)..(565): n is a, c, g, or t
  misc_feature (567)..(568): n is a, c, g, or t
  misc_feature (570)..(574): n is a, c, g, or t
  misc_feature (578)..(578): n is a, c, g, or t
  misc_feature (581)..(581): n is a, c, g, or t
  misc_feature (583)..(588): n is a, c, g, or t
  misc_feature (590)..(591): n is a, c, g, or t
  misc_feature (594)..(597): n is a, c, g, or t
  misc_feature (599)..(602): n is a, c, g, or t
  misc_feature (604)..(604): n is a, c, g, or t
  misc_feature (610)..(610): n is a, c, g, or t
  misc_feature (612)..(614): n is a, c, g, or t
  misc_feature (619)..(624): n is a, c, g, or t
  misc_feature (626)..(627): n is a, c, g, or t
  misc_feature (629)..(630): n is a, c, g, or t
  misc_feature (632)..(636): n is a, c, g, or t
  misc_feature (638)..(640): n is a, c, g, or t
  misc_feature (647)..(649): n is a, c, g, or t
  misc_feature (651)..(651): n is a, c, g, or t
  misc_feature (653)..(653): n is a, c, g, or t
  misc_feature (658)..(662): n is a, c, g, or t
  misc_feature (664)..(664): n is a, c, g, or t
  misc_feature (666)..(668): n is a, c, g, or t
  misc_feature (670)..(670): n is a, c, g, or t
  misc_feature (672)..(675): n is a, c, g, or t
  misc_feature (677)..(679): n is a, c, g, or t
  misc_feature (684)..(684): n is a, c, g, or t
  misc_feature (686)..(690): n is a, c, g, or t
  misc_feature (692)..(698): n is a, c, g, or t
  misc_feature (700)..(700): n is a, c, g, or t
  misc_feature (702)..(704): n is a, c, g, or t
  misc_feature (707)..(709): n is a, c, g, or t
  misc_feature (712)..(712): n is a, c, g, or t
  misc_feature (714)..(714): n is a, c, g, or t
  misc_feature (716)..(717): n is a, c, g, or t
  misc_feature (719)..(719): n is a, c, g, or t
  misc_feature (723)..(723): n is a, c, g, or t
  misc_feature (725)..(727): n is a, c, g, or t
  misc_feature (729)..(729): n is a, c, g, or t
  misc_feature (731)..(732): n is a, c, g, or t
  misc_feature (734)..(734): n is a, c, g, or t
  misc_feature (736)..(736): n is a, c, g, or t
  misc_feature (738)..(739): n is a, c, g, or t
  misc_feature (742)..(742): n is a, c, g, or t
  misc_feature (747)..(747): n is a, c, g, or t
  misc_feature (749)..(749): n is a, c, g, or t
  misc_feature (752)..(754): n is a, c, g, or t
  misc_feature (756)..(768): n is a, c, g, or t
  misc_feature (770)..(771): n is a, c, g, or t
  misc_feature (773)..(773): n is a, c, g, or t
  misc_feature (775)..(778): n is a, c, g, or t
  misc_feature (782)..(782): n is a, c, g, or t
  misc_feature (785)..(787): n is a, c, g, or t
  misc_feature (791)..(792): n is a, c, g, or t
  misc_feature (794)..(795): n is a, c, g, or t
  misc_feature (797)..(800): n is a, c, g, or t
  misc_feature (802)..(802): n is a, c, g, or t
  misc_feature (805)..(805): n is a, c, g, or t
  misc_feature (812)..(812): n is a, c, g, or t
  misc_feature (814)..(818): n is a, c, g, or t
  misc_feature (821)..(823): n is a, c, g, or t
  misc_feature (830)..(830): n is a, c, g, or t
  misc_feature (832)..(836): n is a, c, g, or t
  misc_feature (838)..(840): n is a, c, g, or t
  misc_feature (846)..(847): n is a, c, g, or t
  misc_feature (850)..(851): n is a, c, g, or t
  misc_feature (853)..(854): n is a, c, g, or t
  misc_feature (857)..(857): n is a, c, g, or t
  misc_feature (859)..(860): n is a, c, g, or t
  misc_feature (862)..(863): n is a, c, g, or t
  misc_feature (865)..(865): n is a, c, g, or t
  misc_feature (869)..(870): n is a, c, g, or t
  misc_feature (872)..(874): n is a, c, g, or t
  misc_feature (876)..(877): n is a, c, g, or t
  misc_feature (881)..(881): n is a, c, g, or t
  misc_feature (884)..(884): n is a, c, g, or t
  misc_feature (886)..(889): n is a, c, g, or t
  misc_feature (891)..(892): n is a, c, g, or t
  misc_feature (895)..(898): n is a, c, g, or t
  misc_feature (900)..(900): n is a, c, g, or t
  misc_feature (902)..(906): n is a, c, g, or t
  misc_feature (909)..(910): n is a, c, g, or t
  misc_feature (912)..(912): n is a, c, g, or t
  misc_feature (915)..(919): n is a, c, g, or t
  misc_feature (921)..(925): n is a, c, g, or t
  misc_feature (929)..(935): n is a, c, g, or t
  misc_feature (937)..(943): n is a, c, g, or t
  misc_feature (945)..(946): n is a, c, g, or t
  misc_feature (948)..(949): n is a, c, g, or t
  misc_feature (951)..(957): n is a, c, g, or t
  misc_feature (959)..(960): n is a, c, g, or t
  misc_feature (962)..(963): n is a, c, g, or t
  misc_feature (965)..(965): n is a, c, g, or t
  misc_feature (968)..(969): n is a, c, g, or t
  misc_feature (971)..(978): n is a, c, g, or t
  misc_feature (981)..(984): n is a, c, g, or t
  misc_feature (987)..(990): n is a, c, g, or t
  misc_feature (996)..(997): n is a, c, g, or t
  misc_feature (999)..(999): n is a, c, g, or t
  misc_feature (1002)..(1009): n is a, c, g, or t
  misc_feature (1011)..(1011): n is a, c, g, or t
  misc_feature (1014)..(1014): n is a, c, g, or t
  misc_feature (1016)..(1016): n is a, c, g, or t
  misc_feature (1018)..(1019): n is a, c, g, or t
  misc_feature (1021)..(1022): n is a, c, g, or t
  misc_feature (1024)..(1025): n is a, c, g, or t
  misc_feature (1027)..(1028): n is a, c, g, or t
  misc_feature (1033)..(1034): n is a, c, g, or t
  misc_feature (1036)..(1037): n is a, c, g, or t
  misc_feature (1039)..(1041): n is a, c, g, or t
  misc_feature (1043)..(1044): n is a, c, g, or t
  misc_feature (1048)..(1051): n is a, c, g, or t
  misc_feature (1054)..(1056): n is a, c, g, or t
  misc_feature (1058)..(1061): n is a, c, g, or t
  misc_feature (1063)..(1066): n is a, c, g, or t
  misc_feature (1068)..(1068): n is a, c, g, or t
  misc_feature (1071)..(1074): n is a, c, g, or t
  misc_feature (1077)..(1077): n is a, c, g, or t
  misc_feature (1080)..(1080): n is a, c, g, or t
  misc_feature (1082)..(1082): n is a, c, g, or t
  misc_feature (1084)..(1086): n is a, c, g, or t
  misc_feature (1088)..(1088): n is a, c, g, or t
  misc_feature (1094)..(1098): n is a, c, g, or t
  misc_feature (1100)..(1102): n is a, c, g, or t
  misc_feature (1104)..(1110): n is a, c, g, or t
  misc_feature (1113)..(1114): n is a, c, g, or t
  misc_feature (1116)..(1117): n is a, c, g, or t
  misc_feature (1119)..(1119): n is a, c, g, or t
  misc_feature (1121)..(1122): n is a, c, g, or t
  misc_feature (1125)..(1125): n is a, c, g, or t
  misc_feature (1127)..(1130): n is a, c, g, or t
  misc_feature (1133)..(1136): n is a, c, g, or t
  misc_feature (1138)..(1138): n is a, c, g, or t
  misc_feature (1146)..(1150): n is a, c, g, or t
  misc_feature (1154)..(1154): n is a, c, g, or t
  misc_feature (1159)..(1160): n is a, c, g, or t
  misc_feature (1162)..(1162): n is a, c, g, or t
  misc_feature (1167)..(1167): n is a, c, g, or t
  misc_feature (1169)..(1169): n is a, c, g, or t
  misc_feature (1172)..(1178): n is a, c, g, or t
  misc_feature (1182)..(1182): n is a, c, g, or t
  misc_feature (1185)..(1189): n is a, c, g, or t
  misc_feature (1191)..(1191): n is a, c, g, or t
  misc_feature (1196)..(1197): n is a, c, g, or t
  misc_feature (1199)..(1203): n is a, c, g, or t
  misc_feature (1205)..(1205): n is a, c, g, or t
  misc_feature (1208)..(1208): n is a, c, g, or t
  misc_feature (1211)..(1213): n is a, c, g, or t
  misc_feature (1215)..(1220): n is a, c, g, or t
  misc_feature (1222)..(1223): n is a, c, g, or t
  misc_feature (1225)..(1225): n is a, c, g, or t
  misc_feature (1227)..(1228): n is a, c, g, or t
  misc_feature (1231)..(1232): n is a, c, g, or t
  misc_feature (1235)..(1237): n is a, c, g, or t
  misc_feature (1239)..(1239): n is a, c, g, or t
  misc_feature (1241)..(1241): n is a, c, g, or t
  misc_feature (1243)..(1243): n is a, c, g, or t
  misc_feature (1246)..(1246): n is a, c, g, or t
  misc_feature (1250)..(1250): n is a, c, g, or t
  misc_feature (1252)..(1253): n is a, c, g, or t
  misc_feature (1256)..(1256): n is a, c, g, or t
  misc_feature (1258)..(1258): n is a, c, g, or t
  misc_feature (1264)..(1266): n is a, c, g, or t
  misc_feature (1269)..(1271): n is a, c, g, or t
  misc_feature (1273)..(1274): n is a, c, g, or t
  misc_feature (1277)..(1277): n is a, c, g, or t
  misc_feature (1279)..(1280): n is a, c, g, or t
  misc_feature (1282)..(1285): n is a, c, g, or t
  misc_feature (1289)..(1290): n is a, c, g, or t
  misc_feature (1293)..(1296): n is a, c, g, or t
  misc_feature (1299)..(1300): n is a, c, g, or t
  misc_feature (1302)..(1302): n is a, c, g, or t
  misc_feature (1304)..(1307): n is a, c, g, or t
  misc_feature (1311)..(1312): n is a, c, g, or t
  misc_feature (1315)..(1317): n is a, c, g, or t
  misc_feature (1319)..(1321): n is a, c, g, or t
  misc_feature (1323)..(1327): n is a, c, g, or t
  misc_feature (1330)..(1336): n is a, c, g, or t
  misc_feature (1339)..(1339): n is a, c, g, or t
  misc_feature (1341)..(1342): n is a, c, g, or t
  misc_feature (1344)..(1344): n is a, c, g, or t
  misc_feature (1348)..(1348): n is a, c, g, or t
  misc_feature (1350)..(1353): n is a, c, g, or t
  misc_feature (1356)..(1356): n is a, c, g, or t
  misc_feature (1358)..(1358): n is a, c, g, or t
  misc_feature (1360)..(1360): n is a, c, g, or t
  misc_feature (1362)..(1365): n is a, c, g, or t
  misc_feature (1367)..(1368): n is a, c, g, or t
  misc_feature (1370)..(1370): n is a, c, g, or t
  misc_feature (1373)..(1374): n is a, c, g, or t
  misc_feature (1377)..(1378): n is a, c, g, or t
  misc_feature (1380)..(1383): n is a, c, g, or t
  misc_feature (1385)..(1386): n is a, c, g, or t
  misc_feature (1388)..(1389): n is a, c, g, or t
  misc_feature (1394)..(1395): n is a, c, g, or t
  misc_feature (1397)..(1398): n is a, c, g, or t
  misc_feature (1401)..(1403): n is a, c, g, or t
  misc_feature (1405)..(1410): n is a, c, g, or t
  misc_feature (1412)..(1412): n is a, c, g, or t
  misc_feature (1414)..(1414): n is a, c, g, or t
  misc_feature (1417)..(1420): n is a, c, g, or t
  misc_feature (1422)..(1425): n is a, c, g, or t
  misc_feature (1461)..(1462): n is a, c, g, or t
  misc_feature (1465)..(1467): n is a, c, g, or t
  misc_feature (1469)..(1479): n is a, c, g, or t
  misc_feature (1482)..(1482): n is a, c, g, or t
  misc_feature (1485)..(1485): n is a, c, g, or t
  misc_feature (1487)..(1488): n is a, c, g, or t
  misc_feature (1490)..(1490): n is a, c, g, or t
  misc_feature (1527)..(1543): n is a, c, g, or t
  misc_feature (1545)..(1547): n is a, c, g, or t
  misc_feature (1550)..(1551): n is a, c, g, or t
  misc_feature (1553)..(1553): n is a, c, g, or t
  misc_feature (1555)..(1556): n is a, c, g, or t
  misc_feature (1593)..(1601): n is a, c, g, or t
  misc_feature (1604)..(1605): n is a, c, g, or t
  misc_feature (1609)..(1622): n is a, c, g, or t
  misc_feature (1659)..(1660): n is a, c, g, or t
  misc_feature (1662)..(1667): n is a, c, g, or t
  misc_feature (1669)..(1670): n is a, c, g, or t
  misc_feature (1672)..(1672): n is a, c, g, or t
  misc_feature (1674)..(1680): n is a, c, g, or t
  misc_feature (1683)..(1688): n is a, c, g, or t
  misc_feature (1725)..(1732): n is a, c, g, or t
  misc_feature (1734)..(1746): n is a, c, g, or t
  misc_feature (1748)..(1749): n is a, c, g, or t
  misc_feature (1751)..(1754): n is a, c, g, or t
  misc_feature (1791)..(1815): n is a, c, g, or t
  misc_feature (1817)..(1820): n is a, c, g, or t
  misc_feature (1857)..(1859): n is a, c, g, or t
  misc_feature (1861)..(1865): n is a, c, g, or t
  misc_feature (1867)..(1869): n is a, c, g, or t
  misc_feature (1871)..(1881): n is a, c, g, or t
  misc_feature (1883)..(1886): n is a, c, g, or t
  misc_feature (1925)..(1939): n is a, c, g, or t
  misc_feature (1941)..(1944): n is a, c, g, or t
  misc_feature (1946)..(1947): n is a, c, g, or t
  misc_feature (1949)..(1952): n is a, c, g, or t
  misc_feature (1989)..(1996): n is a, c, g, or t
  misc_feature (1998)..(1999): n is a, c, g, or t
  misc_feature (2001)..(2010): n is a, c, g, or t
  misc_feature (2012)..(2015): n is a, c, g, or t
  misc_feature (2017)..(2018): n is a, c, g, or t
  misc_feature (2324)..(2324): n is a, c, g, or t
nnnnnnncnnncancgcnnnnannnnnnnnnnnnnnnnnnntnnnnnnnnnaaannnnntgnnncnntncgnaaaanncnnnnnnnntnnnnnnnngcnncnnnnctnccnannnannnnnnnnngnnnnnngnagnnnancnnnccnnngntttnntcnnncnntgcacnnannnnnnggnnnnnncnnnnnnangnanagnnanngncnncncngtnnnnnnnnnnaanctcanngnnnnnnnnnacnncntngnnnncnntatcnnnngnaannnnnnntnnnanaangnannanaaannntnnntntncnnnnnanntnnannnnnnnnntgnnnnntgnnntcngnnancnnnnnnnnaanagnnncnnnntnnnactnncngaanacnnnnccannannnnctnncnnnannnnnnncnnnnanannacgnacnnnnaannnnnngnaaannnnttnnnannatcnnnnnnnnnnnaanagngnnantannnnntnccnnnannnnnnctnntnnnnnnanannnnnncnnnnnnnnnnnanagcnccnntntncnntncnnannnnntctnccntnnnnnnanncannnnannnncnccactngnnnccctnnnnnntnncnncnnnnncnnntgccgcnnnancngccgnnnnntncnnncnannnntnnnttccncnnnnncnnnnnnnanannngcnnnganancnncnatanannncncnncngntnncanttccncnacnnntnnnnnnnnnnnnncnntntnnnnatcnctnnnaagnncnncnnnntnctnttccgcnannnnnttnnntcccgcntnnnnncnnngagccnnaannanngcntnnanntnctcnncnnngnnttcnttnannnnannatnnnncntnnnnntcnnantannnnntnnnnnattnnnnnnnannnnnnnanncnntnnnnnnncnntnntnacnnannnnnnnnaannnnaannnnaaaaanncnccnnnnnnnntncgncngnnanncnntnntcatnncnntnnncnnaatnnnngtnnncnnnntnnnntntcnnnnatnccngnannngnaaatcnnnnnannncnnnnnnnaannanntncnncanannnnagnnnnantataccannnnnttcnaatcnnantaacnanatnnnnnnntcanatnnnnnanaaacnnannnnngnatnccnnnannnnnnanncntnntanntcnnntncncnganatantnnctntnaaccannntcnnnanncananngnnnnaagnnatnnnncannanannnncaannatnnncnnntnnnnncannnnnnnaantnncnatgnannnngcnancntnnnnanntntannaannannnncnnannaaaanngnnctnnncnnnnnnangnagnnnncnnnnttttaccactatctggaattacatcactctcaaacnnaannngnnnnnnnnnnnaanaantnntngttttaccactatctggaattacatcactctcaaacnnnnnnnnnnnnnnnnngnnnatnntngnngttttaccactatctggaattacatcactctcaaacnnnnnnnnnagnnaccnnnnnnnnnnnnnngttttaccactatctggaattacatcactctcaaacnnannnnnnanncngnnnnnnnatnnnnnngttttaccactatctggaattacatcactctcaaacnnnnnnnnannnnnnnnnnnnntnntnnnngttttaccactatctggaattacatcactctcaaacnnnnnnnnnnnnnnnnnnnnnnnnntnnnngttttaccactatctggaattacatcactctcaaacnnnannnnnannncnnnnnnnnnnntnnnngttttaccactatctggaattacatcactctcaaacatnnnnnnnnnnnnnnngnnnntnntnnnngttttaccactatctggaattacatcactctcaaacnnnnnnnntnntnnnnnnnnnntnnnnanngttttaccactatctggaattacatcactctcaaacctcaaatttcaatctcaatttgcgtatctattaaagtcctctacgagtaaaactgctatcacttggcagtgcaattcggatatggtaaaaatttactcaaaaatttgacataaatcttcatcaataataaataaattttctaattctattttatcataacatttcccttctaaaagaataaactgtaatttttcttctaacgcgttgttataaaacgactcttttatctctttcggtaagaaatcccgaaatccatggaagaaaaagcangtttcaccaaacaggatgttccagtttttcataaaagacaacatttgttctggaagattcgtcccttccatatcaatgcgaagatgaatcgctttcatcatctctataagatcgacgtccatatcataagtaagaggaagcggtacctgttgtgataaatgctctgcatatgtaagaatatttcccatggctgtccttgtttcccggtaaaaactttcagtcatcgcttcttctcttagtgcagcaaataatttggtcaagattttcctattattaaaatccatatccaaaggactaagaagcaatactgatttctttctaagatctaaatgtgtctcctcttcaaaaagaacaaaacctcctgtgtctccttgtatctgcctgtacaactccatcagcctgtcataatgataaagaggattttccatagaaatgacagggatatcctgttcctccatacatacggttttctcccactccggataggaaagtttcataaaatcaccaatctatcatgactatcaataacttcttttttcttctctcccaaaataagttccatacccgcatattgcctttctgtaaccgtcagtacttgtatcaggccctcttccggtttcatacatttgatgtgcttgaccgctatacctgctgctacaggatttaaaacaatttttgtgtatacagactcctgcatcatgataaatccgtcagaaatcaatgctctccgaaattgtatatacgcctttctttgctgcgccgtttctaccggcaggtcaaacagcaccatcactcgcataaacctattcctcatatatctctgaataaaaagacaataaagataagtcttgttcctctaaagcacgaaaaacgctccggcagtatattcctatcgcatgtgttacggtggtcttctttcctttgattaaaacttgtcggttcaatatatctataagttgatgcttctcttcagtagtcaacttctgcggtgccatccgcagtacaagcatatccaccataggtctgaaaggctccatcaaatcactccccaaattaaacggattaaatatattatcatgaaacaatccaatttgtgtcatatagcctgaagcggcgatttcccgattacaagcggagagaataacggcatacccataattaagcgccccattctctacggtttcatctcttcttgaaaaatcctttccccataatgcattaaaatagacttttgccgcatgaccttctctattcgttatatcacctggctctacttctttcatatatcgctctaacaacctggcttctttactgcactcaaaagcaatcagcacctgtttttgcttatcgattttctctttaacgatctgcgcccatatttcttttttcagacaagaatcccacttcagctgggaacggatctgccggctggaatcatggctccctcgataaggaagtatctctcctgccggatttcttctttcatcgcagaaaataattttgatttttcggtgaagacattcgttgatccacgcggcagtcagcgaaacagccgtagtttcaatcatgaccgtctccacttcttccataaatatccggtgaacttcttctccccttataaccatatatcccaagctatattctatttttgcccgtttagatagtacaaccgtccg

SEQ ID NO: 374 - DNA, 4000 bp, Escherichia coli
  misc_feature (444)..(444): n is a, c, g, or t
  misc_feature (477)..(477): n is a, c, g, or t
  misc_feature (777)..(777): n is a, c, g, or t
  misc_feature (1401)..(1401): n is a, c, g, or t
  misc_feature (1464)..(1464): n is a, c, g, or t
  misc_feature (1470)..(1470): n is a, c, g, or t
  misc_feature (1473)..(1473): n is a, c, g, or t
  misc_feature (1989)..(1989): n is a, c, g, or t
  misc_feature (3278)..(3279): n is a, c, g, or t
  misc_feature (3293)..(3293): n is a, c, g, or t
  misc_feature (3817)..(3817): n is a, c, g, or t
  misc_feature (3837)..(3837): n is a, c, g, or t
  misc_feature (3845)..(3845): n is a, c, g, or t
  misc_feature (3850)..(3850): n is a, c, g, or t
  misc_feature (3857)..(3857): n is a, c, g, or t
agccggatatggttcggcgtgatttcaaccagttcgtcatcatcgataaattcaattgcctgctccagggtgtacttcaccggcggcgtcagcacaatattttcatcggtgcccgatgcccgcacattggtcaactgcttgcctttaatcgggttgacgggcaagtcattccctcgggaatgaattccaacaatcatgccttcatagatcgcttcgttcggattgataaagagtcttcctctgggctgcaggttaaacaagctaaagcctaaactcttgccactcaccatggagaccaaaacaccgttgcgtcttgagttgatgtcttcgcctgaacgcaagtcgtagtgggagaacacgctactgatgatcccgccaccggaggtcaaggtcatgaattccgatcgaaagccaattaaaccgcgagttggaatgacaaagtcnagtcgaacccgtccctttgaatccgggaccatnttactgagtgagcctttgcgggtgccaatcacttccatgatggcgccttggtgtatctgctcgcaatcgatactcagattttcgaagggctcatgaatctcgccatcgacctccttgagaatcacttctggacgcgacacaccaagttcatacccttcccggcgcatggtctcgatgagaacccccaaatgcagctcacctcgacccgacaccacaaacttatcggccgtatcgcccggggcaactcgcaacgccacgttgtattgcaactcaagctctaaacgatcctttaaatttcgnctggttacgaacttcccatcctgaccggagaaaggcgacgtgttgacctgaaacgtcatcgagatggttggctcatcaaccaccaaggctggtaacgcctcaggctgatcgacctgacacaaggtgtctgaaatcttcaaaccatcgataccgcatacacaaacgatatcaccggcactggcggattcaatttcaacgcggcttaatccagaaaagcccattacctgcagaattctgcccttcttaacttggccttcggcattcaccaccgccacactctgaccctttcgaatctcacctcgggtgatgcggccaagaccgatgagcccgacatagctgttgtagtccaacgcactgatttgcatttggagtgggccactttcttcaacctgcggtggtggcacctgatcaacaatcaggtccaacaaataacttaagtctgaccctaaatcatcgcgactcggacctgcaatcccctgcattgcagagccgacaacgacgggaaagtcgagctgctcttcggttgcacccaattgatcgaacaactcaaagacttcatcaatcacccagtctggccgggcgccgtcacgatcgatcttgttaaccattaaaatagggttgagnttattttcaaacgcctttcgggtcacaaaccgggtttgcggcatgggcccttcgaccgcatcnacgagnaanagaaccgagtcgaccatactcaagatccgctcgacctcaccgccaaaatcagcgtgaccgggcgtatcaacaatattgatgcgaacgccgcgccaatctaacgcagtatttttcgcaaggatggtaatgccgcgttctttttcgaggtcattggaatccatcaaacgctcgccgctttcatctcctcgctgcagggcgccggcctgcgatagcaacttgtcgatcaaggttgtttttccatggtcaacgtgcgctatgatagcgacattgcgtagattttgagacataacgagcaatccgaaaaggcttaagggccgaaggagcgggattatactgaaatccgcctccggtgcgaggattctgggcaacaaggtcatcaaggatttcaggcgatagcggtttggcatcaacgatcatcaattttatgccgcctgaaggacaagaacccttgggccaaatcgtctaagacgctaatggccgttattgctctattttggtgcgagcctgttattcagngcgctattttggtgcaaaatggccgccgctgaatctttacttccgataaatacgataggtatcagttacttaaacccttttagctcatggcatagtctttgctttttcttacccaagcaaagccaagtgttggggctttaccgttttcaacccgcgaagggtctggctggcgacgttgcgagcacaggaccttcgttacaaaccaaggagttaactcaatgatgaaggcaaaattagaatatatctggctcgacggctatgagcccacccaaagcctacgcagcaaaacaatggttcgatctgacttctcgggcaagcttgaagactgtccaatgtgggtcttcgatggcagctcgaccgaacaagccgagggcggcagctcagactgcctactcaaacctgttgccatcatccccgatcccgatcgcaacaatggctatcttgtcatgacagaagtcttaaatcccgatggtagcccccatgtttccaacggacgggcaacgatcgatgacgatgatgctgatttttggttcggttttgagcaagagtacttcttgtgggataccgacaccgatttaccacctggctttcctcgtggcggcttccctggacctcaaggcccgtactactgcagtgttggcgcgagcaacaccttcggccgagatttcgtcgaagagcacttggacatctgcctcgaggccggcctcaacgtcgaagggatcaacgctgaagttgcaaccgggcagtgggaattccaaattttcgccaaaggcgcgcatgaagcgggggaccaaatttggctagcgcgctacctgctcgagcgtacgggcgagaaatacggctacgccattaattatcatcccaaaccccttggcgatacggactggaatggctctggcatgcacgcgaacttctccaacgccgccatgcgggatctcggtgacgaagccgtttttacaaaaatttgtgaaaactttgggcgtcacatcgagcgtcacatgagcgtttatggtgcctacaatgaccagcgcttaacgggcaagcatgaaacacagtcgatcgatcagttcagctatggtgtctctgatcgtggcgcgagcattcgcatccccgtcagcaccgtggtggatggctggaaaggccgcttagaggaccgaagaaccgcctctaatgccgacccttataaggtcgccgccgccatcatcaagaccagcaaagaagcactggcctgatccaaccgctcgagcaccccttaagggcgtgctcgagcacttcttcgacaaggcaanngctggcaatcccgnttaccactgccaatccagcatcctctgcgcctaccgattttttctaagctggctttccgccactttgttttatactgtttaaaccgtcatcaatcggataatgccatggcccgtctgatcctcaaccttattttcgcagcccttctgctcaccacaggatcgtttaccgcggctcagcaggatgacccgagctatcgtttgcgcctggtgtcgagcttgggtgagccaaaagttcaggccattgccggacaactgccttttaatgtgcaggttaaaccgagactcgcaaagcaccatgccctctacatcgaaactgaggatggccaaatcagagccgccgcagcccccggtgaaaccatcgtgcaagccgtcccccgcgggctgcacactttttatttgatcattaaagaggtcaaaaccggtcgagagatcagtcgatcagccccccttgaccttgatgttcggcgctatatttcacgccaataaccttgagcgcaccaaattggtgcggtaaactcgcgaantccctggccctgccaccctnaatcaggnatccngcgcctnttttaattggtgcggatcttgcttttaaactggcatgaatcaaacattccaacaatcatcacaacattaccgacagcttatggaccaaaccgccattgataacttgaccacggccgtcctgctgctcgatcgaaacttgaacc

SEQ ID NO: 375 - DNA, 4000 bp, Escherichia coli
  misc_feature (479)..(491): n is a, c, g, or t
  misc_feature (493)..(493): n is a, c, g, or t
  misc_feature (495)..(497): n is a, c, g, or t
  misc_feature (499)..(502): n is a, c, g, or t
  misc_feature (504)..(505): n is a, c, g, or t
  misc_feature (507)..(511): n is a, c, g, or t
  misc_feature (513)..(518): n is a, c, g, or t
  misc_feature (520)..(525): n is a, c, g, or t
  misc_feature (528)..(532): n is a, c, g, or t
  misc_feature (534)..(534): n is a, c, g, or t
  misc_feature (538)..(541): n is a, c, g, or t
  misc_feature (543)..(544): n is a, c, g, or t
  misc_feature (546)..(547): n is a, c, g, or t
  misc_feature (549)..(549): n is a, c, g, or t
  misc_feature (551)..(551): n is a, c, g, or t
  misc_feature (553)..(555): n is a, c, g, or t
  misc_feature (558)..(561): n is a, c, g, or t
  misc_feature (563)..(568): n is a, c, g, or t
  misc_feature (570)..(572): n is a, c, g, or t
  misc_feature (576)..(583): n is a, c, g, or t
  misc_feature (587)..(590): n is a, c, g, or t
  misc_feature (593)..(595): n is a, c, g, or t
  misc_feature (598)..(598): n is a, c, g, or t
  misc_feature (600)..(612): n is a, c, g, or t
  misc_feature (614)..(619): n is a, c, g, or t
  misc_feature (622)..(624): n is a, c, g, or t
  misc_feature (627)..(630): n is a, c, g, or t
  misc_feature (632)..(634): n is a, c, g, or t
  misc_feature (636)..(636): n is a, c, g, or t
  misc_feature (638)..(645): n is a, c, g, or t
  misc_feature (647)..(650): n is a, c, g, or t
  misc_feature (653)..(655): n is a, c, g, or t
  misc_feature (657)..(670): n is a, c, g, or t
  misc_feature (672)..(673): n is a, c, g, or t
  misc_feature (675)..(680): n is a, c, g, or t
  misc_feature (683)..(688): n is a, c, g, or t
  misc_feature (690)..(692): n is a, c, g, or t
  misc_feature (694)..(703): n is a, c, g, or t
  misc_feature (706)..(708): n is a, c, g, or t
  misc_feature (710)..(710): n is a, c, g, or t
  misc_feature (713)..(714): n is a, c, g, or t
  misc_feature (716)..(720): n is a, c, g, or t
  misc_feature (723)..(727): n is a, c, g, or t
  misc_feature (729)..(730): n is a, c, g, or t
  misc_feature (732)..(737): n is a, c, g, or t
  misc_feature (739)..(742): n is a, c, g, or t
  misc_feature (744)..(745): n is a, c, g, or t
  misc_feature (747)..(748): n is a, c, g, or t
  misc_feature (750)..(750): n is a, c, g, or t
  misc_feature (753)..(755): n is a, c, g, or t
  misc_feature (758)..(765): n is a, c, g, or t
  misc_feature (767)..(771): n is a, c, g, or t
  misc_feature (773)..(780): n is a, c, g, or t
  misc_feature (784)..(792): n is a, c, g, or t
  misc_feature (794)..(796): n is a, c, g, or t
  misc_feature (798)..(799): n is a, c, g, or t
  misc_feature (802)..(805): n is a, c, g, or t
  misc_feature (809)..(818): n is a, c, g, or t
  misc_feature (821)..(823): n is a, c, g, or t
  misc_feature (825)..(830): n is a, c, g, or t
  misc_feature (832)..(832): n is a, c, g, or t
  misc_feature (835)..(839): n is a, c, g, or t
  misc_feature (841)..(851): n is a, c, g, or t
  misc_feature (853)..(854): n is a, c, g, or t
  misc_feature (863)..(864): n is a, c, g, or t
  misc_feature (866)..(867): n is a, c, g, or t
  misc_feature (870)..(871): n is a, c, g, or t
  misc_feature (873)..(873): n is a, c, g, or t
  misc_feature (875)..(877): n is a, c, g, or t
  misc_feature (880)..(880): n is a, c, g, or t
  misc_feature (882)..(883): n is a, c, g, or t
  misc_feature (889)..(894): n is a, c, g, or t
  misc_feature (900)..(900): n is a, c, g, or t
  misc_feature (902)..(902): n is a, c, g, or t
  misc_feature (904)..(904): n is a, c, g, or t
  misc_feature (909)..(909): n is a, c, g, or t
  misc_feature (913)..(913): n is a, c, g, or t
  misc_feature (915)..(915): n is a, c, g, or t
  misc_feature (917)..(918): n is a, c, g, or t
  misc_feature (921)..(921): n is a, c, g, or t
  misc_feature (923)..(924): n is a, c, g, or t
  misc_feature (929)..(929): n is a, c, g, or t
  misc_feature (932)..(936): n is a, c, g, or t
  misc_feature (939)..(939): n is a, c, g, or t
  misc_feature (941)..(941): n is a, c, g, or t
  misc_feature (949)..(949): n is a, c, g, or t
  misc_feature (951)..(951): n is a, c, g, or t
  misc_feature (956)..(968): n is a, c, g, or t
  misc_feature (970)..(980): n is a, c, g, or t
  misc_feature (984)..(984): n is a, c, g, or t
  misc_feature (986)..(989): n is a, c, g, or t
  misc_feature (991)..(994): n is a, c, g, or t
  misc_feature (997)..(1008): n is a, c, g, or t
  misc_feature (1011)..(1011): n is a, c, g, or t
  misc_feature (1013)..(1014): n is a, c, g, or t
  misc_feature (1018)..(1023): n is a, c, g, or t
  misc_feature (1026)..(1029): n is a, c, g, or t
  misc_feature (1031)..(1039): n is a, c, g, or t
  misc_feature (1041)..(1041): n is a, c, g, or t
  misc_feature (1044)..(1044): n is a, c, g, or t
  misc_feature (1047)..(1051): n is a, c, g, or t
  misc_feature (1053)..(1056): n is a, c, g, or t
  misc_feature (1058)..(1066): n is a, c, g, or t
  misc_feature (1068)..(1068): n is a, c, g, or t
  misc_feature (1071)..(1076): n is a, c, g, or t
  misc_feature (1078)..(1081): n is a, c, g, or t
  misc_feature (1083)..(1085): n is a, c, g, or t
  misc_feature (1088)..(1094): n is a, c, g, or t
  misc_feature (1096)..(1108): n is a, c, g, or t
  misc_feature (1110)..(1113): n is a, c, g, or t
  misc_feature (1115)..(1130): n is a, c, g, or t
  misc_feature (1132)..(1137): n is a, c, g, or t
  misc_feature (1139)..(1167): n is a, c, g, or t
  misc_feature (1169)..(1173): n is a, c, g, or t
  misc_feature (1175)..(1197): n is a, c, g, or t
  misc_feature (1199)..(1205): n is a, c, g, or t
  misc_feature (1208)..(1215): n is a, c, g, or t
  misc_feature (1220)..(1220): n is a, c, g, or t
  misc_feature (1222)..(1230): n is a, c, g, or t
  misc_feature (1232)..(1236): n is a, c, g, or t
  misc_feature (1238)..(1239): n is a, c, g, or t
  misc_feature (1242)..(1242): n is a, c, g, or t
  misc_feature (1244)..(1248): n is a, c, g, or t
  misc_feature (1251)..(1262): n is a, c, g, or t
  misc_feature (1264)..(1275): n is a, c, g, or t
  misc_feature (1277)..(1282): n is a, c, g, or t
  misc_feature (1284)..(1299): n is a, c, g, or t
  misc_feature (1302)..(1311): n is a, c, g, or t
  misc_feature (1313)..(1315): n is a, c, g, or t
  misc_feature (1318)..(1324): n is a, c, g, or t
  misc_feature (1326)..(1329): n is a, c, g, or t
  misc_feature (1331)..(1347): n is a, c, g, or t
  misc_feature (1349)..(1357): n is a, c, g, or t
  misc_feature (1359)..(1362): n is a, c, g, or t
  misc_feature (1364)..(1374): n is a, c, g, or t
  misc_feature (1376)..(1396): n is a, c, g, or t
  misc_feature (1398)..(1409): n is a, c, g, or t
  misc_feature (1411)..(1412): n is a, c, g, or t
  misc_feature (1414)..(1415): n is a, c, g, or t
  misc_feature (1417)..(1420): n is a, c, g, or t
  misc_feature (1426)..(1433): n is a, c, g, or t
  misc_feature (1435)..(1442): n is a, c, g, or t
  misc_feature (1444)..(1447): n is a, c, g, or t
  misc_feature (1451)..(1452): n is a, c, g, or t
  misc_feature (1454)..(1459): n is a, c, g, or t
  misc_feature (1461)..(1461): n is a, c, g, or t
  misc_feature (1463)..(1463): n is a, c, g, or t
  misc_feature (1466)..(1470): n is a, c, g, or t
  misc_feature (1482)..(1482): n is a, c, g, or t
  misc_feature (1496)..(1496): n is a, c, g, or t
  misc_feature (1498)..(1498): n is a, c, g, or t
  misc_feature (1500)..(1500): n is a, c, g, or t
  misc_feature (1513)..(1513): n is a, c, g, or t
  misc_feature (1517)..(1517): n is a, c, g, or t
cttggaaaatccgcatatcattcgtacctttaaatacagttggttggatgtaataaccaccttccatatttccagtagtctctgcggcaccaccaccaatcaacaattcagcgccttcttttttcccaatatccatgtacgatagaattttttcgaattgctcacgcgatgcttgcgcaccaaccattgtatttgagtcaagtggatcactttgaacaattgctttaatgcgctccaaacatcgagccatgaagtcatcataaatatcttcatggatcaacgcacggcttgggcaagtacaaacttcgccttgattaaatgcaaacaatactagaccttcaatagctttatcaaagaatgcatcatcttcatccatgatatctttgaagaaaatatttggtgatttaccacctaattctaatgtgcatggaatgatatttgcagaagcatattgcattatcaaacgaccagttgttgtnnnnnnnnnnnnngnannntnnnnannannnnnannnnnngnnnnnngcnnnnnancctnnnnannanngncntnnnctnnnntnnnnnngnnngcannnnnnnnatcnnnnatnnnttnannnnnnnnnnnnntnnnnnnggnnnttnnnncnnntngnnnnnnnncnnnncannntnnnnnnnnnnnnnnanntnnnnnnttnnnnnncnnnannnnnnnnnnaannntncanngnnnnnttnnnnnanntnnnnnnannnntnntnngnagnnntannnnnnnntnnnnncnnnnnnnncacnnnnnnnnncnnntnnggnnnnaatnnnnnnnnnnaannnannnnnntnatnnnnngnnnnnnnnnnntnngaattagtnntnncanntntnnnttnannattttnnnnnntttctncntnattcnttgntnannatntnngtttnttnnnnngcncnttattgtncnggatnnnnnnnnnnnnncnnnnnnnnnnntttnannnntnnnnttnnnnnnnnnnnnttngnnaaannnnnnaannnntnnnnnnnnnantanaannnnngnnnnannnnnnnnnantannnnnnannnntnnnatnnnnnnnannnnnnnnnnnnntnnnngnnnnnnnnnnnnnnnncnnnnnnannnnnnnnnnnnnnnnnnnnnnnnnnnnntnnnnntnnnnnnnnnnnnnnnnnnnnnnncnnnnnnnctnnnnnnnntattntnnnnnnnnntnnnnnannttntnnnnnttnnnnnnnnnnnngnnnnnnnnnnnnannnnnnannnnnnnnnnnnnnnnttnnnnnnnnnntnnnaannnnnnnannnnannnnnnnnnnnnnnnnnannnnnnnnntnnnntnnnnnnnnnnnannnnnnnnnnnnnnnnnnnnngnnnnnnnnnnnntnnannannnnaaaagnnnnnnnnannnnnnnncnnnnaaanngnnnnnncncnaannnnngtgggggcaccngaaatatgctgaantnanttattattttagntaanaaaaagtagtttctttaagtccaatcgagggccacctggccacgataagctgtaatttttacctctgccattatttcaccatacttttcaaaaaactcttcaccatttttttcccagattttgttacagtcttcatatgcagccatatctttatattcaagccagttacccatcattaattttccttcagggagaaatagacggctagaatgaaatcttatcataccttgtggtctcagcttatcagcaagtaaagccatttccttttcaaatatttcatgtgatttatccataatttcttggttgggatattcaattgttgtaaaactaattattgtatcggacaacttattctctccttgtatcaaatattaacttatgtgttaatttctacatactttgtgagtgaagttaataattacgtaaggtaataaattggtttagcttgaattgttataaactttatgtatcgttacttcgtggtcggtcactagcccacattaaaaaaaggccctgtcaaaaatttgattaggagcctgtatgtattccaaaacaaatattctatctgatgatttaatttacatttttgataaaaagacgggtgagaaatttttcaaacaatcttctacacagttttgccagatagttcattataaaataaaatcagagaaatctggtgaaacacttttactatcagcggatggaataaaacgccgttttacccaaactcctcatacagaacataaacaattaaaagacatttttagatggctgcaaaaaattagatgattaatgtgattcagagcatttagtgaagcggctcatcaccaatttcagccatttttttatctaatagtgctctcattttctttttaatatttgtgtattttggattattgatttcgttaaaaagttccaaaggatcttttttacaatcaaataactcccattcacgatcttcaccgccgtgatttgttccaggtaagttaaagccctcgttgtaccaataaatcaatttataattttgatcccggatcccgtaatgagagtatgcattgtggtcaggatctttatgcatccaatatcggtgatatgccacctgtggccaattttcaggaatagtattccttagtaacggttttaaacttttaccctgcatatatgagggagtttttaaccctgcaaaatctaagaatgttggagcaaaatctacgttgcagcaaatatcatcagatatttgaccagattttatttcaattggataacgacacagaaaaggcatttgaaatgactcttcataaataaatcgcttatcaaaccagccgtgttcacctaagaaaaaaccctgatctgatgtatagattacaattgtattttccgttaaatgattttcatcaagataatctaagagttgaccaacactttcatctatcgaagcaatagtagcgagatatcttttcatgtatctttgatatttaaattggtgaaattctttttgagtttcaaagctaaatcgttcaccggtgtgtttatctatgagtattagattttttacattggaggggtttggaattttgcgttttgaacttttaggtcttgtacgtaatccaatttctgatccaccctctggctggaccaagccaagatcgtcataagtaacgtcatcttttattcgcatcttagcctcagcagcggctttggctcgatttttatagtcatcatcaaaggtactgggaactttaatatcagatgtaaaaagctctcgatattttggatgaggttcccattctcggtgtggagctttatgatggcacattaagaaaaatggttttttagaatttcttgatttgagccaagctaaacttttctctgttataatttctgtagcgtaaccatgttcttcaacctcttgacccatttcaataaaatgagggtcaaaataatctccctgacctggtaaaacagaccaataatcaaaaccagtaggttcatgatttttgccttctccaaggtgccatttacctacgattgcagtttgatagcctccagtttgaaggtgcttggcaacgttaggcatcttattgttcataggggtattcaaagtagtaacacaatttacgtgattgtaagttcccgcaaggatcgctgctctacttggtgtgcaaattgaatttgttacataacaatgattaagtcgaatgccttcatttgcaatacgatcaatatttggagtgttgttaatgccatactcatatgcgcttatggcttttgaagcatggtcatcagccattataaataaaatatttggttgttcagacaaagcaaacctatcaattgtattatttaaatctaatcaaataaattttgataaagcaattagttaatatcaagaacagcagccagttgtacactttggttttttaattggctggagatcactttctgatacaggaaattcacctgtcaatgtcatggtagatatt

SEQ ID NO: 376 - DNA, 4000 bp, Escherichia coli
  misc_feature (436)..(436): n is a, c, g, or t
  misc_feature (3764)..(3764): n is a, c, g, or t
ccagaatggatgattgtcagcgccgatgtacgtttgatcgccgaagaacaggatcaggctgaatggtcgcaaacccctggggcggaacaaacctcgatggccgaagaagggggcgggtttatttcgcgcacccgcttggttgaatcaagctgccggcattttctggcttgggtcaaccgctggcaagatgacgggttccgtccgctttatgacagttggatgcagcggttagaagcatccgcgccaattgatttcgctggtggcgaacaggctgaatggctgggtcttgatgaacatggcggcgcgttggtcaagcttgatggaaaagcatcatcggttatgccacatgaactcgaagctgtttgtggcacgccagttctgccctaaggggctggtctgttatggatagggaattggtaaaccagctatgaaactngcaaaaaccatccggtttgacccgtctgatctgaatgtgtttccgctggcagccgatgaaggcgaatgggcgcttgttggcactttctgctttgccggtattggtgaggccgatattaaaggcaaggtaaaacaagcgtttagcaatgggtttttggggcttgactcaatgggcttctcaaccttggttagcattgtcacggtaaagccggatgatcttgataagattgaaaaacggctttgttcgatttttatgaatgagtttggtgcccctgacgaagcagcggcgatggtcgcggtaactgaagaaatcaagttcatggcagatttatgcgccgaacataaaaccggcactttgctggcgattcagcgcagccttggcgatgatggaattcgcgagtctttccgcagccttgccaagcctgaatcttgcgccgagcagaaaatatggacaatggtcgatgatgatgacccagcagatagtgcagagcatcacgcgcatggtcagggataataggcaccgttgattgggccttcatggagtttgagaacgtaatgagcaatgatttttggcttacatctggatggcatttaacacttcgtgacgatcacgggcatatggtgccaagcgccgattttatgcgcgcctatttcatgcgtgaagaagtggccccggaagaggggtcatgcgatgctgaaattgcgcttcataagaaattggttgatgatccttttgcggcggtggtgccaacggatctatttgaaattgctgataaagatgttgtgcataattatcaggcggttttgcggttccgtaattttctggcagattatccgactttggaatcggcttatatggcaatggcacgcaatgcccagccaaatatcccgccgctgttttttgaacagatagcgcagattattcttcgcaatattcttgatggcgaaaccgatcctttgcaattgcgggcagccgagattctattccgcaatcaggtggtaacgcttgatgatgggcgaatcatggttgctgatcatgcaacagtgcaactgcaatcaggcatgcaaaaggcacttgagccaacaagcgcaaacgatgaggtgcaaattgatattctcgccacggaaacggccgatgaatattgggaacgatccgacctgtttaacacctcaattgacatcgcctatacccagccagcacttgatggtttggcgcgggttttagaaaaatggattgcgcattttctgccgcttgcggttcgcgtttcgccaatggtcaaaatcgaagatgaagcctggtcgtggcatattggtcttgatgccgaagccaccaaaattctgaatgatctgtatcgtggtgacgaggttgacgagcctcgattgcggcgcattttatgtcttttcaaattggaaaccgataacgggtttgtcgctgaaatggcgggtaaaccggtgtatcttgggctggcaatggatgaggcaggagtcgtaagaatgaaaccgcaaaacttgcttgtaaatctgccggttagcgatccatcttaatttaatgcgtaaatatatttaaggctgatctgcagcaggtttcgaatccaacccgccgcagatttaacagcttgattaattcagataatcgtcagttgtgcggggctttggccgatcgcgcatttccatcattttatctttttgctcgaacatggcctcaacacggcaatcctcacacattttcaagatatcggtctttgcgctgtcttgaaacatgctgtgatcggcaagcttgctgatcacccgctcgattgatttcgaactgccaaatggtttgccgcatgatgtgcattcaaatggtgtatcttcgataatcagctcggttgccatcgcgctgtcggcaagattgaattgcggcacaagcgcgatcactttttcagggcaggttgcaacgcaaataccgcattgcagacaggcatcttcacggaacagcaattgcggtgcatcaggattatcctgcaacgcgccagcggggcaagcgctgacacaagacaggcatatcgtacaattgtctgtatcgatctcaacacggccataaggcgcaccagcaggcaaatcaatcacggttcccgccgtgccatttgcattggcaaggccgcgcatggcaagccgtgtcattgaacgcggcgcaccaattgggctgaatggcgctggtttggcattgtttttacatgggctgttgtaaaagatttcggcaaccgcgtcagggtcgacagcatcaacaaggataatgcggttatcagcatcagccttaacaccggcaagcattgatcgtgccaatgtcacctgatcgacaagcggggcattttcaacatctttggccggattcagcagcacaaagacctgctgataaccaagcgcaattgccgccaccataatatcatgtccagcacgacccattgcatgcatcgaaacaggcagcaggctggctggtaaaccacggccaaaacgggcgatggtttcaatcatttcagcgccataggagtcatcatgaagcaacaggcttggggttttgccgccagctgcctgataataatcatgaaggttggcgatactggtcaacaacccgtctgccggcgggtaggcggtttgggctgcacccgatgggcaaacagcgccgcaaagcccgcagccaccgcaaatggccgggtcaatcgcaacatgatcaccaaggctttgaatggcgccggctgggcagacatcaagacagcgtgaacagccgccaattttattgcgtgaatgcgcgcaaagattttcatcaaaattcacatagattggcttttcaaagccgccaatcatttgcgccgcttcgctttcgatgttggcaagcgcgttgatatcatcaccggcggcgcggaaatatccgtcgcgtttttcccagccagtgaaaagtggcgtatcgcctgtcaggtcaatcagaatatcgcagcttgtttcgacatcatttgccggcgtttcaaattgaagcgagtcccggcttgatggtagggccgcgccaaattgatcgatcaccagatcaaaatgcgtgaaatggcctttggcgcttttgattttaccggttgcaaggatgccgcagtcctttgttggaaacagatcatcggttgggttggcaatcataacggtaacgcctaattgaccatttaatttttggccaagcgcaatggcggcatcagcaccgccgttcggacggcccatatcggcataaatcaggcagcggccatcagaatttagcgcaaggcttcgtgatggtgtttggccatcgcctgcctgtttgatcagggcgncgattttggcggtgctggttgctgattcatctgaccagccagcgcgctcacggatattgacggttgcgggcgaggggcattcaatctcttcggcaatggcgtcaaaaactgacgtttcctgcgtacaggcaatcagcaaagattggttcgcgtcgcgcgcatcgcgcatcgcggcggccagatcgcctgtttctgtccggcaaagcgaggttgcgatcgtgcagccaccttcggca

SEQ ID NO: 377 - DNA, 4000 bp, Escherichia coli
  misc_feature (2002)..(2002): n is a, c, g, or t
acagaccatggaccgcacatcggtgctgcctcccccaggctcacccttgaggcgccagctgatcgcgtcctcttcagcatcgtcgccgatgagcatgctcaggcgcacaatgccgctggacacaatcacagaagtcaacgagcagcgagcaatcagcccccccccagaagtgcccgtgacagcaattgcaggcgagacgccgccggaggccccgggccaggtagccgtaaagacagatgcaagcgagccatccgctagcgacgtcacccaagtcgccttgcccagcatccaagcgattctgagcagcgagcatctcgcacgtgagtatcagctgctcctgcaaagacctatcctcgcctccaccaccgttaccgcctcccctgccaccaccgtccccgcctccaccctctccatctctaccaccgccaccgccatcggcgccccctccctcaccaccacgttcaatgccgccgacgatcgccagccgtcccgggggctcgaggccgagaacgccaggctgaggatggaggtgcacgaacttcgaacagtgctggcgaagtgcgagtcgacgaccaagtcaagcagcacgcagtcaaaatcgattagcctagcatcaccgatgccgatgacgccggagatgcaagcatacgtagttaccggctcatcgatagcagccatcgaggcggagcagagtgcgattctgcgtcgctccgccgtaagccacacagatcaagtggcggcgactaccttgaggccagtcatcctggctcccacggtggagaagatgcggctgcacgacctggaagaacaccgtcggctgctggctgtgcgcgtcatccaggccatgtatcgggagtggaaggaggagcgccgccgacggaggcagccgcgggggacgacgaacgacaaagaagcagccgggcgctcgaagcagaaggcgaatgagaaaaagagtatgggccagcttgcactcgctgcgcgcatggccgcgaagaacaagactgagcccagcacagcggacagtgagacggagctaaagaagcgcgtgcctacgagagcgagccgatacatgatggctgcctcgacgtttgtgccaagcaaagggcgcgatgcagatatcagtcagggacgtctcgagcggatcgtgggcataccgcctgctctcgtcttcaacgcaatggagcgcgagcacgcctccgaaacgcttttcagttcgttcagcatcgatagcaccacgccgcgttcagagtggatgtacgtgctctttgaagaggtcgggtcgcgaccagaccgtgtccatgactgcacaccggagcgcgtgggttggcgactgcaagattttgtgctgtgcgacacggcgcgccgcgcctccctcacgcttgaggaggtaattgcaatccgcctttacactgggcccatgagcgagtggtacaattattcgctgcgcgacaggcgcaaggatgagttcacggctaccatccacactatcaactcagcaatcgtcaagctttcgacgctgcagcatgcggccacagtgtatcggcttatgacgatcaccaagcccatcgaccaggtgttcgccatagatgagagtggctcctgctgtggctttgaggtgggcttcctgtccacgacgagcagtcggaatgtcgcgttgcggctttccgagacccgtgttcacaagctagcacccgccggaaagcgcccatcactcacgggcgtcgccaaggcagccaaggttgctgctgaaccggaaaagaggaccgtcctcatgcgcttgagggtagtgcctttcgatcacgctggcgatgtgtcgttcgcttcacaagtccccgctgagggcgagattgtcttcgcgccgctgacgactctcgaggtagttagcttctatgaggacgacgccgacggagtcatcattgccgacgtgcgtgcgcgccgcagccatccagcacgcacgactacacagactatcggcaggatgaaggcgacgcatgtggatctngtggacattatgctcgacgagctcaaggcggccggtgctcccgagccttcgctcctgccactcgcgtgcttgcaattggatcgcaaggccgaggagcgcagctcacagtacaacctcccagacacatacgttgagtacacagcaactgcgctccaagtgcaccagcgcgtcttgcgccaactgagcgccgcgtcgaattgggccgacacgagcggtaaggacgccttcaaccgcatgatcggcgtgatagcactgcaggcgcagacgggcgaaattgaggctgcaatcgagctcgcgaagctcgctttcaagaagtctgggctaaacgcagagataacgaaccttcccgaagaactcggtcgggacatcgagtgggcggagaaggtggccgtcagcaagaagacgaaccaggccatgacagtgatcaagccctcggatgtgaagaagatgttctcatccccagtacatttcattttggaggcggccttgtacttcttcagcttgggagccgctcagccttggccacctctgattgccacgctcctctccaggctcacgcctgctggtcacgtagcatggggcgaactcatgcgcatgcaccttgatcggcagaagaaggtgatcaacaccaacgtgctcgtctggaatgagaagacgaagcgctggcagcaaggggtcatgtcgggtagtgaacgaatggttcgctatggtcatgaagagcgtggcgcgggctccattaagcacttgctttatccagtcgacgcggggatcggtgctctattcaacgaggtagtgggcagtggagacgagacgctggtcagcacgcttctcgaggcaaaggcgagcatgctctacagcgacgagcgcgccaactccaccttgcacctggcggtcgcgaagggcaaagcaaacgtgtgcaagctgctgctcaaggtcggcgctgacatgacgctgccgaacgcagacggccttacaccatgggatctcgccttgcgcagcagcaaccgcgcagtcgcgactgttctcaatccaggtgcggtagacctggacttggagggtcaggatacgccgtcgtcagcgctcggtggcaaccagcaagacaaggacttggtcagagatctgctcaagtttgccatcgcaggcgacaaggaacgtatgaagaaagtgatcgagtccgcgactggcaaaatcggtgagatgaacggtttcgtggacatgcccaacaaagacgaggtcacgcctctcatgtttgcagcacactcggacgcagaggatgcattgttatgcacgcgcatcctcatggagaggggggcgtcacagctgaagatatcgaggcgaggatgcactgcgctcatgatggccgcagccgctggaaacatccccatagtcaacatcctgctgcatcatcgagctcagattgaccggaagtgtatgggtggctacacagctctgcatctcgccatcgaatacgggcacgcagaagtggccacgaatcttatcatcgccggtgcggatgttaacacgaggctggacaatggctggagctgcttgatgacagccgcgcattgcggaacagtcggtgtgctgaaggatctaatcgagaagcctgatgacgcgaacgtcactttcacgccgccaaacgtggacaagcaatcgggcgagttcgccccaattcacatggccgcattccatggcttcgcatcaacgttgatggagttggtacgcctcggtgctgccatcgacctgcccatgaaaaatggctggaccgcgctcatgatcgcggcactgcaggggcacaaggcagcttgtgaggcgctgctgcagagcggcgcgcatatcgatcttcaatcgccattggacggcacgactccgcttatggccgcagtgtccaatccctacactgccgactgcgtcggcctgctgctccaggcgagcgcaagcgtgaatctgcgtgatggcatgggtttggacgcaatcatgttcgcctgtcgcaatggc

SEQ ID NO: 378 - DNA, 4000 bp, Escherichia coli
  misc_feature (546)..(546): n is a, c, g, or t
  misc_feature (588)..(588): n is a, c, g, or t
  misc_feature (627)..(627): n is a, c, g, or t
  misc_feature (639)..(639): n is a, c, g, or t
  misc_feature (1061)..(1061): n is a, c, g, or t
  misc_feature (1834)..(1834): n is a, c, g, or t
  misc_feature (1982)..(1982): n is a, c, g, or t
  misc_feature (1991)..(1991): n is a, c, g, or t
  misc_feature (2016)..(2016): n is a, c, g, or t
  misc_feature (2190)..(2190): n is a, c, g, or t
  misc_feature (3737)..(3737): n is a, c, g, or t
cgcctacttggctggggcacggtcgggaaccagtgctcagaaaaaccgctccgcggtgagtggcggtggggcaaagccatggcgacaaaagggtaccggtcgcgcgcgagcaggaaccagccgcagcccgatttggcgaggcggcggtcgagcgtttccgtcggccaaccgatcttatgctcagaagctaaatcggaagatgtaccgagcagccatacgatccatcctctctgaactggtccgccagggccgcgttctcatttgcgacgatatccttgttgacgaaccgaaaacctcgaagatgtccaagacgctgcaagggctgggtatctcgggccgcgtgctactggtgacctcggagtttgatttaaatgtggcgctctccgcgcgtaatctggttggggtcgagaccctcgaggcctctgagctcaacccagtgagcctggtgggcagcgaacacgtgatcttttctgaggcggccgttaaaaaggtagaggaggcactgcaatgaacatggaacgtcttcaccagatcatcctcgctccngtgatttctgagaagagcacctcggctgccgatctggccaancaggtggtcttcgaagtgcttccaaacgcgaccaagccngaagtccgtcangccgttgagcatcagtttaacgttaaggtggaagacgtacagattgttaatgtgcgtggcaaggtgaaacgctttgggcgctctcccggaaagcgccgtaactggaagaaggcatatgtccgtcttgccgaagggcaagacatcgacttcatgggtgcaggcgcctagacgtcaagcaagggctcattcggaacgctcattcggaaattagacgtaagaacaggattactcagatgccagtcgtaaaacaaaagcccacgtcagccggccgtcgaggcatggttcgtgtggtctccccagacctgtacaaaggtcgaccgatagcggctcttaccgaatcacaaacggccactaacggccgcaacaatgcgggtcgaataaccgttcgccatcggggcggtgggcacaagcatcattaccgnattgtggatttcaagcgcttaaaagacggtattcctgctcgcgtcgagcggttggagtacgacccgaaccgtagcgcgcatattgctttgctgctctatgctgatggcgagcgccggtacatcattgcccctaaaggtttaagcgcgggtgattcggttgtgtcgggcagcgacgccgcgatccggcccggcaacacgctgccgataaagaatattcccgtgggctcggtggttcattgcgtagagctgaagcccggaaaaggtgcacagctcgctcgctcggctggcgcatctgttcagtatctgggtcgcgaaggagcctatgcgctgatgcgccttcgctcaggtgagacgcggaaagtactcgccgagtgtcgggcaactatcggcgaagtgggcaattcagaaaattcgcttcgcaaatttggaaaagcgggcgccaagcgctggctcggtatccggcccacggtccgcggtgtggcaatgaacccggtcgaccatcctcatgggggcggcgaaggccgcacctccggcggccgccatccggttagcccgtggggtacgccgacgaaagggtaccgaacgcgccgaaacaagcgcaccagttcaatgattattcgcagaaggaagaaataggtatgcctagatccgtcaaaaaaggcccctttgttgatcattcgctgtgggcgaaggtatctaaggcaaaagacgaaggctcgcggcgcccgattaagacctggtcccgacgatccatgatcatgccggaatttgtnggattgaccatcgcggtgcacaacggaaagcaacacgtgccggtgctggttaccgagaacatggtcggtcataagctcggtgagttcgccgcgacccgcaccttccggggccacgtggcggatcgcaagacgaagtagggctgccggnattttaaanccgcctgaatgctattcgacgcaancaacagccaaaaaaagacagatcaaagcaagaagtaagaatagagcctatagaaaaaaagagacgaaacgagcggtggttaccgcatgtctcagcatgacactagcttagagagattaagaaaatggaagtcaaagcggtcgcccgatttgtccggttgtctccccaaaagggncggctggttgcggatcaggtgcgaaatctgccggtgggtaaggcgttggagctgctgcagttcagtccgcgaaaagcggcaggcgtgattcgcaaggtgctggaatcggccattgcgaacgccgagcataacgagggcgctgacatcgacgagttgcgcgtgagtcagatcatggtggatgagggtccagttatgaagcggtggctcccgcgggcaaaaggccgggccactcctttgatcaagccaacgagtcacattacggtcagcgtcagcgacgtcgctaaagggggcaattagcaaatgggtcaaaagattcatccaaacgggtttcgcctaggcgtcatccgtgactgggacgccaagtggttcgcaatgggtagcacctatgctcgaaacctcgttgccgatcaggggattcgtaagtttctccgcaaacggcttgccaacgctgccgtgagcaggattgagctggttcgggctggtgagacgctcaatgtcaccattcacacggggcgcccgggcattgtgatcgggaaaaagggagaggatattgagaagttgcgccgcgatattctggcgctgaataacaatgtgccggtacaggttgctgttgaagaaatccgcaagcccgagttggacgctcgactcgttgctgagaacgtgtgtcagcagctcgagaagcgaatcatgttccgtcgggcaatgaaacgcgcggttcagaatacgatgcgactcggcgctaagggcgtgaagattatgatctcgggccgattgaatggggcagagattgcccggaccgaatggtaccgagaaggccgcgtacctttgcacaccttgcgcgctgatgtggactacggcttttctgaggcgcaaacgacgtacggcgtgatcggagtgaaggtttggattttcaagggagaaatcctcccaggcgcctctgaggtggaagcgccgaagaccgcgcaagcgaacgccacagtctgaggtcaggttagatgctccaaccgaaaagaacaaaattcaggaaacaacaaaaaggccgaaatcgcggtctggcggtgcgtggcagcaacgtcagttttggcgactttggcctgaaatgcaccggacgcggtcgcctgaccgcgcgccagattgaggctgctcgtcgggccattaaccgctatgtcaagcgcggtgggcgggtctggattcgggtcttcccggataaaccggtatcgaagaagcctctggaagtacgaatgggaaaaggaaaggggaaccccgagtattgggtcgcgttggtacaacccggcaccatgctttatgaaattcagggcgtggaggaagagatggctcgagaggcctttcgacttgcgggagcaaaacttccgatatccacgtcgttcgtcaaacgtcaggcagcgtaggattaaacggcaatggcggaaaagaaagtggtcggcatgaacgccgaagaacttaaggcagagcttatcgatctgcgcaaggaacaattcaacttacgcatgcagcgtggaaccggtcagttggcgaatccttcgcgnttcaaggtggttcgacggcaaattgcgcgaattaagactcgcatgagtgaaataaacaggactgtgtcatgagcgaagaacaatctacgcaaaaagcctcgagtgcacgtacgcttcagggcagcgtcgagagcgccaagatggataaaaccatcacggttctggtggagcgtcagcttcagcaccctctgtacaaaaaatacatccgccgatcgacccgattgcacgcgcatgacgaaaacaacgagtgtcagaagggcgat

SEQ ID NO: 379 - DNA, 4000 bp, Escherichia coli
  misc_feature (762)..(762): n is a, c, g, or t
  misc_feature (786)..(786): n is a, c, g, or t
  misc_feature (930)..(930): n is a, c, g, or t
  misc_feature (1677)..(1677): n is a, c, g, or t
  misc_feature (1992)..(1992): n is a, c, g, or t
  misc_feature (2001)..(2001): n is a, c, g, or t
  misc_feature (2015)..(2015): n is a, c, g, or t
  misc_feature (3242)..(3242): n is a, c, g, or t
  misc_feature (3524)..(3524): n is a, c, g, or t
  misc_feature (3530)..(3530): n is a, c, g, or t
  misc_feature (3532)..(3535): n is a, c, g, or t
  misc_feature (3539)..(3539): n is a, c, g, or t
  misc_feature (3543)..(3548): n is a, c, g, or t
  misc_feature (3550)..(3551): n is a, c, g, or t
  misc_feature (3553)..(3553): n is a, c, g, or t
  misc_feature (3556)..(3557): n is a, c, g, or t
  misc_feature (3559)..(3560): n is a, c, g, or t
  misc_feature (3563)..(3564): n is a, c, g, or t
  misc_feature (3570)..(3572): n is a, c, g, or t
  misc_feature (3574)..(3579): n is a, c, g, or t
  misc_feature (3581)..(3585): n is a, c, g, or t
  misc_feature (3587)..(3589): n is a, c, g, or t
  misc_feature (3593)..(3595): n is a, c, g, or t
  misc_feature (3599)..(3600): n is a, c, g, or t
  misc_feature (3602)..(3606): n is a, c, g, or t
  misc_feature (3608)..(3608): n is a, c, g, or t
  misc_feature (3610)..(3613): n is a, c, g, or t
  misc_feature (3615)..(3617): n is a, c, g, or t
  misc_feature (3620)..(3622): n is a, c, g, or t
  misc_feature (3624)..(3624): n is a, c, g, or t
  misc_feature (3627)..(3629): n is a, c, g, or t
  misc_feature (3631)..(3633): n is a, c, g, or t
  misc_feature (3636)..(3642): n is a, c, g, or t
  misc_feature (3644)..(3647): n is a, c, g, or t
  misc_feature (3649)..(3649): n is a, c, g, or t
  misc_feature (3651)..(3653): n is a, c, g, or t
  misc_feature (3655)..(3658): n is a, c, g, or t
  misc_feature (3661)..(3661): n is a, c, g, or t
  misc_feature (3663)..(3668): n is a, c, g, or t
  misc_feature (3671)..(3672): n is a, c, g, or t
  misc_feature (3674)..(3674): n is a, c, g, or t
  misc_feature (3676)..(3678): n is a, c, g, or t
  misc_feature (3680)..(3681): n is a, c, g, or t
  misc_feature (3685)..(3685): n is a, c, g, or t
  misc_feature (3688)..(3688): n is a, c, g, or t
  misc_feature (3690)..(3693): n is a, c, g, or t
  misc_feature (3696)..(3696): n is a, c, g, or t
  misc_feature (3698)..(3698): n is a, c, g, or t
  misc_feature (3700)..(3700): n is a, c, g, or t
  misc_feature (3702)..(3703): n is a, c, g, or t
  misc_feature (3705)..(3706): n is a, c, g, or t
  misc_feature (3708)..(3711): n is a, c, g, or t
  misc_feature (3713)..(3713): n is a, c, g, or t
  misc_feature (3716)..(3717): n is a, c, g, or t
  misc_feature (3720)..(3721): n is a, c, g, or t
  misc_feature (3723)..(3724): n is a, c, g, or t
  misc_feature (3726)..(3726): n is a, c, g, or t
  misc_feature (3728)..(3729): n is a, c, g, or t
  misc_feature (3731)..(3731): n is a, c, g, or t
  misc_feature (3733)..(3735): n is a, c, g, or t
  misc_feature (3739)..(3741): n is a, c, g, or t
  misc_feature (3743)..(3752): n is a, c, g, or t
  misc_feature (3754)..(3755): n is a, c, g, or t
  misc_feature (3757)..(3757): n is a, c, g, or t
  misc_feature (3759)..(3773): n is a, c, g, or t
  misc_feature (3776)..(3776): n is a, c, g, or t
  misc_feature (3779)..(3785): n is a, c, g, or t
  misc_feature (3788)..(3795): n is a, c, g, or t
  misc_feature (3797)..(3801): n is a, c, g, or t
  misc_feature (3803)..(3804): n is a, c, g, or t
  misc_feature (3806)..(3817): n is a, c, g, or t
  misc_feature (3819)..(3820): n is a, c, g, or t
  misc_feature (3822)..(3830): n is a, c, g, or t
  misc_feature (3832)..(3833): n is a, c, g, or t
  misc_feature (3836)..(3837): n is a, c, g, or t
  misc_feature (3839)..(3852): n is a, c, g, or t
  misc_feature (3854)..(3858): n is a, c, g, or t
  misc_feature (3860)..(3860): n is a, c, g, or t
  misc_feature (3862)..(3865): n is a, c, g, or t
  misc_feature (3868)..(3869): n is a, c, g, or t
  misc_feature (3871)..(3872): n is a, c, g, or t
  misc_feature (3875)..(3881): n is a, c, g, or t
  misc_feature (3884)..(3884): n is a, c, g, or t
  misc_feature (3887)..(3887): n is a, c, g, or t
  misc_feature (3889)..(3889): n is a, c, g, or t
  misc_feature (3892)..(3902): n is a, c, g, or t
  misc_feature (3904)..(3905): n is a, c, g, or t
  misc_feature (3908)..(3913): n is a, c, g, or t
  misc_feature (3915)..(3919): n is a, c, g, or t
  misc_feature (3921)..(3925): n is a, c, g, or t
  misc_feature (3927)..(3928): n is a, c, g, or t
  misc_feature (3930)..(3930): n is a, c, g, or t
  misc_feature (3937)..(3940): n is a, c, g, or t
  misc_feature (3942)..(3944): n is a, c, g, or t
  misc_feature (3947)..(3949): n is a, c, g, or t
  misc_feature (3951)..(3952): n is a, c, g, or t
  misc_feature (3955)..(3960): n is a, c, g, or t
  misc_feature (3963)..(3967): n is a, c, g, or t
  misc_feature (3969)..(3970): n is a, c, g, or t
  misc_feature (3972)..(3976): n is a, c, g, or t
  misc_feature (3979)..(3980): n is a, c, g, or t
  misc_feature (3982)..(3982): n is a, c, g, or t
  misc_feature (3984)..(3988): n is a, c, g, or t
  misc_feature (3990)..(3992): n is a, c, g, or t
  misc_feature (3995)..(3996): n is a, c, g, or t
  misc_feature (3998)..(3998): n is a, c, g, or t
  misc_feature (4000)..(4000): n is a, c, g, or t
ttcaaacccttatcttgcggctcgttagctttgggtgcgcgtaactgttgttgtacaaagtcaccttctgcagttttagagttccgaacgaattgccttagctgctcggccccgctatctgcatcagcagcaataccaatacttggagaaaataaaatgaatatgctgactgcgactgtaatcgcacgcactaagaagagtctttgcaaaatgaaaccttactctgatgggcgatgcagaatttcgcggttaccgccgttgcccattttggatacgaggccagctttttccatatcttccagcaagcgggccgcacggttataaccaatgcgcagatgacgttgtactagtgagattgaaggacgcttgttatccagaacgattgccacggcctgatcgtaaagtgggtctgcttcgccaccaccctcacctgtcaaggcatccatagtggattcatctgcgccttcaaggactccatcaatgtaattggcttcgcctttttctttaagccactcgaccacgcgatgtacttcatcatctgatacaaaggcgccatgtacgcgcactggcaaaccagtacctggggccatgtacaacatgtcacccatacccaacaaagcttcagcgccctgttgatccaaaatcgtacgactatcaatcttgctactcacttgaaacgaaatacgtgttggtacgttggctttaatcaagccagtaatcacatccacgcttggacgttgtgttgctaataccaaatgaatncctgcagcacgggccttctgggcnatccgtgcgatcaactcttcaatcttcttaccttgaaccatcatcaagtcagcaagctcgtcgatcacaatcacaatcacgggcgctttatagattggctctggatcatctggcgtcaagctaaatggattggtgagtctttcncctttttcttcggcttctaaaattttcttattaaagccagcaaggttacgtacgccaaacttactcatcagtttgtagcgacgctccatctcattgaccgcccaattgagcgcgttatacgcctgcttcatatcggtaaccactgggcacaacaaatgcggaattttgtcgtacattgccatctcaagcatcttcggatcaatcatgatcaagcgcacttcatcaggcttagccttaaacagcatcgacaaaatcatggcattgataccaaccgactttccagcgccagttgtacctgcgactaaacaatgcggcatcttcgccaagtcggcaaccattggactgccagaaatatctttacccaaagctagcgttagcaaggaatggttatcgttataaacctgtgaagtcagaatctcagagaggtaaacagactgacgagttgggtttggtaattccaaagccatacatgttttgccagggatagtttccacaacgcgcatactcacaacaccaagtgagcgagctaagtcgcgcgacagattcacaatctgactacccttcacgccaaccgcaggatcaatctcataacgcgttaccactgggccagggtaggcagcaatgaccaccacctgaacaccaaactcggccagcttgcgctcaattaaacgagaggtaaattccagcacatcggcagaaatggtttcttttacttcgggaactggatcaagcaaggccaagggtggnaactctgaatccggaatatccacaaacaaaggttgctgcttttcacgctcaacccgggcactcttaacaatctctactggggcacgcacaatttgtactggagcagcaacctcaacgcgcccccggaattcttctacgtattcttcacgctcttcagccgcggcttcaccaagcttgcggtcttcttcgctctcacgacgctcacgcaaacgcatgtaagccaattcgaggtaacgccctactttttcagcgacatcgagccatgaaaaatgcagaaataaagaaagccccgcacaaagcccaaacagcagtacnaatgtggcnccagtaaagcccanagacatctgcaggggatcgccaatcaattcacccaaaatgccgccagggggacgtggaagctgccagccaagtgaatgcaaacgaatcgactctaagcccatactgctgaccaaggtcaatccaaaacccagccagcgcattaaaaatgaatcaggcttggcctctgggtcggcgggcaaaggaatactccaaagctcacgccagccattaagaacccgacgaccaaagatggcaacccaccaaaaagcagatatcccgaagatatagagcattaaatcggcaatataggccccaaaacgaccgcccaggttcttgggagcctcaaaactagcatgagaccaggctggatcagctttggaataggtggccaaaatggcaaataaagccaagcaaaggccgagggagataaaccagcgagcctctaggagaaggcggggcatcctgccctgcccatcaagttctgggggctgggggctcagtggagtcttggacttcgggtatacagttctcgccatgttctcccgattgtaaacaagcaaatctataatttggggatgacaacaaataccctaaaacactccaaagtcctgatcctcggatctggccctgccggctatacagccgctgtttatgctgcccgcgctaatttgcagcctaccctcatcacgggattggctcaaggaggtcaattaatgaccactacagacgttgaaaactggccggcagaccctgatggggttcaaggtccagaactcatggaacgcttcctaaagcacgctgagcgctttaatactgaaatcatttttgatcacattcatacggcagctctgacagaaaagccaatacgcttagttggcgattctggcacctatacctgtgatgccttgattatttctactggggcctcggcgcaatacattggcttaccaagtgaagaagcttttatgggtcgcggtgtttctggttgcgcaacttgtgatggattcttttataaaaaccaagatgtttgcgtagtaggtggtggcaacactgcagttgaagaagcgctctacctcactggtattgccaaaaaggttatcgtcattcatcgtcgcgataagttccgtgctgagccaattttgaatgaccgcttaatggcaaaagttgctgaaggcaaagtagagctcaaactaaactccacactggatgaagtgcttggagatgaaaaaggtgtcactggtgtacgnatcaagaaacaagatggcagcacagaagatattgctgtaactggtgccttcattgcaattggtcacaaacccaataccgaattgtttatcggtcagctcgacatgaacaacggctacctcaagacccactccggcttagaaggcaatgcgactgctaccaacattccaggcgtctttgcagcaggcgacgtacaagatcacatctatcgccaagctattaccagtgcaggcactggctgcatggcagcactcgatgcgcagcgttacttagagtcgctgtcntaagangnnnncagntgtnnnnnntnntnaanncnnaannaaaaannncnnnnnntnnnnngnnntttnnntttnnannnnntnannnnannnaannnanttnnngnnnccnnnnnnngnnnntnannnannnnttngnnnnnnccnntngnnntnntttnccntnnnnccnantncnnanngnnnncnaannaanntnnantnngntnnnaaannncnnnnnnnnnnanncnannnnnnnnnnnnnnnccnttnnnnnnnttnnnnnnnncnnnnntnncnnnnnnnnnnnntnncnnnnnnnnnannttnntnnnnnnnnnnnnnntnnnnncnannnnttnntnnttnnnnnnnccnttngnaannnnnnnnnnntnnttnnnnnnannnnnannnnnanngnttttttnnnnannnttnnncnnccnnnnnnttnnnnntnntnnnnnaannantnnnnntnnnttnngncn

SEQ ID NO: 380 - DNA, 4000 bp, Escherichia coli
  misc_feature (1)..(1): n is a, c, g, or t
  misc_feature (3)..(6): n is a, c, g, or t
  misc_feature (10)..(10): n is a, c, g, or t
  misc_feature (13)..(18): n is a, c, g, or t
  misc_feature (20)..(23): n is a, c, g, or t
  misc_feature (25)..(25): n is a, c, g, or t
  misc_feature (27)..(27): n is a, c, g, or t
  misc_feature (29)..(31): n is a, c, g, or t
  misc_feature (63)..(63): n is a, c, g, or t
  misc_feature (1985)..(1985): n is a, c, g, or t
  misc_feature (1988)..(1988): n is a, c, g, or t
  misc_feature (3189)..(3191): n is a, c, g, or t
  misc_feature (3194)..(3197): n is a, c, g, or t
  misc_feature (3199)..(3199): n is a, c, g, or t
  misc_feature (3206)..(3208): n is a, c, g, or t
  misc_feature (3210)..(3210): n is a, c, g, or t
  misc_feature (3212)..(3212): n is a, c, g, or t
  misc_feature (3216)..(3220): n is a, c, g, or t
  misc_feature (3222)..(3224): n is a, c, g, or t
  misc_feature (3226)..(3227): n is a, c, g, or t
  misc_feature (3230)..(3230): n is a, c, g, or t
  misc_feature (3233)..(3233): n is a, c, g, or t
  misc_feature (3235)..(3237): n is a, c, g, or t
  misc_feature (3240)..(3247): n is a, c, g, or t
  misc_feature (3249)..(3249): n is a, c, g, or t
  misc_feature (3251)..(3251): n is a, c, g, or t
  misc_feature (3253)..(3256): n is a, c, g, or t
  misc_feature (3259)..(3259): n is a, c, g, or t
  misc_feature (3261)..(3263): n is a, c, g, or t
  misc_feature (3265)..(3265): n is a, c, g, or t
  misc_feature (3270)..(3272): n is a, c, g, or t
  misc_feature (3274)..(3275): n is a, c, g, or t
  misc_feature (3277)..(3277): n is a, c, g, or t
  misc_feature (3279)..(3280): n is a, c, g, or t
  misc_feature (3286)..(3288): n is a, c, g, or t
  misc_feature (3290)..(3292): n is a, c, g, or t
  misc_feature (3294)..(3294): n is a, c, g, or t
  misc_feature (3299)..(3300): n is a, c, g, or t
  misc_feature (3302)..(3302): n is a, c, g, or t
  misc_feature (3305)..(3308): n is a, c, g, or t
  misc_feature (3311)..(3316): n is a, c, g, or t
  misc_feature (3318)..(3319): n is a, c, g, or t
  misc_feature (3321)..(3324): n is a, c, g, or t
  misc_feature (3327)..(3330): n is a, c, g, or t
  misc_feature (3333)..(3334): n is a, c, g, or t
  misc_feature (3336)..(3337): n is a, c, g, or t
  misc_feature (3339)..(3339): n is a, c, g, or t
  misc_feature (3343)..(3343): n is a, c, g, or t
  misc_feature (3345)..(3345): n is a, c, g, or t
  misc_feature (3349)..(3359): n is a, c, g, or t
  misc_feature (3361)..(3363): n is a, c, g, or t
  misc_feature (3365)..(3367): n is a, c, g, or t
  misc_feature (3369)..(3369): n is a, c, g, or t
  misc_feature (3371)..(3375): n is a, c, g, or t
  misc_feature (3377)..(3381): n is a, c, g, or t
  misc_feature (3384)..(3384): n is a, c, g, or t
  misc_feature (3387)..(3388): n is a, c, g, or t
  misc_feature (3390)..(3392): n is a, c, g, or t
  misc_feature (3394)..(3394): n is a, c, g, or t
  misc_feature (3396)..(3396): n is a, c, g, or t
  misc_feature (3398)..(3399): n is a, c, g, or t
  misc_feature (3401)..(3401): n is a, c, g, or t
  misc_feature (3403)..(3406): n is a, c, g, or t
  misc_feature (3408)..(3411): n is a, c, g, or t
  misc_feature (3413)..(3413): n is a, c, g, or t
  misc_feature (3415)..(3415): n is a, c, g, or t
  misc_feature (3417)..(3417): n is a, c, g, or t
  misc_feature (3419)..(3420): n is a, c, g, or t
  misc_feature (3422)..(3423): n is a, c, g, or t
  misc_feature (3426)..(3430): n is a, c, g, or t
  misc_feature (3432)..(3441): n is a, c, g, or t
  misc_feature (3443)..(3444): n is a, c, g, or t
  misc_feature (3446)..(3446): n is a, c, g, or t
  misc_feature (3448)..(3460): n is a, c, g, or t
  misc_feature (3463)..(3463): n is a, c, g, or t
  misc_feature (3465)..(3470): n is a, c, g, or t
  misc_feature (3472)..(3472): n is a, c, g, or t
  misc_feature (3474)..(3475): n is a, c, g, or t
  misc_feature (3477)..(3483): n is a, c, g, or t
  misc_feature (3485)..(3485): n is a, c, g, or t
  misc_feature (3487)..(3488): n is a, c, g, or t
  misc_feature (3490)..(3491): n is a, c, g, or t
  misc_feature (3493)..(3493): n is a, c, g, or t
  misc_feature (3495)..(3496): n is a, c, g, or t
  misc_feature (3498)..(3498): n is a, c, g, or t
  misc_feature (3501)..(3503): n is a, c, g, or t
  misc_feature (3505)..(3507): n is a, c, g, or t
  misc_feature (3509)..(3510): n is a, c, g, or t
  misc_feature (3513)..(3527): n is a, c, g, or t
  misc_feature (3529)..(3548): n is a, c, g, or t
  misc_feature (3550)..(3552): n is a, c, g, or t
  misc_feature (3556)..(3556): n is a, c, g, or t
  misc_feature (3559)..(3559): n is a, c, g, or t
  misc_feature (3561)..(3561): n is a, c, g, or t
  misc_feature (3563)..(3566): n is a, c, g, or t
  misc_feature (3568)..(3569): n is a, c, g, or t
  misc_feature (3571)..(3575): n is a, c, g, or t
  misc_feature (3577)..(3579): n is a, c, g, or t
  misc_feature (3581)..(3581): n is a, c, g, or t
  misc_feature (3583)..(3584): n is a, c, g, or t
  misc_feature (3586)..(3587): n is a, c, g, or t
  misc_feature (3591)..(3594): n is a, c, g, or t
  misc_feature (3596)..(3597): n is a, c, g, or t
  misc_feature (3599)..(3600): n is a, c, g, or t
  misc_feature (3602)..(3608): n is a, c, g, or t
  misc_feature (3610)..(3611): n is a, c, g, or t
  misc_feature (3613)..(3621): n is a, c, g, or t
  misc_feature (3623)..(3623): n is a, c, g, or t
  misc_feature (3625)..(3626): n is a, c, g, or t
  misc_feature (3628)..(3630): n is a, c, g, or t
  misc_feature (3632)..(3635): n is a, c, g, or t
  misc_feature (3637)..(3637): n is a, c, g, or t
nannnnttanttnnnnnnannnnananannnaaaaaaaaaaaaaaaaaaaaaaaaaaaaaaanaaaaaaaaaaaaaaaaaaaaaaaaaaaaaaaaaaaaaaaaaaaaaaaaaaaaaaaaaaaaaaaaaaaaaaaaaaaaaaaaaaaaaagaaaagagattaaaaatagaatattcgaaaccttccatttatgtttagatggacataatttcattgatagtataaattttatggcatagttcaataatttaaattctcctgaatcagaattagaaatttgaaatttaggattaacctcttttggaagaagaatcagtcaatattccattttcatttcctgaagaaagcagctaattggatatccaaataactatctggaccacattttatttttgttaataattatttttcattttataaaatgaatatttttttttataaaatataacatcattttgttttaataataatataaataatgtcaaaaaatgattcaaatactctattattttataaagaattaaattcaacgtgtaatccagaaaaattattagaaatagcaaataaaggtatatttttatatgaacctttatatacatataataatataaaatatcatgaatatgttgtagatataagttttactgcaaatcaaaattttatgatatttaatgataaacaatataaaagattagtttattttttaactaataacgataaaaataactctataaaaaatattgttattaataaatattttttgagtaaattaatgagtgaaacggattataatgtaataaacaattatatcagtaatttggagaaatcccttctaaatgaatctatggactatattattaaatatctatttaaatataattatgtgtcaattcaattttataatttatttactgaaaatcgtaataatttgatttatgatttaatggaatatttttattttgataataaaaattattattttaatgataattttaattataataattatgtagaaatagttgaatatgtcatgagtaatatatatgatgtaaatataataaaatattgtattgaaatgtcgaaaaaacataatatattgatttcacaagataatgtttataattactttaaaataccaatgtgtcttccttttaatataaaaagttacactaaaaaaatatataaatcaaataaattaaagtttattatacaagataatataaaagataaagaatattatgaagaagtcattaatactatattttcagattggttttttgattcaatgaaaactaataatttatttaatttaaatgaagacttttattctaatattatgagtaaatatgatattaatccaaaaataataaataaatatgaaattcataatattaatgatgataaaatatattttacaccattcattaacaaggaagcttataaaaaaacaataactacggaaagtatttctaaagatatatatcctttgcgtgaaaaagttttttacaattctgatgtaataaatttgatattagaaaatcctaattatttattaaatctaaacataaatttaattgatgtggaaatagaatttaataaatatgatttctataccaatgctgtagttgaaaaaattataataataataatatatatggtgtcattactacataataaaggtaattattttattatgaatacattgttattgtatattaaaagatatcataatatggcaattaaaaataataaaatagtatttatttcaaataatttttcgactggaaatttattattaaattatattcgtaaaatttctaataaaacattccggagttatattgtatacgaataatccgatgataagatcaatatttgttacatatttttgtatactgttacgtaatttaaaagaaattacagttattatatttatataataattttaacgatgtacctttttttttttttttaaatattaatttnaanaattatacattaaatttttttttcaaaaaaaaaaaattaaaataattttcatataaatcagcaaataattaatatagaaattattattattattattattattattataaatataataataataatattttactaataaaataatagtaattataaatcgattaatttatattttatatacatattaaaactataaatcaaggattaatttaacttttataaaatttaacattaatttttataaaaaatatgtatatcgtaaattcaaataattttatatttaaattatttattatttaatatttttagctccaaagaaaagtattatatatatatatatttaaatattttgtttagatttaatagtacaatagaaataaaagttatatggtaaaattacaatattgaatattgtaataaatatcataataataattcttactttactaattattcaaaataaatatgtaaactattaaatgacaatattatataaaaaattttcaatatcataaagtgtaaataattctttaataatagactcattttatcatttttaggatttaaataattggagttgaaaacatttctatttaatatagtattaagtattggaaagcattttttgtagaataaataaatcggtttaaagtaataaagaattggtaacatcttgatataaatgaattaaattatatttattttgtattttctaacataaatttatcgtaatccaaacatgattagtgataatttatggtcaaaaccataaggacatggagatgatattttatttcctacgttaaagaccttttaaattttaatatatttttctttttcatcagaaatttcataaccccgaccaattgcagaataatttggataatcaagaatttcttcattttgtaagcactacgagaaataaaataaccatcataatataaactagaactcaatgtggttattaaataacaaagattgtcagtatctatatttccaatagatatattagtaatatctaataaagattctgaagtaataattaataagtttcttaaatatttatttatttatttatttatttatttatttatttatttatttatttatttatttatttatttatttatttatttatttatttatttatttatttatttatttatttatttatttatttatttatgtatttatttatttnnntannnntntattttnnnananttannnnntnnnannttnaanannnaannnnnnnnanantnnnntanannnanaattnnntnnantnnaaattnnntnnnanttaanntnatnnnnaannnnnntnntnnnnaannnnatnntnngnaaantnaatnnnnnnnnnnntnnntnnntnannnnntnnnnntanaannannnananannanannnnannnngnanananntnnatnnnnnannnnnnnnnnannanannnnnnnnnnnnnatnannnnnnangnnannnnnnnananngnnanannanaannnannnannatnnnnnnnnnnnnnnntnnnnnnnnnnnnnnnnnnnncnnnatcnaananannnntnntnnnnnannnantnntnncttnnnnanntnntnnnnnnncnncnnnnnnnnncntnntnnnannnntnctttattacatttctcgatatttcagcgcgatttaatcttttacaacgatttgaatatctatcattttttttacaataatttgttatacattcatcatcattattgcatgcactttcaccaattactgatactccatcttttacaatagaactaaaggaacagatatttttatttttacaataaattacacttttacattttgatacacctatattgccttcgtgataccaagcacatttagtatactttgggcattcgttttcacgaaattcacatggaatatccattctattatataatgataataaaaagaaaaaaaacaatgatatttaatagttaatgattaatactttttaaaataa

SEQ ID NO: 381 - DNA, 4000 bp, Escherichia coli
  misc_feature (155)..(155): n is a, c, g, or t
  misc_feature (167)..(167): n is a, c, g, or t
  misc_feature (185)..(185): n is a, c, g, or t
  misc_feature (215)..(215): n is a, c, g, or t
  misc_feature (497)..(497): n is a, c, g, or t
  misc_feature (731)..(731): n is a, c, g, or t
  misc_feature (854)..(854): n is a, c, g, or t
  misc_feature (869)..(869): n is a, c, g, or t
  misc_feature (941)..(941): n is a, c, g, or t
  misc_feature (974)..(974): n is a, c, g, or t
  misc_feature (1013)..(1013): n is a, c, g, or t
  misc_feature (1019)..(1019): n is a, c, g, or t
  misc_feature (1119)..(1119): n is a, c, g, or t
  misc_feature (1139)..(1139): n is a, c, g, or t
  misc_feature (1400)..(1400): n is a, c, g, or t
  misc_feature (1545)..(1545): n is a, c, g, or t
  misc_feature (1646)..(1646): n is a, c, g, or t
  misc_feature (1685)..(1685): n is a, c, g, or t
  misc_feature (1736)..(1736): n is a, c, g, or t
  misc_feature (1820)..(1820): n is a, c, g, or t
  misc_feature (2047)..(2047): n is a, c, g, or t
  misc_feature (2137)..(2137): n is a, c, g, or t
  misc_feature (3031)..(3031): n is a, c, g, or t
  misc_feature (3088)..(3088): n is a, c, g, or t
  misc_feature (3298)..(3298): n is a, c, g, or t
  misc_feature (3361)..(3361): n is a, c, g, or t
  misc_feature (3365)..(3365): n is a, c, g, or t
  misc_feature (3515)..(3515): n is a, c, g, or t
  misc_feature (3553)..(3553): n is a, c, g, or t
  misc_feature (3577)..(3577): n is a, c, g, or t
  misc_feature (3608)..(3608): n is a, c, g, or t
  misc_feature (3611)..(3611): n is a, c, g, or t
  misc_feature (3629)..(3629): n is a, c, g, or t
  misc_feature (3715)..(3715): n is a, c, g, or t
  misc_feature (3941)..(3941): n is a, c, g, or t
  misc_feature (3956)..(3956): n is a, c, g, or t
cgacgacctctttgaccatgtgtttggcgctggctttgcccacaggtggttttgcccagacaacagaaagctgcgtggccgaaggggagcaaaccgtgttcccatgcgtgctgcctgacggcagtgtcgtggcggatgcggatcagatgatgacnttgcgtgccganggcgatctggcgcaggcncttggtcttgaggcggaagcccagaccgangcgcaagccgagcccgatgcagaagccgccgctgaaaccgtagacgccgcggaagagcaggctgccgccgccgccgaggccgaagccgctgccaccgcagaagcccaagccgccgcggaagagcaagccgctgccgacgcagaggccgccgccgctgccgctgaagcagaagctgctgaggcgcaagctgcagccgatgcagaagccgccgccgccgcgcaggccgctgaacaagaggccgccgaagctcaggccgctgcagacgcacaagccgccgaggcngaggaagctgctgccgccgaagcgcaggccgaagcagagcgtgaggatgcggtcgctgcacagatcgccgcagacgctgaagccaaggctgcagccgaagccgaggcagagcaagacgccgctgcggctgccgaaacctcggaaagccctgaagcgcagtctgccgagacacaggcagatgcccctgccgctgaaagcgatgctggcgtagaggcagaggcgcaagctcaggcngagccggcagagactgagtcgaccgaagaaacccaagccgagaccgacgtgccggcagacagctcttccgacactgaaacgcaggcggaggccgaaacccagcagcaaacggaagagcagatngccgctgatcttgcngccgaacaggctgcggaagaagcccgtcaggaacagcgcgccgctgatgcagccgctgctgccgaagccgcngccgctgctgacagcggtgaagccaaggccgangttgtggtagaagagatcaccgaagaagacacgcgcgcntcgaangaagaattttcgacggccgtcaccggtgacacctctgccgaagccaatacgcaagccaaaaaggatgacgacgacgggctgagcaagttcgagaaagccntgcttgtcggcatcggtgcngtggctgtcgggtcgatcctgaacaacggctcgaaggtcgtgagcaactcgggtgaccgtctggttgttgaagatccgaatggggatctgcgcgttttgaaagacgatgatgcgcttgtgcgtcaggccggtgacgaagtccgccgcgagacgttcaacgacggttcttcgcgcaccactgtgatcaagcctaacggcagcaagatcgtgaccattctgggtcgggacggcaccgtattgcgccggatcaacgtcgatccncagggcaatgaatatgtgctgttcgatgacacccaagccgaagagcgtatcgtggtgaacgagctgcctcaggtccgtccgcaggccaatacgctggccagccagcagaacgaggaagcgctgcgtgccgcgttgcaaacgcagntgcgtggcgatcaggcccagcggtattcgctgcgtcaggtgcgtgatgtccgtcaggtccgtgccctagcaccagagatcgagctggacgctgtgcgtttngccacagggtcggctgcaatccagcctgaacaggcccgngcgctgtccaagatcgggaccgcgatcagcaatgccatcaaggatgatccncgcactgtgatccttgtggaagggcacaccgatgcggttggcaatgcgggctacaaccttgcgctgtctgaccgtcgtgccganaccgttgcattggccctgaccgagtattttgacgtgccgccagccaacctgatcacccaaggctacggtgaaagcgcgttgaaagtaccgaccgagaccgccgaacccgccaaccgtcgtgcggttgtgcgcaacatcacaggtctgctgcgtcagtaaccgcgaccttcaagacatagaaaagcccccgcaggaaactgcgggggctttttgcgtctcgggactgnaagacccggaattatttgcttggcagcggcccgatgagcatgaccatctggcggccttccatcttcgggaagttttcaacgcggccaacntctttggtgtcttcggcaacgcgttcaagcagctcgcggccaaggttctggtgggccatctcacggccgcggaaccgcagcgtgatctttaccttgtccccattgtcgaggaacttgaacacgttacgcatcttgacgtcatagtcattggtatcggtgttcgggcggaacttgacctctttgatctcgatgatcttttgcttcttgcgcgcttcggcttcacgcttttgcgtctcatacttgaatttgccaaagtccatgatcttgcacacgggcgggttggcattgggcgaaatctcgaccagatcaagtccggcatcaacagccatttccatggcgcgatccggtgtcacgacgccgacgttttccccatccgcaccgatcaggcggatttcgttggcgcggatgttttcgttgatgcgcgggccggtgtctctttgcggcggcgcgttatgcggtctgcgagcgatgatggtcgtcctttgattgttgtactgatgtcgagcacggaaggtaaacctgctcatggtcttcttcaagtcgcaaaatggcgcatatacagggtaaaaccgcgtatttttgggggatttacccaaggggaagcagcgtatcgcgcatttgacgctatgtgttggcatatagtatgtgcagcaggggattaacaaagttcaaaggaaccacagcatcatgaaaaacctcatctggattgtcatcgcaggggtgatcgcgcttggcgcgtacatgttgtattcgggccgttcggtccaggagattgcgaccgatgcgtcggatgccgtcaatgctcccgccgcgctggaaagtgcgaccgaagctgtgggcgacgctgtcgaggcgacagagggcgcagtgaccgaggcggtagaagccaccacngaggccgcgaataccgcagccgacgcgctgtcggaagcggccgaggatgtggccgangccgcggcagaggcgggcgaggatgccatgaacgcgggcaagcagatcgccgaggatgcaacgcaagcggcgaatgataccgcagaaggcaacgcggaggtttccaccagcgcagaggccgatgccatggctgccagcgattcagaggcaagcgatgccgccagcaccacacaagcgggcacggcacccgccgctgacccgcaagccgangcagacgccgcagcggttcaagaggaagaagccgccgccgtcgccgcgacagatgcacaggcnagcncagatgcgggggctgcagccgatacagaagttcaggccgacgtcaccgccgatgccgacacgccagagcagttgaccaccgtcgatggctttgatctggagaaggtgcaaaccatgatcgacacctctgatctgcccgccacgcaaaaancgctgctgaagcaagggctggtcaccgccggtgaaaancccgatgccctgcgcgcgatcctngcacggatccgcgaggcgctggcgctttaancgnggcccacgcaaagccganccgccagacatgaaaaagccgcgcctcgaaagagagcgcggcttttgttttatctgtggtgccccatgcaagggcaccgctgcgtnggatcagccgacaaaggccttttcaacgacgtagtgtttggggtcggagttcgccccttcctcgagcccgaaaccttcaagcacgtccttgatgtccttgttgaattcaaggctcccgcagaccatgccgcgatcggtgtcggcgctgatcccgtcgatgccgaggtctttgaacaccgtgccgtcctgcagcagattggtgatgcggcccatcttggggctttgntcacgggtggtggtngggtaatagaccagcttgtcgccgatcatctcgccgatcagcgg

SEQ ID NO: 382 - DNA, 4000 bp, Escherichia coli
  misc_feature (1183)..(1183): n is a, c, g, or t
  misc_feature (1257)..(1257): n is a, c, g, or t
  misc_feature (1276)..(1276): n is a, c, g, or t
  misc_feature (1982)..(1983): n is a, c, g, or t
  misc_feature (1992)..(1992): n is a, c, g, or t
  misc_feature (2012)..(2012): n is a, c, g, or t
  misc_feature (2018)..(2018): n is a, c, g, or t
  misc_feature (2030)..(2030): n is a, c, g, or t
  misc_feature (2040)..(2040): n is a, c, g, or t
  misc_feature (2851)..(2851): n is a, c, g, or t
  misc_feature (3420)..(3420): n is a, c, g, or t
  misc_feature (3433)..(3436): n is a, c, g, or t
  misc_feature (3438)..(3438): n is a, c, g, or t
  misc_feature (3445)..(3445): n is a, c, g, or t
  misc_feature (3447)..(3448): n is a, c, g, or t
  misc_feature (3455)..(3455): n is a, c, g, or t
  misc_feature (3458)..(3462): n is a, c, g, or t
  misc_feature (3466)..(3466): n is a, c, g, or t
  misc_feature (3468)..(3470): n is a, c, g, or t
  misc_feature (3473)..(3479): n is a, c, g, or t
  misc_feature (3481)..(3483): n is a, c, g, or t
  misc_feature (3485)..(3485): n is a, c, g, or t
  misc_feature (3491)..(3492): n is a, c, g, or t
  misc_feature (3495)..(3496): n is a, c, g, or t
  misc_feature (3498)..(3499): n is a, c, g, or t
  misc_feature (3501)..(3501): n is a, c, g, or t
  misc_feature (3504)..(3504): n is a, c, g, or t
  misc_feature (3508)..(3508): n is a, c, g, or t
  misc_feature (3511)..(3511): n is a, c, g, or t
  misc_feature (3514)..(3514): n is a, c, g, or t
  misc_feature (3516)..(3516): n is a, c, g, or t
  misc_feature (3518)..(3518): n is a, c, g, or t
  misc_feature (3521)..(3524): n is a, c, g, or t
  misc_feature (3526)..(3527): n is a, c, g, or t
  misc_feature (3532)..(3532): n is a, c, g, or t
  misc_feature (3535)..(3535): n is a, c, g, or t
  misc_feature (3537)..(3540): n is a, c, g, or t
  misc_feature (3542)..(3542): n is a, c, g, or t
  misc_feature (3544)..(3546): n is a, c, g, or t
  misc_feature (3548)..(3549): n is a, c, g, or t
  misc_feature (3551)..(3551): n is a, c, g, or t
  misc_feature (3553)..(3553): n is a, c, g, or t
  misc_feature (3555)..(3558): n is a, c, g, or t
  misc_feature (3561)..(3563): n is a, c, g, or t
  misc_feature (3565)..(3565): n is a, c, g, or t
  misc_feature (3569)..(3571): n is a, c, g, or t
  misc_feature (3573)..(3576): n is a, c, g, or t
  misc_feature (3578)..(3578): n is a, c, g, or t
  misc_feature (3580)..(3580): n is a, c, g, or t
  misc_feature (3582)..(3584): n is a, c, g, or t
  misc_feature (3586)..(3587): n is a, c, g, or t
  misc_feature (3590)..(3591): n is a, c, g, or t
  misc_feature (3596)..(3597): n is a, c, g, or t
  misc_feature (3600)..(3605): n is a, c, g, or t
  misc_feature (3609)..(3616): n is a, c, g, or t
  misc_feature (3618)..(3620): n is a, c, g, or t
  misc_feature (3622)..(3626): n is a, c, g, or t
  misc_feature (3629)..(3632): n is a, c, g, or t
  misc_feature (3637)..(3638): n is a, c, g, or t
  misc_feature (3640)..(3640): n is a, c, g, or t
  misc_feature (3642)..(3648): n is a, c, g, or t
  misc_feature (3650)..(3652): n is a, c, g, or t
  misc_feature (3654)..(3655): n is a, c, g, or t
  misc_feature (3657)..(3661): n is a, c, g, or t
  misc_feature (3663)..(3667): n is a, c, g, or t
  misc_feature (3669)..(3675): n is a, c, g, or t
  misc_feature (3677)..(3677): n is a, c, g, or t
  misc_feature (3680)..(3682): n is a, c, g, or t
  misc_feature (3684)..(3691): n is a, c, g, or t
  misc_feature (3694)..(3695): n is a, c, g, or t
  misc_feature (3697)..(3703): n is a, c, g, or t
  misc_feature (3705)..(3705): n is a, c, g, or t
  misc_feature (3707)..(3712): n is a, c, g, or t
  misc_feature (3715)..(3715): n is a, c, g, or t
  misc_feature (3718)..(3722): n is a, c, g, or t
  misc_feature (3724)..(3724): n is a, c, g, or t
  misc_feature (3726)..(3727): n is a, c, g, or t
  misc_feature (3729)..(3729): n is a, c, g, or t
  misc_feature (3731)..(3735): n is a, c, g, or t
  misc_feature (3737)..(3737): n is a, c, g, or t
  misc_feature (3739)..(3740): n is a, c, g, or t
  misc_feature (3742)..(3747): n is a, c, g, or t
  misc_feature (3750)..(3751): n is a, c, g, or t
  misc_feature (3753)..(3755): n is a, c, g, or t
  misc_feature (3757)..(3757): n is a, c, g, or t
  misc_feature (3761)..(3764): n is a, c, g, or t
  misc_feature (3768)..(3769): n is a, c, g, or t
  misc_feature (3771)..(3774): n is a, c, g, or t
  misc_feature (3776)..(3779): n is a, c, g, or t
  misc_feature (3782)..(3782): n is a, c, g, or t
  misc_feature (3784)..(3792): n is a, c, g, or t
  misc_feature (3794)..(3794): n is a, c, g, or t
  misc_feature (3798)..(3799): n is a, c, g, or t
  misc_feature (3801)..(3808): n is a, c, g, or t
  misc_feature (3811)..(3811): n is a, c, g, or t
  misc_feature (3813)..(3814): n is a, c, g, or t
  misc_feature (3816)..(3819): n is a, c, g, or t
  misc_feature (3822)..(3826): n is a, c, g, or t
  misc_feature (3828)..(3831): n is a, c, g, or t
  misc_feature (3834)..(3836): n is a, c, g, or t
  misc_feature (3838)..(3840): n is a, c, g, or t
  misc_feature (3842)..(3842): n is a, c, g, or t
  misc_feature (3844)..(3847): n is a, c, g, or t
  misc_feature (3849)..(3857): n is a, c, g, or t
  misc_feature (3859)..(3859): n is a, c, g, or t
  misc_feature (3861)..(3861): n is a, c, g, or t
  misc_feature (3863)..(3863): n is a, c, g, or t
  misc_feature (3866)..(3867): n is a, c, g, or t
  misc_feature (3869)..(3869): n is a, c, g, or t
  misc_feature (3872)..(3875): n is a, c, g, or t
  misc_feature (3877)..(3881): n is a, c, g, or t
  misc_feature (3884)..(3885): n is a, c, g, or t
  misc_feature (3887)..(3893): n is a, c, g, or t
  misc_feature (3895)..(3896): n is a, c, g, or t
  misc_feature (3898)..(3903): n is a, c, g, or t
  misc_feature (3905)..(3908): n is a, c, g, or t
  misc_feature (3910)..(3911): n is a, c, g, or t
  misc_feature (3913)..(3914): n is a, c, g, or t
  misc_feature (3916)..(3916): n is a, c, g, or t
  misc_feature (3918)..(3918): n is a, c, g, or t
  misc_feature (3920)..(3921): n is a, c, g, or t
  misc_feature (3923)..(3931): n is a, c, g, or t
  misc_feature (3935)..(3935): n is a, c, g, or t
  misc_feature (3939)..(3942): n is a, c, g, or t
  misc_feature (3946)..(3955): n is a, c, g, or t
  misc_feature (3957)..(3964): n is a, c, g, or t
  misc_feature (3966)..(3966): n is a, c, g, or t
  misc_feature (3968)..(3969): n is a, c, g, or t
  misc_feature (3971)..(3971): n is a, c, g, or t
  misc_feature (3975)..(3976): n is a, c, g, or t
  misc_feature (3979)..(3981): n is a, c, g, or t
  misc_feature (3983)..(3984): n is a, c, g, or t
  misc_feature (3986)..(3987): n is a, c, g, or t
  misc_feature (3989)..(3990): n is a, c, g, or t
  misc_feature (3992)..(3993): n is a, c, g, or t
  misc_feature (3995)..(3996): n is a, c, g, or t
  misc_feature (3999)..(3999): n is a, c, g, or t
ctccggcggcagattaatgaaaaaaatagcgaaattataaagttaatcgttatttattttggcgccctgctttgcctttttgccctttggcagtattttgccgatttgtataatttgtcggcttatacttttctccgcccggaatatcagaaagtggtttttggtttcccgcgcccgcaggcgacatttttagagccgctgtattttgccaatttcctcttgttgccgacattttttacagcggagagattactcaaagataaaaagatttacccatttatggtcatcaatttgtttctaatgatgctggttgtggttctaacgctttcccgcggcgcttattttgcttttgcttttgcggcgataattttggcaatttttatcatcgtcagattcaaagaatttatccgcagactttggttgacggtttttattgttcttttgggaattgtcgccggcgtgatgctaatttatttgacggtgccacgacagaatttttcactttttgtaacgcatagcggaatttccgatgccgctaccggtggatcaacattggggcgactttacacatctgaattagctttaagtcaatccctaaagtatccgcttggcatcggtgccggcgcttttggcgctttgccagagttcgataatttatatgaaaaaggaatttatcaaacagttgggagtctttatccggaaattttggtcgaagaaggagttttgggatttttacttttcgccgcctttatttggctcctgcttcgccatctctggaaaagcaccgcgtcgggaaaacctgtctcgagcacagccgagagattggagggtctaatttatttagccattcttctggcaattctcgtccaagccgtctctttttcctcgctctacattctgccgatttgggcgttttttgcgcttgcgtggccagtgcctcctacgaaattacaaatttagcgaaagtacaaataagggcaaaattgaatggtttctcgttttggtctggccaaagacgaatcgggcttgacaggaatcgaaaaatgatctatactttttgcagttcccagactggaactattcgaggaggcgaacctctccgttttgtcacggtgaaatcgccggaggaacacccgaaatgtctcggaccaccctctcactgaatacgcaaagacggatcatngcaaggattgcagagaacttgcccgatgacctacccgaagaagatgcgctgaggtgggtcaacgactgcgccgngctcaagaagggattgcgngggctgttgatgccggaaatcaactggttagaccagctggttcaagcagaaaacgacatctacagtgcattccttgttcggggtcaggcgattgatttctcgcagtttaaggcgacgcttaagagccacggcgaggagcacatcagccgctggatccagcttggccttgagccgcactttctgccgaagcggcaattccgacaggacgaaaagcttcgcggctggaaggtcaagcccaagaaatggttctggcaacagatggcggcttgcacgatcaagcgccgcaacgtcgccggtgagctggtcacggtcacagaagctggtttcgatggcgacaccgtcctcatcgatacccggtgcaaaccggcgtatgataacgggcggcagatgtttgccgacgacgaagccttccttggcgggctaatcgaggatcttcgttcgaggggcgagattgcccgctatgattccggtcagcaagacagcagattcggtgtttcgtctctcgaatgggacgaacagatccgcccggcgctcgaagcccggccggagttcaaaggagtgtcatttcgactggagttggcgattgaagccaacactatccctcagatctacgggcggatgccgcgccacaaggacggccagactgatacctgggtctggtatgaggagtttttcgagggcgcctctcgccgtttggatggcggcnnttccggccncggcggtcttgcggatgtcngctgtngcggagtgcgcngccactgggncgacagggcggttcgtcccctgggagttgtggccattttgccgcttggatcttaggtcctttcggcaacttggctcgctccagaaaatcatacgggatcggtttcggctgatcccgtttttcttttttctaaaactttggtacattgactttggaatttgcattgtttccccggctacggtttgggaacaatcaaattccccttgtttggaaaacgttttgcggctacggcttcagaaccaatgccaaaaaggaaaagaaactccttgtctgttcttggtgaagatgtcgcctcggcgattgcttccaaataaaattcaaccccgagagtaatcgaagggcggtggcaatagatgagaacagacaattttcgaggacgcctctaaccgtttgaatggcggcaattccgacaacggcggtcttgcgaatgtcaactgtaacgaagtgaacaaccactggaacaacagggcggttcgtcccctgggagtttctcacaaaacgcgtttaaattgcgcggtttgtgtttttcagccagccaccgatcatcctgccgatctcttgcaatttttcttcaaaagaaatatattttttctggttaataaccctggtatcataacaaagccgaaagaggattttcagaaagtcggtttttgttgaagcagccttaagcccgataattttttcctgagccgcttcaaagcttattcttgaaataatttctaaaagatcaacaatcgtgttttccgttttagctaccaatacttgcgatttcttgggaaaattgtcaatttccagataaaattctttgtagnaatcgtaaattttctggaacaaagggatttcttgcatggatgactcctttctaaaaattattagcttggaaaatttgtttttggcttggaaggaatttcggcgaggaaagcggaaaaaaattgatgttcagatttttgagcgaaatcttgaagacaatttgtttgctctgcaccaaaaacttgcagatggtatttaccagcatggaaattatacctcattttacatcaccgatccaaaacggcggaaaattcataaagcttgcgttcgtgacagagttttgcatcacgcagtttaccgaattctatatccgatctttgacaaaagtttcatttatgattcatattcctgtcggctaaagaaaggaacgtacaaagcgattgaccgtttggaaattttcgtcagaaaaatcagcaagaattattttggcaaatgttttgttctgaagtgtgatattaagaagttttttgccagcgttgatcaggggattcttttgaaaattattgaagggaaaatatttgatcccgaaactttatggctggttagagaaattattgaaagtttcaattcnagagagagagagnnnntncctgccngnnggcaggnaannnnnctgncnnncgnnnnnnnannnanccagcnnttnncnnanatntatntanatnantntgnnnnanntattnaanannnntntnnngnnananannnnacnnnanatannnannnntntntnnnannatnnaacanngcnnnnnntttnnnnnnnntnnnannnnnaannnnaaaanntntnnnnnnnannntnnannnnnannnnnannnnnnnanaannntnnnnnnnnaanncnnnnnnngngnnnnnnttntcnnnnntntnntntnnnnncncnntnnnnnnttnngnnnanaaannnnaaanngnnnntnnnnaanannnnnnnnnanaaanntnnnnnnnnatntnngnnnnttnnnnnannnngcnnngnnnanannnngnnnnnnnnnanananaanntntgnnnnannnnnagnntnnnnnnnanntnnnnnntnnnntnncnntntntnntnnnnnnnnntatntttnnnntttnnnnnnnnnngnnnnnnnnananntntttnngannncnntnntnntnncnnttnt

SEQ ID NO: 383 - DNA, 4000 bp, Escherichia coli
  misc_feature (4)..(5): n is a, c, g, or t
  misc_feature (7)..(7): n is a, c, g, or t
  misc_feature (10)..(11): n is a, c, g, or t
  misc_feature (15)..(15): n is a, c, g, or t
  misc_feature (21)..(22): n is a, c, g, or t
  misc_feature (26)..(26): n is a, c, g, or t
  misc_feature (28)..(30): n is a, c, g, or t
  misc_feature (33)..(34): n is a, c, g, or t
  misc_feature (36)..(41): n is a, c, g, or t
  misc_feature (44)..(52): n is a, c, g, or t
  misc_feature (55)..(57): n is a, c, g, or t
  misc_feature (59)..(60): n is a, c, g, or t
  misc_feature (63)..(64): n is a, c, g, or t
  misc_feature (67)..(75): n is a, c, g, or t
  misc_feature (81)..(81): n is a, c, g, or t
  misc_feature (87)..(87): n is a, c, g, or t
  misc_feature (90)..(90): n is a, c, g, or t
  misc_feature (92)..(92): n is a, c, g, or t
  misc_feature (94)..(94): n is a, c, g, or t
  misc_feature (96)..(96): n is a, c, g, or t
  misc_feature (98)..(105): n is a, c, g, or t
  misc_feature (108)..(109): n is a, c, g, or t
  misc_feature (112)..(112): n is a, c, g, or t
  misc_feature (117)..(117): n is a, c, g, or t
  misc_feature (119)..(119): n is a, c, g, or t
  misc_feature (121)..(121): n is a, c, g, or t
  misc_feature (123)..(123): n is a, c, g, or t
  misc_feature (125)..(126): n is a, c, g, or t
  misc_feature (129)..(129): n is a, c, g, or t
  misc_feature (131)..(132): n is a, c, g, or t
  misc_feature (135)..(137): n is a, c, g, or t
  misc_feature (140)..(143): n is a, c, g, or t
  misc_feature (145)..(145): n is a, c, g, or t
  misc_feature (149)..(156): n is a, c, g, or t
  misc_feature (162)..(163): n is a, c, g, or t
  misc_feature (165)..(166): n is a, c, g, or t
  misc_feature (168)..(168): n is a, c, g, or t
  misc_feature (171)..(171): n is a, c, g, or t
  misc_feature (173)..(175): n is a, c, g, or t
  misc_feature (181)..(185): n is a, c, g, or t
  misc_feature (187)..(187): n is a, c, g, or t
  misc_feature (192)..(192): n is a, c, g, or t
  misc_feature (194)..(194): n is a, c, g, or t
  misc_feature (199)..(199): n is a, c, g, or t
  misc_feature (201)..(202): n is a, c, g, or t
  misc_feature (205)..(207): n is a, c, g, or t
  misc_feature (210)..(211): n is a, c, g, or t
  misc_feature (213)..(213): n is a, c, g, or t
  misc_feature (215)..(215): n is a, c, g, or t
  misc_feature (217)..(218): n is a, c, g, or t
  misc_feature (220)..(224): n is a, c, g, or t
  misc_feature (229)..(229): n is a, c, g, or t
  misc_feature (231)..(233): n is a, c, g, or t
  misc_feature (238)..(238): n is a, c, g, or t
  misc_feature (240)..(240): n is a, c, g, or t
  misc_feature (246)..(247): n is a, c, g, or t
  misc_feature (251)..(251): n is a, c, g, or t
  misc_feature (253)..(254): n is a, c, g, or t
  misc_feature (258)..(261): n is a, c, g, or t
  misc_feature (264)..(268): n is a, c, g, or t
  misc_feature (270)..(275): n is a, c, g, or t
  misc_feature (277)..(277): n is a, c, g, or t
  misc_feature (280)..(283): n is a, c, g, or t
  misc_feature (285)..(285): n is a, c, g, or t
  misc_feature (288)..(288): n is a, c, g, or t
  misc_feature (291)..(292): n is a, c, g, or t
  misc_feature (294)..(295): n is a, c, g, or t
  misc_feature (297)..(297): n is a, c, g, or t
  misc_feature (299)..(300): n is a, c, g, or t
  misc_feature (302)..(307): n is a, c, g, or t
  misc_feature (309)..(309): n is a, c, g, or t
  misc_feature (311)..(311): n is a, c, g, or t
  misc_feature (313)..(313): n is a, c, g, or t
  misc_feature (318)..(322): n is a, c, g, or t
  misc_feature (324)..(324): n is a, c, g, or t
  misc_feature (326)..(326): n is a, c, g, or t
  misc_feature (328)..(331): n is a, c, g, or t
  misc_feature (335)..(335): n is a, c, g, or t
  misc_feature (339)..(340): n is a, c, g, or t
  misc_feature (346)..(347): n is a, c, g, or t
  misc_feature (349)..(349): n is a, c, g, or t
  misc_feature (351)..(352): n is a, c, g, or t
  misc_feature (354)..(354): n is a, c, g, or t
  misc_feature (359)..(359): n is a, c, g, or t
  misc_feature (361)..(361): n is a, c, g, or t
  misc_feature (364)..(364): n is a, c, g, or t
  misc_feature (366)..(366): n is a, c, g, or t
  misc_feature (369)..(369): n is a, c, g, or t
  misc_feature (374)..(378): n is a, c, g, or t
  misc_feature (380)..(380): n is a, c, g, or t
  misc_feature (382)..(382): n is a, c, g, or t
  misc_feature (385)..(390): n is a, c, g, or t
  misc_feature (392)..(393): n is a, c, g, or t
  misc_feature (396)..(396): n is a, c, g, or t
  misc_feature (398)..(398): n is a, c, g, or t
  misc_feature (401)..(401): n is a, c, g, or t
  misc_feature (403)..(403): n is a, c, g, or t
  misc_feature (408)..(409): n is a, c, g, or t
  misc_feature (414)..(415): n is a, c, g, or t
  misc_feature (417)..(417): n is a, c, g, or t
  misc_feature (419)..(420): n is a, c, g, or t
  misc_feature (423)..(423): n is a, c, g, or t
  misc_feature (429)..(429): n is a, c, g, or t
  misc_feature (431)..(432): n is a, c, g, or t
  misc_feature (434)..(435): n is a, c, g, or t
  misc_feature (437)..(438): n is a, c, g, or t
  misc_feature (442)..(445): n is a, c, g, or t
  misc_feature (448)..(448): n is a, c, g, or t
  misc_feature (450)..(451): n is a, c, g, or t
  misc_feature (453)..(458): n is a, c, g, or t
  misc_feature (462)..(462): n is a, c, g, or t
  misc_feature (464)..(464): n is a, c, g, or t
  misc_feature (467)..(467): n is a, c, g, or t
  misc_feature (469)..(470): n is a, c, g, or t
  misc_feature (473)..(474): n is a, c, g, or t
  misc_feature (476)..(477): n is a, c, g, or t
  misc_feature (480)..(482): n is a, c, g, or t
  misc_feature (484)..(484): n is a, c, g, or t
  misc_feature (488)..(488): n is a, c, g, or t
  misc_feature (494)..(494): n is a, c, g, or t
  misc_feature (496)..(498): n is a, c, g, or t
  misc_feature (500)..(500): n is a, c, g, or t
  misc_feature (505)..(505): n is a, c, g, or t
  misc_feature (509)..(510): n is a, c, g, or t
  misc_feature (512)..(512): n is a, c, g, or t
  misc_feature (515)..(515): n is a, c, g, or t
  misc_feature (517)..(518): n is a, c, g, or t
  misc_feature (520)..(520): n is a, c, g, or t
  misc_feature (523)..(525): n is a, c, g, or t
  misc_feature (528)..(529): n is a, c, g, or t
  misc_feature (531)..(531): n is a, c, g, or t
  misc_feature (533)..(534): n is a, c, g, or t
  misc_feature (536)..(536): n is a, c, g, or t
  misc_feature (541)..(541): n is a, c, g, or t
  misc_feature (543)..(547): n is a, c, g, or t
  misc_feature (549)..(549): n is a, c, g, or t
  misc_feature (551)..(551): n is a, c, g, or t
  misc_feature (555)..(555): n is a, c, g, or t
  misc_feature (557)..(557): n is a, c, g, or t
  misc_feature (559)..(559): n is a, c, g, or t
  misc_feature (563)..(563): n is a, c, g, or t
  misc_feature (568)..(568): n is a, c, g, or t
  misc_feature (573)..(573): n is a, c, g, or t
  misc_feature (575)..(576): n is a, c, g, or t
  misc_feature (578)..(580): n is a, c, g, or t
  misc_feature (584)..(586): n is a, c, g, or t
  misc_feature (588)..(589): n is a, c, g, or t
  misc_feature (592)..(592): n is a, c, g, or t
  misc_feature (594)..(595): n is a, c, g, or t
  misc_feature (597)..(600): n is a, c, g, or t
  misc_feature (602)..(603): n is a, c, g, or t
  misc_feature (606)..(607): n is a, c, g, or t
  misc_feature (609)..(612): n is a, c, g, or t
  misc_feature (616)..(618): n is a, c, g, or t
  misc_feature (620)..(620): n is a, c, g, or t
  misc_feature (623)..(624): n is a, c, g, or t
  misc_feature (628)..(628): n is a, c, g, or t
  misc_feature (632)..(633): n is a, c, g, or t
  misc_feature (635)..(636): n is a, c, g, or t
  misc_feature (640)..(641): n is a, c, g, or t
  misc_feature (643)..(649): n is a, c, g, or t
  misc_feature (651)..(654): n is a, c, g, or t
  misc_feature (656)..(656): n is a, c, g, or t
  misc_feature (663)..(667): n is a, c, g, or t
  misc_feature (669)..(670): n is a, c, g, or t
  misc_feature (672)..(672): n is a, c, g, or t
  misc_feature (674)..(675): n is a, c, g, or t
  misc_feature (677)..(678): n is a, c, g, or t
  misc_feature (683)..(686): n is a, c, g, or t
  misc_feature (689)..(692): n is a, c, g, or t
  misc_feature (696)..(696): n is a, c, g, or t
  misc_feature (698)..(700): n is a, c, g, or t
  misc_feature (702)..(702): n is a, c, g, or t
  misc_feature (704)..(704): n is a, c, g, or t
  misc_feature (707)..(708): n is a, c, g, or t
  misc_feature (712)..(712): n is a, c, g, or t
  misc_feature (716)..(717): n is a, c, g, or t
  misc_feature (723)..(730): n is a, c, g, or t
  misc_feature (732)..(732): n is a, c, g, or t
  misc_feature (734)..(738): n is a, c, g, or t
  misc_feature (742)..(743): n is a, c, g, or t
  misc_feature (745)..(745): n is a, c, g, or t
  misc_feature (750)..(750): n is a, c, g, or t
  misc_feature (752)..(754): n is a, c, g, or t
  misc_feature (757)..(757): n is a, c, g, or t
  misc_feature (759)..(760): n is a, c, g, or t
  misc_feature (763)..(767): n is a, c, g, or t
  misc_feature (770)..(771): n is a, c, g, or t
  misc_feature (773)..(773): n is a, c, g, or t
  misc_feature (775)..(779): n is a, c, g, or t
  misc_feature (781)..(781): n is a, c, g, or t
  misc_feature (783)..(783): n is a, c, g, or t
  misc_feature (789)..(790): n is a, c, g, or t
  misc_feature (792)..(792): n is a, c, g, or t
  misc_feature (794)..(799): n is a, c, g, or t
  misc_feature (804)..(806): n is a, c, g, or t
  misc_feature (811)..(811): n is a, c, g, or t
  misc_feature (813)..(814): n is a, c, g, or t
  misc_feature (817)..(817): n is a, c, g, or t
  misc_feature (823)..(828): n is a, c, g, or t
  misc_feature (833)..(835): n is a, c, g, or t
  misc_feature (837)..(838): n is a, c, g, or t
  misc_feature (842)..(843): n is a, c, g, or t
  misc_feature (845)..(845): n is a, c, g, or t
  misc_feature (848)..(848): n is a, c, g, or t
  misc_feature (851)..(851): n is a, c, g, or t
  misc_feature (854)..(855): n is a, c, g, or t
  misc_feature (857)..(857): n is a, c, g, or t
  misc_feature (859)..(859): n is a, c, g, or t
  misc_feature (862)..(867): n is a, c, g, or t
  misc_feature (869)..(869): n is a, c, g, or t
  misc_feature (872)..(872): n is a, c, g, or t
  misc_feature (876)..(876): n is a, c, g, or t
  misc_feature (878)..(888): n is a, c, g, or t
  misc_feature (890)..(891): n is a, c, g, or t
  misc_feature (897)..(900): n is a, c, g, or t
  misc_feature (902)..(905): n is a, c, g, or t
  misc_feature (908)..(913): n is a, c, g, or t
  misc_feature (916)..(917): n is a, c, g, or t
  misc_feature (919)..(919): n is a, c, g, or t
  misc_feature (924)..(926): n is a, c, g, or t
  misc_feature (928)..(931): n is a, c, g, or t
  misc_feature (933)..(934): n is a, c, g, or t
  misc_feature (936)..(937): n is a, c, g, or t
  misc_feature (948)..(950): n is a, c, g, or t
  misc_feature (953)..(953): n is a, c, g, or t
  misc_feature (955)..(957): n is a, c, g, or t
  misc_feature (959)..(960): n is a, c, g, or t
  misc_feature (963)..(963): n is a, c, g, or t
  misc_feature (965)..(965): n is a, c, g, or t
  misc_feature (968)..(969): n is a, c, g, or t
  misc_feature (971)..(971): n is a, c, g, or t
  misc_feature (973)..(973): n is a, c, g, or t
  misc_feature (975)..(975): n is a, c, g, or t
  misc_feature (977)..(978): n is a, c, g, or t
  misc_feature (983)..(983): n is a, c, g, or t
  misc_feature (986)..(988): n is a, c, g, or t
  misc_feature (990)..(992): n is a, c, g, or t
  misc_feature (994)..(994): n is a, c, g, or t
  misc_feature (997)..(998): n is a, c, g, or t
  misc_feature (1001)..(1006): n is a, c, g, or t
  misc_feature (1010)..(1010): n is a, c, g, or t
  misc_feature (1012)..(1013): n is a, c, g, or t
  misc_feature (1016)..(1016): n is a, c, g, or t
  misc_feature (1018)..(1018): n is a, c, g, or t
  misc_feature (1022)..(1022): n is a, c, g, or t
  misc_feature (1024)..(1026): n is a, c, g, or t
  misc_feature (1028)..(1031): n is a, c, g, or t
  misc_feature (1033)..(1034): n is a, c, g, or t
  misc_feature (1037)..(1037): n is a, c, g, or t
  misc_feature (1040)..(1041): n is a, c, g, or t
  misc_feature (1044)..(1044): n is a, c, g, or t
  misc_feature (1046)..(1046): n is a, c, g, or t
  misc_feature (1048)..(1051): n is a, c, g, or t
  misc_feature (1053)..(1055): n is a, c, g, or t
  misc_feature (1058)..(1059): n is a, c, g, or t
  misc_feature (1062)..(1067): n is a, c, g, or t
  misc_feature (1069)..(1071): n is a, c, g, or t
  misc_feature (1074)..(1075): n is a, c, g, or t
  misc_feature (1078)..(1079): n is a, c, g, or t
  misc_feature (1081)..(1083): n is a, c, g, or t
  misc_feature (1089)..(1092): n is a, c, g, or t
  misc_feature (1094)..(1096): n is a, c, g, or t
  misc_feature (1099)..(1099): n is a, c, g, or t
  misc_feature (1102)..(1103): n is a, c, g, or t
  misc_feature (1106)..(1106): n is a, c, g, or t
  misc_feature (1108)..(1108): n is a, c, g, or t
  misc_feature (1111)..(1111): n is a, c, g, or t
  misc_feature (1114)..(1121): n is a, c, g, or t
  misc_feature (1123)..(1126): n is a, c, g, or t
  misc_feature (1129)..(1130): n is a, c, g, or t
  misc_feature (1133)..(1133): n is a, c, g, or t
  misc_feature (1135)..(1135): n is a, c, g, or t
  misc_feature (1140)..(1141): n is a, c, g, or t
  misc_feature (1145)..(1146): n is a, c, g, or t
  misc_feature (1148)..(1150): n is a, c, g, or t
  misc_feature (1153)..(1153): n is a, c, g, or t
  misc_feature (1156)..(1167): n is a, c, g, or t
  misc_feature (1169)..(1169): n is a, c, g, or t
  misc_feature (1173)..(1175): n is a, c, g, or t
  misc_feature (1178)..(1182): n is a, c, g, or t
  misc_feature (1185)..(1185): n is a, c, g, or t
  misc_feature (1187)..(1193): n is a, c, g, or t
  misc_feature (1195)..(1195): n is a, c, g, or t
  misc_feature (1197)..(1199): n is a, c, g, or t
  misc_feature (1202)..(1202): n is a, c, g, or t
  misc_feature (1204)..(1204): n is a, c, g, or t
  misc_feature (1206)..(1207): n is a, c, g, or t
  misc_feature (1209)..(1209): n is a, c, g, or t
  misc_feature (1214)..(1217): n is a, c, g, or t
  misc_feature (1220)..(1220): n is a, c, g, or t
  misc_feature (1224)..(1224): n is a, c, g, or t
  misc_feature (1226)..(1226): n is a, c, g, or t
  misc_feature (1228)..(1230): n is a, c, g, or t
  misc_feature (1232)..(1233): n is a, c, g, or t
  misc_feature (1240)..(1242): n is a, c, g, or t
  misc_feature (1245)..(1249): n is a, c, g, or t
  misc_feature (1253)..(1255): n is a, c, g, or t
  misc_feature (1257)..(1257): n is a, c, g, or t
  misc_feature (1262)..(1265): n is a, c, g, or t
  misc_feature (1267)..(1269): n is a, c, g, or t
  misc_feature (1274)..(1276): n is a, c, g, or t
  misc_feature (1278)..(1278): n is a, c, g, or t
  misc_feature (1281)..(1281): n is a, c, g, or t
  misc_feature (1283)..(1283): n is a, c, g, or t
  misc_feature (1285)..(1287): n is a, c, g, or t
  misc_feature (1290)..(1290): n is a, c, g, or t
  misc_feature (1292)..(1295): n is a, c, g, or t
  misc_feature (1297)..(1299): n is a, c, g, or t
  misc_feature (1301)..(1301): n is a, c, g, or t
  misc_feature (1306)..(1307): n is a, c, g, or t
  misc_feature (1312)..(1312): n is a, c, g, or t
  misc_feature (1315)..(1315): n is a, c, g, or t
  misc_feature (1318)..(1318): n is a, c, g, or t
  misc_feature (1320)..(1323): n is a, c, g, or t
  misc_feature (1329)..(1332): n is a, c, g, or t
  misc_feature (1334)..(1337): n is a, c, g, or t
  misc_feature (1339)..(1340): n is a, c, g, or t
  misc_feature (1344)..(1345): n is a, c, g, or t
  misc_feature (1349)..(1356): n is a, c, g, or t
  misc_feature (1359)..(1359): n is a, c, g, or t
  misc_feature (1362)..(1362): n is a, c, g, or t
  misc_feature (1371)..(1371): n is a, c, g, or t
  misc_feature (1375)..(1377): n is a, c, g, or t
  misc_feature (1379)..(1381): n is a, c, g, or t
  misc_feature (1386)..(1387): n is a, c, g, or t
  misc_feature (1389)..(1390): n is a, c, g, or t
  misc_feature (1392)..(1394): n is a, c, g, or t
  misc_feature (1405)..(1405): n is a, c, g, or t
  misc_feature (1419)..(1419): n is a, c, g, or t
  misc_feature (1422)..(1423): n is a, c, g, or t
  misc_feature (1425)..(1425): n is a, c, g, or t
  misc_feature (1434)..(1434): n is a, c, g, or t
  misc_feature (1436)..(1437): n is a, c, g, or t
  misc_feature (1463)..(1463): n is a, c, g, or t
  misc_feature (1466)..(1466): n is a, c, g, or t
  misc_feature (1518)..(1518): n is a, c, g, or t
  misc_feature (1522)..(1522): n is a, c, g, or t
  misc_feature (3063)..(3063): n is a, c, g, or t
  misc_feature (3085)..(3085): n is a, c, g, or t
  misc_feature (3277)..(3277): n is a, c, g, or t
  misc_feature (3544)..(3544): n is a, c, g, or t
  misc_feature (3580)..(3580): n is a, c, g, or t
  misc_feature (3598)..(3598): n is a, c, g, or t
  misc_feature (3607)..(3607): n is a, c, g, or t
  misc_feature (3664)..(3664): n is a, c, g, or t
  misc_feature (3691)..(3691): n is a, c, g, or t
  misc_feature (3901)..(3901): n is a, c, g, or t
  misc_feature (3916)..(3916): n is a, c, g, or t
  misc_feature (3925)..(3925): n is a, c, g, or t
  misc_feature (3997)..(3997): n is a, c, g, or t
aaanncnatnnttanaaaaannattngnnnaannannnnnncgnnnnnnnnnaannngnnggnnaannnnnnnnntaaaanaacgcnttngnanancnnnnnnnnaanncgnaagcntnanangnnaantnnaannngcnnnngnaaannnnnnnngaaaannannanagnannnaaaaannnnngnaaaantnaccgnannttnnnaannantnanngnnnnnaaaancnnnctttncnaaaaannaaancnntttnnnnaannnnnannnnnnantgnnnnanccnaannannantnngnnnnnnantncnaaatnnnnntnancnnnntttngaannaaaaanncnanncnttaancnaancnatnaaacnnnnntngnaannnnnntnnaancnttncntgaannaattnnangnnttnaaaaangnntnnannaaannnnttnannannnnnnaaangnaangnnggnntnnaannngnaatnaaaaangnnntngaaantggnntnaananntngcnnnaanntnannanttaancnnnnnantnaaangngnaaanaaaancttangnnannngggnnnannacnanntnnnngnncanntnnnntggnnngnttnnttgnaaanntnnattnnannnnnnnannnnantttaaannnnnannangnngnngaaannnnccnnnntttntnnncnanttnnccgntgannaaaacnnnnnnnntnannnnnaaanntnattgnannnttncnnaannnnngtnnantnnnnngntnaatttnnangnnnnnntttannnagggngnntantaaagnnnnnnaaaannncnntgannanttncancgnnangnttnnnnnnanttnattngnnnnnnnnnnncnnattttnnnntnnnnttnnnnnntgnngnacccnnntnnnntnnanncttaaaattannnccnannntnnttnantanngntntnannaaaangtnnntnnngnttnncannnnnncctnannccnantttncnnncnnnngnnaanttnnggngnannnnannnggnnatnnnnnngnnnaannaanngnnnaaaaannnngnnnaanttnnaancnaanttnnnnnnnngnnnnacnnttnancaaanngggnnannnccnttnnnnnnnnnnnnancaannnaannnnnccntnnnnnnncntnnnggncnannangtttnnnnggnaaantngnnngnnttaaagnnntgnnnnnaaannntnacaannnnannncaaannntnaantnannnatnannnngnnnanttaanncgtcnatntcntnnnnctaacnnnnannnngnnaaannaagnnnnnnnnttnaanttttctttnaaannngnnnttttnntnncnnnttttttatttnaatttttatttgtnggnnantttatggcnanngaacaaaaagaaatcacggatccatntgnaaaatataacgaacaaaccagttttctaagcaaaacaatttttgcaagtcgntggntacaagtgcctatttacttaggtttaattgtcgtgcaaggcatctatgcttacaagtttatgaaaaacttgtggtaccttttaaccaatgttaatgaaatggatgcggataccattatgctcgctgtactcaatctcattgatgtagtgatgattgctaacttattagtaatggtaacattaggtggttatgagattttcgtttcaaaacttcgtacgaaaaatcatcccgatcaacctgaatggatgagtcatgtgaatgcaactgtgctgaaagttaaactttccatgtcaattatcagtatttcgtcgattcacttattgcaaacctttgtgaatgcctcaaaaattcctgaaaaaacgattatgtgggaagtgattattcatttttctttcttgatttcggcaattgcaatggcttataccgacaaaattctctacagtacaagtcataaaaatcattagtacacaaagtgcggtcaaaattgaccgcactttttgtatttaaacctataaaaatattcactttatacttacaataaaatctgataacctgagcaaatcactatattattatcacgtatcttttaataaggaaatatatctcataataaggaaatatatctcatgttatctcataagattaagctaatttttctagttgcgtttacactctttttaacaagttgctcaacaatgtataacccattagacactttatactggcatggtaaagaagactatgagttttttgctcgaaaacgtttaccggatgaatcttatcaatgctttaaagacaatgaaagaagttatattcacgcttatcgacttgctctttatgatttacaaacctatgaagttggcagaaacgctagaacaatctttctaacaacagaaaaagtatatactggtggccatacatggacttatgtatttacggatgcaagccataaaatcacatctattagagatgccacagggtttggagacattgaaaaagaatttggttgtggtgagtatcaagaagcagtaaaaattgctacaccagaagaactaaaaaaacgcaaaattaaacctagattatgggctgcaattgttcgcactccagaaataaatcaaatgatgtgggcttctgatgcagcttatagtactcttgagcaagccaaacaagattcactaaaacaatgtcaagagtatggtggcaaagactgccaattagtgattggtataagtaatatgtgtttagggctagctagtggtcgagatagtagtggtatgagagattacttcggaaatagcatcattcctgagcacgctaaagaaatggcggttgaaaattgccaagcgaaaggaggttcatcttgtaagcctagcccagccccttcgctttgcgccctaccgtgtgatatgcttaaagataaaacttgtaacttcgatagccctcaggtcatcattccaggagttaaaggcggaaaagcatttaacgtagcattagatggtaatgtacttaaatagtaaataatattttcaaagtgcggtcanatttgaccgcacttttgttttntaaaactcatcttgatgtttaaatttcaataaatctcgacgttcttttttatttggacgacgatcaggatgtggcattgaaagcgcattattttttcttgcccacgccatttcttcccgttttttcacactctgtgctgtttcttggtaaagcagttgagcctcaggtgcaccacgacgttgatcgctcaangcaatcacttcaatttctttttcatcgctgccttggcgaagtttaatcatcgccccgatttctacatttttacttactttggcacgctgaccgttgtaatggactttgcccccttcaatcatcgctttcgcaatgctacgagttttataaaaacgcgccgcccaaagccatttatctaaacgcacttcgttattttcagccataactcttcctatttctctcactttgcgtatgatgagccaatgacaagataatagggctaatatnatgaaaaaacaacttccacacattctctccctttcnacggtggcaaaatcccgnttgtttganattcaagctgttgatctcaaattctctaatggaattgaccgcacttatgaacgtttncgccctttcaatcgagattcagtgatngtgattgccattgatggtgaagatttactcctggttcgtgaatacgcagtcggaacagaacaatatgagttaggctttgtaaaaggtggaatggatacgggagaaacacccgaacaaagtgcgaatcgtgaattacaggaagaaattggcttgggggcaaaaaaatggacatttttacgcacgatgaagatcaatccacaaattatgggncataaaatgcacgtnttattaggngaagatctgtatccaaatcaactagaaggcgatgagcctgaaccattagaaatcgtgcgttatcctttatcncaa

SEQ ID NO: 384 - DNA, 4000 bp, Escherichia coli
  misc_feature (1989)..(1989): n is a, c, g, or t
  misc_feature (1994)..(1994): n is a, c, g, or t
ctgatctcgcacgaacgagacgagcatggtgatcgtgaagtcgccgcgcagtcgcgccatgcgactctcctcgacgtttcctcgcgccgccgacaccgcggccgtgacttcgttcacgatgcccttgcgatctcgaccgaacgacgtgatgacgtatcgcgacaccgcgccgtgcgccggtttgcgcgcgcgcgcggcgtacgacgcggacggcgtcgtcgtcgccgcgagcgtgtcgagcggtcgcgggaacgccgcgttcgcgggcggcgcggcgcgagacgcgcgcgaagcgaggaacgggagcgaacgcgcgatgcgcgcgatcgcgagcgggtcgacggcgcgcgacatgacgcgtgcgcggtcgaacgcgcgcgctgtgggtgtcggagtgcggcgaacgcgcccagagcggcgcggggtcggcggccatcgacaatctacgagctaatggtggtttacaagtgcgcagtgcgcgtgaacccaaagttatcttcgtccgcttgagtttcgttcgcggctgggccgagcggatcgtaggaacccgtgttcttctcaaactgggacgcgagattcggttagtcgtcatcggagcggattgaaagtgccgttgttcttctcgaactacgggcgatcgcgacgtcagtcgtgtcgtaaaacgcgcacgtccgcatacgatcgcgcgcgcgtcacgagacgtacctgcgttgcgattcctgggtttctgcgaagcgtccagcacggatcccctccaaacgtttgccgcaagtcctcgagaagcatctcgatgtccataaacagcaacgacggaaagtcactgagcatcagatctattctacagtctttcggcatcgcctttcgcagcgcggagacggcgatggccgccctggagtacgctcgatcctcgagacacagcgccggccgccctcggagcagtttgacgatgtccgcgtccggcatcagcgctcgtaaacccgtcacacgctccaagatcccgtccaactcttcctgcgacgcgagcaaacacgacggaatcgtcgcgaacaacccatcggcgtcgcacgcgtctcctaatcgctccctcgtcgacgccgcgcgttcccgcaccccctcgagcgcttcctctcgaagacgcagcaatctcggctcgcgcgcgcacacgtctcccgcgtccacgtccgcgctcgcgaaagtatttttaatcgccaacatggccgccatcgtctccctcagatccaccgcgagctccgccgcgagcgctcgcttcacctcgcctctcgccactctttccccgagccccgggcacagcgcgaacaaccgatcgacgtcgcgcgccagcgcgtccgcgtccacgccccgcgcgtccgcgacgacgtccgcggccaatcgcccgagcgcgtcgtccgcgcgtccctccaggatgtgtttcaccttcaccgttcgcccgagcaggttcagcgccggccgcgtcggcgtcgcgcgcgcgtcgtcctccgccgcgcgtctcgcgccgcgcgcgcgtcgcgatgcgcgcgtcgcgatgcgcgcgtcgcgcggcgccgcgcgcgccgtcgcgcgcgacatcgcgcgtctcgcagtcgcgcgtcgccactcgatggcgcgcgcgacgcctcgcgcggcgcgcgccgtcgacgcgcgaccgcgcgcgcgcgcgacgaggcgcgcgtcgaccgcgcgcgggtcgaacttcgacgccctcgtgttcgacctggacggcgtgctgtacgacggcgcgaacgggtacctcgcgcacgtgcgcgcgcgacagcgcgcgtacctgcgcgaacgcttcggcatgacggcggcggaggcggcggcgacgcggaaaacggcgttcgcgaaggcgagtcagtgctacaagggcctgcgcgatctcgggctggacgtcgagtcgcaggaggcgttcacggcgtactgccgcgcgggcgcggagacgtttctgaagccggacgcggcgctcgcggngtgcntgcgagcgatgccgtatcggaaggtggtgatgacgaacacgagcgagacggaagggatgaaagcgctgacggcgctgggactggacgcgtcgtcgagcgatgcgttcgagaaggtgtacggggggattttcacggcgccggcgtgcaagccgcagcgcgaggcgttcgagaaggtgttcgcagatctgggacgcgacgtggacccgcggcggtgcgtgatgtttgaggattcgatgaagaatgtaaaggcggcgaagtcgttcggcatgacgacggtgttcgtgcgcacgcgaggcgagagcgtgctcgacgacgacgtcgaagcgtgttgcgacgccgtcgtcgacgagatcgagttcgaacaactgcgccggcaactgcccgagctgttcgattaggcgcgagtcgcgatgcgcgcgacgagcgaattagtgtaccgccgcgcttcaaccggcgaaacgcggtggaattatttaaatgaagattgagactgttgtaaaatgttacacggcgcccgccgactaaaataaaacgagacgcgcgcgcgtccctaccacgtgtacgccgccaacgccgcgctcgccgccgcgctcaccccgaatatcgccaacgagctcgcgttcgcgctttcgttatcgatccccttcgtcgtcgagtcccacaccaagtgtcgaaacccgccgagcgtgtgaaacacgaacggaaaactcagcgcaaacttcaccggcaccaccgccagcggcgcgttcgctttaaacatttccatcgtcatcggcaccgcctccgcgcctccgacgagcgctatgatcccccccgcgctcatcgctcccgtgagcgcgacgcccgtgacgcgattcgtgatcgagctcagcgccaccgccggaaacttatagtgcgcgcgccagctcccgtccgccgcgaacacgtccggcgacatcggtcgcttctccagcagcgcgcggtggttcttcggcgtgcccaggaacccggtgccgcccgtcgccggttgtccgtagtcgtccgggacaccgcgcgatccgatcgcgcgcgtcgccgtcgccgcgcgcgtcgcctcgacgatcgcgcgcgccgtcgacgcgcgcctcgcgcgatccgcgatcgcgcgcgccgcggacatgaccgccgtcgtcgcgtcgcgtcgcgctctcgcgcgtcggcgtcgggcgatcgcgacgccgcgcgggacaccatggcgctcgcgcgcgcgcgaatcgcgcccgtcgcgcgcgacgcgcgggcgacgcgcgcgacgacgtcgaggcgcgagctcgcgggcgcggtcgcgctcgtcgcgacgctcgggcgatgcgacggcgcgcgcgcatcgcgcgatgcgatggattacgacgccgacacgctcgacgcgctcgacgcggcgacgcgggtggtgcgagggaaggcgagggagggcgatcgcgagcggatcgacggatggtacgagcggaacaagcggcggtacgataacgcgacgcgagggaagtcgttcttgatgacgacgaagacgctgcgatacgccgcgggacgcgagcggagcgagacgttcgacgaggcgaagtttgatgaatgggtgaagctttcgcgagcgctcaccgatgggtcgatgagcgtgaaagagcagcgcgaggcgtacggcgcggcggtttgggcgaataacgataagagcgacgcgaagaatcgaatcgggctctgcgcgttcggcgcgacggggccgacgcgagcgctcggtatcgattgttcgggcttttagattgtgattgatttattgtttttgcgagctgcgatgcgtgagatataaaaaatgtgtgcgcggtgtatctaacggcctctttggagactcggagttcgtcccgggatggggaacttgctcaaatcgtctcgcgtgcgctcggcgagacgctgctggaatttttctataaacttgttcgacatgcgttgaacgcctggcgcaaccgtgggaaggatggcgcgaatcgagtcggtttcga

SEQ ID NO: 385 - DNA, 4000 bp, Escherichia coli
  misc_feature (1635)..(1635): n is a, c, g, or t
  misc_feature (1988)..(1988): n is a, c, g, or t
  misc_feature (1991)..(1991): n is a, c, g, or t
  misc_feature (3646)..(3646): n is a, c, g, or t
  misc_feature (3995)..(3995): n is a, c, g, or t
aggaggtaaacgcatgattaagacattgcaaagacgttttgcattatcaagacagggggctgtcgatttgataaaaggctgtattgcctgcgtcgtacaggatatatcctttatgctccctgtgggattgctctattactttgtcattgacaccatgaatgggaacttgaatggaagccgcattgctttttatgcggttggttctttggtttgcttatgccttatatttattgcgacttggtttcaatataacgccacttacttagcgacttatgtggaaagcggggtaaggcgtatatccttagcggaacggctacgcaaaatcccgttgtccttttttggcaaaaaagaccttgcggatttaaccaattctattatgggagactgtgctacgcttgaaactgcattctcccattatgtacccgcattggcaggctccctcatttcaacaacactaattgcaatctgcctttttgcttacgactggcgaatggctcttgcggcggtgtgggttttaccgattgcatttacaatcacattcttttcagctcgcatacaggaatacttcaactgtaaatctgtagcggcaaatgtcgcgcttgaaagcggtgtacaagagtgtatcgaaagtttacaggacttgaaatcaaacaatgcggaagaaagttatctgaaaggacttgacaaaaaaattgactatgtagaaaaacggcacattataacagaacttggaacagcactttttgttgtttcttcaacactaatattaaagtttggaattgctacggttgcgcttgtaggctctacgctgcttattcgtggagaaattgatattccgctgttttttatgttcttgcttgtagcttcaaggctttatgccccgcttgaaggcgcattgcaaaatcttgctgcggtaatctctacgaaaacgaacatagaccgcatgaacgaaatccttgaccaacctattcagacaggggaaaatcaactgataaataaaggttatgacattgtattcgaccatgtaggatttgcttataatactggggaaaccgtattgaaagatgtgtcttttacggcaaaacagggagaagttaccgctttagtcggaccgtccggcggcggaaaaactacggtgtcgcgtcttgcctcgcggttttgggacataaacaaagggaagattactgtcggtggtatggatatatcgaaaatagagccggaaaccttgctgtctctgtactctatcgtatttcaagatgtgacgctgtttaacaacacaatcatggagaatatcagaataggcagaaaggacgcgaccgacgaagaagtaattgcggcggcaagactagcaaattgtgaagaatttgcagaaaagctcccagacgggtataacagtatgattggtgaaaatggttgcgaattgtctggcggggaaaggcagagaatttcaatcgcccgcgcttttctcaaaaattcccctattatcttacttgatgaagcaacggcaagtcttgatgtggaaaatgaaacattgatacaggctgctttgtcaagactgataaaggacaagaccgtacttgttatcgcccaccgtatgcgtaccgtaagcggcgcagataaagtggttgtgctttnaaacggtacggttgccgaacagggaacgccggaaaaactgatgaacacaggcaaaatttatccgcatatggtaaagctgcaaatgattagtcaggattggggaatttagatttctaactgaaattgaatgatatagatttcatattttcccattagtgagaaacgcaaagaggtcgacattatgaaaacagaatggatactttgccctgtctgcggcaataaaacccgaacaatgatacaggaaaatactgagatgagaaactttcctctctactgtccgaagtgcaaaaaagaaacaatcatcaatgttcaggatatgaaaatcacgcttgcagtcagcaaataattatgtnccnccgccgctatgggtaacaccataacggcggtttttccatatctatcggctatctctgtcaatggattttttgcgctgtctttggggtggtttctgcctatttttatcctgtatctcccgcaaatgttttaatacgctctgcttttcgggtggtctgcgctgctctttggcggcggctgacggtttcctgctggtctgacgctcccactcggcaaggtcacggctgtactgttccacaacgctttccatttctcggaaagtacgcatgaacgcctgcacatcgggataaccgtcctctttcagaatatcgggcagcatatccagttttgcagcgatttccttttccgtctgctgtatctgctcggacagggctttacgctccttgcctttgaaaagcccctttgtgtctgcaagctgcgctttcagtttcgggagaacatcgtcctgcaaacggcggatttcccttgcgccctcctgcgcctttatcatcagatttttcatgcgtcgaaattccgccatatccatatccagcgtaggcttgggcggcatatccttttctcggataaggctttgcagaagctcctttgccctgccgataatgctgcggaacaaggtaggcagccagcccttttctttaatggactgacttgccttttggtggatttcctctttcttgatttccagtatctttgtttcctcaatccccgataacaatgccatatccgccgtcctgttccattcctgccttgcggcgttgtcggcttcaatctcggcggctttgggattgttcttaccgattttcttggtaggaagataaacgctgttcttatcaaatacctttaactgctgttcgggatcagcaatatggcgattgataaggtcagtgtaaatctcttttacctcccgaagaaaaggctcgcttttgaatttatcatctttcacggtaaagaggtggctttcgtaaacctcgccctttttaatgacggtgcagccttttcgtatctgtccgtcctcccctgtgatttctttcttggtgcgtacccttttgcctgtttcatcatagaacacgctgcgtgtggctatcttgatgtcaggttcaggaagcagctttctttcgctgaagataaggtggatatgatagtttgtcttgcgtttgttgtggtggagggctgacacgcactctacaccataccgcctgtggaactcctccgtaaaatcttcaaggacttcctgcggctcgtattttgtatatacttcgggcagggcgataatcaattcccttgcttcaatacatttgccctccgtaccgcttcgcttaaattcctgctggctttcccttgcaaggttactccaaaattcattgtcggcggtgcggtaggtggcatagagattttcctgtcttgcgtggcttgtgatataggatattcttcccttgacattgggtagctttgacatctgtataaaactgtgtcttgccatatactccttcctcccgtgacgggcatactctttttgcaaccgagaaatcggttgctgctgtttcggcagcgtaagcagacggacagcgaagaaaacagcgtgctgttttcttctgtatcatagcggcggtgcattgtccgaagctgtgatacatagccccctgcaagggcgaaatanccagagtacaactcgaagatttgtgcgaggggtgtatttcgctctcaaacgccgagggcttggagaatggttattctactttgcgaacatcgttttcattgagcaggtttcttccctgattgacgctcataaatcgctctaaagtatccctgcggataatcgcttttcttccgaccttgaggacgggaagtttgccccagtctaccaacttacgcattgtatttcttccgatacccgtacattctgcggcttcttctatggttaaacccattttgatgttgctcattttatcaacctcctttcaaaatacgcattttgcaactatgtatctgtaattatacttattttnctatc

SEQ ID NO: 386 - DNA, 4000 bp, Escherichia coli
  misc_feature (1)..(18): n is a, c, g, or t
  misc_feature (21)..(24): n is a, c, g, or t
  misc_feature (26)..(31): n is a, c, g, or t
  misc_feature (34)..(43): n is a, c, g, or t
  misc_feature (45)..(50): n is a, c, g, or t
  misc_feature (52)..(54): n is a, c, g, or t
  misc_feature (58)..(63): n is a, c, g, or t
  misc_feature (65)..(67): n is a, c, g, or t
  misc_feature (69)..(82): n is a, c, g, or t
  misc_feature (84)..(105): n is a, c, g, or t
  misc_feature (108)..(115): n is a, c, g, or t
  misc_feature (118)..(118): n is a, c, g, or t
  misc_feature (120)..(120): n is a, c, g, or t
  misc_feature (123)..(127): n is a, c, g, or t
  misc_feature (130)..(131): n is a, c, g, or t
  misc_feature (133)..(134): n is a, c, g, or t
  misc_feature (137)..(138): n is a, c, g, or t
  misc_feature (140)..(142): n is a, c, g, or t
  misc_feature (144)..(155): n is a, c, g, or t
  misc_feature (158)..(186): n is a, c, g, or t
  misc_feature (189)..(192): n is a, c, g, or t
  misc_feature (202)..(202): n is a, c, g, or t
  misc_feature (220)..(220): n is a, c, g, or t
  misc_feature (226)..(226): n is a, c, g, or t
  misc_feature (229)..(229): n is a, c, g, or t
  misc_feature (232)..(232): n is a, c, g, or t
  misc_feature (235)..(235): n is a, c, g, or t
  misc_feature (238)..(241): n is a, c, g, or t
  misc_feature (245)..(248): n is a, c, g, or t
  misc_feature (251)..(251): n is a, c, g, or t
  misc_feature (253)..(253): n is a, c, g, or t
  misc_feature (255)..(270): n is a, c, g, or t
  misc_feature (272)..(286): n is a, c, g, or t
  misc_feature (293)..(294): n is a, c, g, or t
  misc_feature (297)..(322): n is a, c, g, or t
  misc_feature (324)..(340): n is a, c, g, or t
  misc_feature (343)..(343): n is a, c, g, or t
  misc_feature (347)..(371): n is a, c, g, or t
  misc_feature (373)..(375): n is a, c, g, or t
  misc_feature (377)..(383): n is a, c, g, or t
  misc_feature (385)..(386): n is a, c, g, or t
  misc_feature (388)..(389): n is a, c, g, or t
  misc_feature (392)..(392): n is a, c, g, or t
  misc_feature (395)..(395): n is a, c, g, or t
  misc_feature (398)..(404): n is a, c, g, or t
  misc_feature (406)..(407): n is a, c, g, or t
  misc_feature (409)..(410): n is a, c, g, or t
  misc_feature (412)..(420): n is a, c, g, or t
  misc_feature (422)..(428): n is a, c, g, or t
  misc_feature (431)..(434): n is a, c, g, or t
  misc_feature (436)..(440): n is a, c, g, or t
  misc_feature (442)..(451): n is a, c, g, or t
  misc_feature (453)..(466): n is a, c, g, or t
  misc_feature (468)..(492): n is a, c, g, or t
  misc_feature (494)..(495): n is a, c, g, or t
  misc_feature (497)..(499): n is a, c, g, or t
  misc_feature (501)..(501): n is a, c, g, or t
  misc_feature (503)..(503): n is a, c, g, or t
  misc_feature (505)..(506): n is a, c, g, or t
  misc_feature (508)..(509): n is a, c, g, or t
  misc_feature (514)..(515): n is a, c, g, or t
  misc_feature (517)..(519): n is a, c, g, or t
  misc_feature (521)..(539): n is a, c, g, or t
  misc_feature (541)..(548): n is a, c, g, or t
  misc_feature (551)..(552): n is a, c, g, or t
  misc_feature (554)..(555): n is a, c, g, or t
  misc_feature (557)..(557): n is a, c, g, or t
  misc_feature (559)..(560): n is a, c, g, or t
  misc_feature (563)..(563): n is a, c, g, or t
  misc_feature (565)..(566): n is a, c, g, or t
  misc_feature (569)..(599): n is a, c, g, or t
  misc_feature (609)..(610): n is a, c, g, or t
  misc_feature (612)..(621): n is a, c, g, or t
  misc_feature (623)..(623): n is a, c, g, or t
  misc_feature (625)..(626): n is a, c, g, or t
  misc_feature (628)..(634): n is a, c, g, or t
  misc_feature (636)..(640): n is a, c, g, or t
  misc_feature (642)..(642): n is a, c, g, or t
  misc_feature (644)..(645): n is a, c, g, or t
  misc_feature (647)..(647): n is a, c, g, or t
  misc_feature (652)..(652): n is a, c, g, or t
  misc_feature (654)..(656): n is a, c, g, or t
  misc_feature (658)..(659): n is a, c, g, or t
  misc_feature (661)..(662): n is a, c, g, or t
  misc_feature (664)..(666): n is a, c, g, or t
  misc_feature (668)..(669): n is a, c, g, or t
  misc_feature (671)..(671): n is a, c, g, or t
  misc_feature (674)..(674): n is a, c, g, or t
  misc_feature (676)..(676): n is a, c, g, or t
  misc_feature (678)..(680): n is a, c, g, or t
  misc_feature (683)..(683): n is a, c, g, or t
  misc_feature (685)..(687): n is a, c, g, or t
  misc_feature (690)..(699): n is a, c, g, or t
  misc_feature (701)..(709): n is a, c, g, or t
  misc_feature (711)..(712): n is a, c, g, or t
  misc_feature (714)..(714): n is a, c, g, or t
  misc_feature (718)..(727): n is a, c, g, or t
  misc_feature (729)..(755): n is a, c, g, or t
  misc_feature (766)..(766): n is a, c, g, or t
  misc_feature (775)..(778): n is a, c, g, or t
  misc_feature (780)..(784): n is a, c, g, or t
  misc_feature (791)..(791): n is a, c, g, or t
  misc_feature (794)..(799): n is a, c, g, or t
  misc_feature (801)..(801): n is a, c, g, or t
  misc_feature (804)..(804): n is a, c, g, or t
  misc_feature (806)..(810): n is a, c, g, or t
  misc_feature (813)..(814): n is a, c, g, or t
  misc_feature (816)..(816): n is a, c, g, or t
  misc_feature (819)..(822): n is a, c, g, or t
  misc_feature (824)..(831): n is a, c, g, or t
  misc_feature (833)..(834): n is a, c, g, or t
  misc_feature (837)..(838): n is a, c, g, or t
  misc_feature (840)..(840): n is a, c, g, or t
  misc_feature (842)..(844): n is a, c, g, or t
  misc_feature (849)..(849): n is a, c, g, or t
  misc_feature (851)..(853): n is a, c, g, or t
  misc_feature (855)..(858): n is a, c, g, or t
  misc_feature (860)..(862): n is a, c, g, or t
  misc_feature (864)..(869): n is a, c, g, or t
  misc_feature (871)..(887): n is a, c, g, or t
  misc_feature (889)..(890): n is a, c, g, or t
  misc_feature (892)..(892): n is a, c, g, or t
  misc_feature (894)..(897): n is a, c, g, or t
  misc_feature (899)..(901): n is a, c, g, or t
  misc_feature (903)..(903): n is a, c, g, or t
  misc_feature (905)..(908): n is a, c, g, or t
  misc_feature (911)..(915): n is a, c, g, or t
  misc_feature (917)..(919): n is a, c, g, or t
  misc_feature (921)..(921): n is a, c, g, or t
  misc_feature (923)..(924): n is a, c, g, or t
  misc_feature (926)..(927): n is a, c, g, or t
  misc_feature (929)..(929): n is a, c, g, or t
  misc_feature (932)..(932): n is a, c, g, or t
  misc_feature (934)..(935): n is a, c, g, or t
  misc_feature (937)..(937): n is a, c, g, or t
  misc_feature (939)..(939): n is a, c, g, or t
  misc_feature (942)..(947): n is a, c, g, or t
  misc_feature (949)..(950): n is a, c, g, or t
  misc_feature (952)..(952): n is a, c, g, or t
  misc_feature (954)..(957): n is a, c, g, or t
  misc_feature (959)..(963): n is a, c, g, or t
  misc_feature (965)..(977): n is a, c, g, or t
  misc_feature (979)..(989): n is a, c, g, or t
  misc_feature (991)..(994): n is a, c, g, or t
  misc_feature (996)..(999): n is a, c, g, or t
  misc_feature (1001)..(1003): n is a, c, g, or t
  misc_feature (1005)..(1008): n is a, c, g, or t
  misc_feature (1013)..(1013): n is a, c, g, or t
  misc_feature (1015)..(1018): n is a, c, g, or t
  misc_feature (1020)..(1024): n is a, c, g, or t
  misc_feature (1026)..(1028): n is a, c, g, or t
  misc_feature (1030)..(1041): n is a, c, g, or t
  misc_feature (1043)..(1044): n is a, c, g, or t
  misc_feature (1046)..(1047): n is a, c, g, or t
  misc_feature (1049)..(1051): n is a, c, g, or t
  misc_feature (1053)..(1055): n is a, c, g, or t
  misc_feature (1057)..(1084): n is a, c, g, or t
  misc_feature (1086)..(1089): n is a, c, g, or t
  misc_feature (1092)..(1095): n is a, c, g, or t
  misc_feature (1097)..(1100): n is a, c, g, or t
  misc_feature (1102)..(1102): n is a, c, g, or t
  misc_feature (1104)..(1105): n is a, c, g, or t
  misc_feature (1107)..(1119): n is a, c, g, or t
  misc_feature (1121)..(1121): n is a, c, g, or t
  misc_feature (1123)..(1135): n is a, c, g, or t
  misc_feature (1137)..(1138): n is a, c, g, or t
  misc_feature (1140)..(1152): n is a, c, g, or t
  misc_feature (1154)..(1154): n is a, c, g, or t
  misc_feature (1156)..(1158): n is a, c, g, or t
  misc_feature (1160)..(1171): n is a, c, g, or t
  misc_feature (1174)..(1178): n is a, c, g, or t
  misc_feature (1180)..(1183): n is a, c, g, or t
  misc_feature (1185)..(1185): n is a, c, g, or t
  misc_feature (1187)..(1190): n is a, c, g, or t
  misc_feature (1192)..(1205): n is a, c, g, or t
  misc_feature (1207)..(1207): n is a, c, g, or t
  misc_feature (1209)..(1212): n is a, c, g, or t
  misc_feature (1214)..(1214): n is a, c, g, or t
  misc_feature (1216)..(1222): n is a, c, g, or t
  misc_feature (1225)..(1232): n is a, c, g, or t
  misc_feature (1236)..(1250): n is a, c, g, or t
  misc_feature (1252)..(1262): n is a, c, g, or t
  misc_feature (1264)..(1273): n is a, c, g, or t
  misc_feature (1275)..(1279): n is a, c, g, or t
  misc_feature (1281)..(1281): n is a, c, g, or t
  misc_feature (1285)..(1285): n is a, c, g, or t
  misc_feature (1287)..(1291): n is a, c, g, or t
  misc_feature (1295)..(1299): n is a, c, g, or t
  misc_feature (1301)..(1305): n is a, c, g, or t
  misc_feature (1307)..(1307): n is a, c, g, or t
  misc_feature (1313)..(1315): n is a, c, g, or t
  misc_feature (1317)..(1326): n is a, c, g, or t
  misc_feature (1329)..(1329): n is a, c, g, or t
  misc_feature (1331)..(1336): n is a, c, g, or t
  misc_feature (1338)..(1341): n is a, c, g, or t
  misc_feature (1343)..(1343): n is a, c, g, or t
  misc_feature (1345)..(1345): n is a, c, g, or t
  misc_feature (1347)..(1347): n is a, c, g, or t
  misc_feature (1349)..(1349): n is a, c, g, or t
  misc_feature (1351)..(1359): n is a, c, g, or t
  misc_feature (1364)..(1364): n is a, c, g, or t
  misc_feature (1367)..(1380): n is a, c, g, or t
  misc_feature (1382)..(1388): n is a, c, g, or t
  misc_feature (1390)..(1391): n is a, c, g, or t
  misc_feature (1393)..(1393): n is a, c, g, or t
  misc_feature (1395)..(1397): n is a, c, g, or t
  misc_feature (1400)..(1405): n is a, c, g, or t
  misc_feature (1407)..(1409): n is a, c, g, or t
  misc_feature (1411)..(1414): n is a, c, g, or t
  misc_feature (1417)..(1418): n is a, c, g, or t
  misc_feature (1423)..(1441): n is a, c, g, or t
  misc_feature (1443)..(1446): n is a, c, g, or t
  misc_feature (1448)..(1448): n is a, c, g, or t
  misc_feature (1450)..(1459): n is a, c, g, or t
  misc_feature (1461)..(1462): n is a, c, g, or t
  misc_feature (1464)..(1464): n is a, c, g, or t
  misc_feature (1466)..(1469): n is a, c, g, or t
  misc_feature (1471)..(1471): n is a, c, g, or t
  misc_feature (1473)..(1474): n is a, c, g, or t
  misc_feature (1476)..(1476): n is a, c, g, or t
  misc_feature (1479)..(1485): n is a, c, g, or t
  misc_feature (1491)..(1491): n is a, c, g, or t
  misc_feature (1493)..(1513): n is a, c, g, or t
  misc_feature (1515)..(1517): n is a, c, g, or t
  misc_feature (1521)..(1522): n is a, c, g, or t
  misc_feature (1524)..(1527): n is a, c, g, or t
  misc_feature (1529)..(1535): n is a, c, g, or t
  misc_feature (1537)..(1541): n is a, c, g, or t
  misc_feature (1544)..(1547): n is a, c, g, or t
  misc_feature (1557)..(1557): n is a, c, g, or t
  misc_feature (1559)..(1561): n is a, c, g, or t
  misc_feature (1563)..(1575): n is a, c, g, or t
  misc_feature (1577)..(1578): n is a, c, g, or t
  misc_feature (1582)..(1584): n is a, c, g, or t
  misc_feature (1586)..(1587): n is a, c, g, or t
  misc_feature (1589)..(1589): n is a, c, g, or t
  misc_feature (1989)..(1989): n is a, c, g, or t
  misc_feature (1995)..(1995): n is a, c, g, or t
  misc_feature (1998)..(1998): n is a, c, g, or t
nnnnnnnnnnnnnnnnnnttnnnntnnnnnnttnnnnnnnnnntnnnnnntnnntttnnnnnntnnntnnnnnnnnnnnnnngnnnnnnnnnnnnnnnnnnnnnnttnnnnnnnnttntnttnnnnnttnntnnttnntnnntnnnnnnnnnnnnaannnnnnnnnnnnnnnnnnnnnnnnnnnnnttnnnntttttttttntttttttttttttttttntttttnttnttnttnttnnnntttnnnnttntncnnnnnnnnnnnnnnnngnnnnnnnnnnnnnnnttttttnnttnnnnnnnnnnnnnnnnnnnnnnnnnnannnnnnnnnnnnnnnnnttntttnnnnnnnnnnnnnnnnnnnnnnnnnannnannnnnnntnntnnttnttnttnnnnnnntnntnntnnnnnnnnntnnnnnnnaannnntnnnnngnnnnnnnnnntnnnnnnnnnnnnnntnnnnnnnnnnnnnnnnnnnnnnnnntnntnnnananannannattannannnannnnnnnnnnnnnnnnnnnannnnnnnntannannanannaanannaannnnnnnnnnnnnnnnnnnnnnnnnnnnnnntttttttttnntnnnnnnnnnnanannannnnnnntnnnnngngnngnggtgntnnntnntnntnnntnntnttntntnnnaanannnggnnnnnnnnnntnnnnnnnnntnntntttnnnnnnnnnntnnnnnnnnnnnnnnnnnnnnnnnnnnnatcatcatcancaacaacannnntnnnnnaaaaaanaannnnnntnttntnnnnngtnntntannnnannnnnnnntnnttnntnannnttttntnnntnnnntnnnannnnnntnnnnnnnnnnnnnnnnntnntntnnnntnnnanannnntannnnntnnngnannannangangnngntnttnnnnnntnntntnnnntnnnnntnnnnnnnnnnnnnannnnnnnnnnntnnnntnnnntnnnannnnttttntnnnnannnnntnnntnnnnnnnnnnnnannannannntnnngnnnnnnnnnnnnnnnnnnnnnnnnnnnnannnnaannnnannnngngnngnnnnnnnnnnnnntnannnnnnnnnnnnntnntnnnnnnnnnnnnntntnnngnnnnnnnnnnnnttnnnnnannnnanannnntnnnnnnnnnnnnnntnannnnanannnnnnnttnnnnnnnntaannnnnnnnnnnnnnntnnnnnnnnnnntnnnnnnnnnnannnnnanaaanannnnntttnnnnnannnnnanaaaaannnannnnnnnnnnaanannnnnntnnnntntntntntnnnnnnnnnttttnttnnnnnnnnnnnnnngnnnnnnntnntntnnnttnnnnnnannntnnnnttnnttttnnnnnnnnnnnnnnnnnnnannnnanannnnnnnnnnannanannnnanannanaannnnnnntttttntnnnnnnnnnnnnnnnnnnnnntnnntttnntnnnntnnnnnnntnnnnngannnntttttttttntnnngnnnnnnnnnnnnngnntggnnntnntntttttttcttgtctaaaaataagaagaagaagaagaatcagtcaatataaacggttttgtcgtaattacagctgttgaaataatcggaaagcaactcttttactctttctttaacaatataatttaataaggtgatatgaacatcagtttttgaatgagtggttgtattccatctgacatttattttccagttgcaagggatattagcttcaaaaaacagtgtatccacacgttgttggacagtatgggcaatacttttaagtttcaaaagttcaaatccacggagatgtattttctgtggttgggttagaaggtcatgtagatgtccaagacgtgattgcagatcataaatggtataatttatagttttggtatttttttttctttcttcttcttcttntttttnttnttcttcttcttcttcttcttcttgagacgatgaagacagaggaaaagatgtatcatcgcattttggaatcatctgaaatcaatttatatttaatggtagactaccagcaggacatacaaaatatctttttataggtacataattagaaaacaaatctttattcataaatgttttatatatagcaaagtcaggtgatttaaacatgatgtggtaactaatacaaggagttttatacggatcaatgttttcatctacaaattttttttgaaacatactatttagacctttcatatgagtcagggtatgattttcattggacaatttataacttttttcaccaatgtattctcctgaattaaaaaacccttccacgacccagataccacttattttgtttccagtttcaaaatgtttgtcatataaagcggaaaattgtgcttttagattttcatcaacattatcttcaaatcgtttatgtttcactaaaaagtgggcactgtctgtgtccatatacagcagctgagcttttgtaggatttagaaatactaataaataacaaagtcttttttctaaaataattttgctgtggaataggattgaacatccaacatgaccgagcatggtttcaaatggattttgaatttgtgatgttttgtattcggctagaaaaacattttcacttaactgtacacacgattgtattttttgtttcagttttttcatattaggacaggtttttaagtttttgaacgttttaaattttgaagatgttaaattgcatagagtaaatccatagcaagaatttaacatgagttttattagttctgcttttatttcaaggatttgttttctttctaaatttttttcatttttgatttcctttttaagttggtttctgacttccaatttgaaattaatatgttgacgtaaataatgagcctgttgaaagagaagggcgtggtatatgtcaggggttttttcaaatccaaatttgttatgcagccatataaaatagtctgtgctgataaccataaacgatgaacttttattgagactgacaactttttgacccacattaaatttcgtaagttgttttcgagtataatcggacaaatgttttgtttcatactcagctttttgaatgataaatccaaaacaaggattttgattatctttttttatttctaaattttttacgagtatcagtccagtgagttttttatccaatatattttgcaagaatcctttgtaagagtaggtttttttgtatggaggtaaaaactgtttatcttgatactgtggtattttgtggtggtggtaatcacaatcgaaaatctctacatattcccattcaatatgatgtagttgaaaatgttccacaaagtgttgcagcagtaattttattttcattttgacatctaaagttttatcggccaattcctgttgattttcattattcttgatccaacacgagctatgatgtccatgtctaaatactgattggtattgaataattttaataaatagtttctgacaattttttttcttaaacgctaggaaaccatcaattggatatgtagccaaatataattgacccattgcggtaaaactggattgaaatcttatgattgtttcaatgtcgtcctttggcaatgatgcaagataatgattcaaagcgtgaaattcattgtaaaagcgagggggatcattaattaaatgaaaacgatcagtattaaaatcaccccttttgcggacatctgtgcaaaaactgtttatatttgtacttgaactttttgtttttcttttcatttcgccagagctatctttggtagatctggtgaagaacagaggtgaattaacaggcattttttttacagcggcacttgggtaaagagaacgaatgtcaattgtagtaattccagctggggtgtttgtgaatgcatttttccatggatcaatgttgtgaaaattaggccatgtctcagcgtttaaacaaggattt

SEQ ID NO: 387 - DNA, 4000 bp, Escherichia coli
  misc_feature (1987)..(1987): n is a, c, g, or t
  misc_feature (2415)..(2415): n is a, c, g, or t
  misc_feature (2434)..(2434): n is a, c, g, or t
  misc_feature (2494)..(2494): n is a, c, g, or t
  misc_feature (2515)..(2515): n is a, c, g, or t
  misc_feature (2863)..(2863): n is a, c, g, or t
  misc_feature (3097)..(3097): n is a, c, g, or t
  misc_feature (3409)..(3409): n is a, c, g, or t
  misc_feature (3413)..(3414): n is a, c, g, or t
  misc_feature (3517)..(3517): n is a, c, g, or t
  misc_feature (3994)..(3994): n is a, c, g, or t
aaaccttagttgggtccaactgaatttgttcaggcctaattgaagctagccagccagcggctgctgtgttacggaatatttctggtggattttgaccagaacaatttcggctgagcgtgctcacttcaacgaagttatttccaccaacaaaggaagccacaaaaaaatttgcaggattttggtaaatttcaattggtgacccagtttgttgaacctgcccctcattcagcacgcaaatcaagtctgagactgcgagagcttcttcctgatcgtgagtaacataaatggttgtgatgccgagctgtctctggatcctccgaatttcagaacgaagctcttcacgaagttgggcatctaaatttgagagaggttcgtccatcaaaatcacccttgggctcataattaacgaacgagctagcccaactcgctgctgctgtcctccactcaattcatgtggcattcttttacgaagtgattccaattgaacaacctgcaggatgtccagcattcgcttctgatattccttgttggagagcctaagtctcttcaagccgaaaccaacgttgtcttccacactcaggtgaggaaagacggcatagtcctgaaaaaccatgcctatgtttcgttgatgtggggagagtgtgcgaatagaagctctgtcgatttttaaatcaccagagtcaacgtcatggaaaccagctagagcccggagtagagtcgttttaccgcatccacttgggccaagtagagtaaagaaagccccactaggtatctccagtgagacctgattcaaggcttggaagctaccgtattttttgacggcagcttctacttcaacatgagacaaggaaggtactccgaggaagtttaatcattgaacttctaacagagtgtcgttccagcgttccacaagtctcttcttgttttctactgcccagagtagatcgtactggattgtcttgatctggtttagaggtgtaagctcctttacagactctacatctaaacgtacaggccgtcggccgattgctgcaacagaactttgagcttccttagaaatcatataatccaagaattgcttccctgcacttggattgggaccatttgcaactagggccattgcgtctggaaccaaggaagtcccatcagatggataaacaatctgtacaggtccgccacctaatttgtatcgcagcgcggcatcttccagggtgatcccaacggcagcttctccatcattaacaaaccgtggcactgctcccgaactatttgagagaaccatgtttgccatgaggtttttataggtgtcccagcctttgtcattatcaccatatatctgcagcacggttgctagctggatgtaggatgaaccagacttgtctgctcgagcggaagaaatttttcctttgtaggcggacttagttaggtctgaccaagacattgggacatcagctcccttcatctgttgattgttgaccaagaagacagagacgattgctgtaaatggcagccaagtttggctcggtctaagttgtggattgattttatcatcatccttgggtgtgtagttgacgaataattccttgttaaaatccactaattcaccaccgacactccaaatcacatctgcagtttggcgtcctttttcagctctgagtcggtttagtaactcacccgagccagccttgacgatttcaaccttaattccagattgtttttcaaatgcagggactaaggtgtcaatgagctcttgtggtgccgccgtataaactgcaacagtaccatttgctaaagccacagcagaagccaaggctataaacgtggatgtgagcaaaaaaactcttgaaaacaacgaggctttcttcatttgggctccttaatggaggatgaaaaatatttccaacaaaaattgtcagaacaaatcccaatgatgggcggcattacactggaggagcatgactctaatttcaagagaattgtgatgttnggtgatcactaaaatctgcaaggagtcattgtgaaattggtcgcagttcaaaaaagagagggctgttggacaggagcgagttcttctggttgcaaagccaaggacaacaatggggctttgagcaggggttctagctttggaagtggcccattcagccaggttgtgacttcatcaggaggcaggagcagtggcatacgatgatgaatctgggcgcattgtggggtgggatgagtagtcagagtcaccagacgattggttgaatccgtctctggaaaccagatgccagccataaacaatggcgattcatctggggcatgaaagcggaatttctgcttctgaccactctccaaaatcttccattcataccaaccactgcaagggattacgcaacgtcgtgatcgaaacgcctcacggaatgtcatcttggnagcaacggtctcggcctgngcgttgatcagcagttgcttgctccaggaaggttgaatgccccattgcaaacggacctgngtgaagccttgggactcagcntgcagcgtatccacctgttgtgtgggtcgtagatcacgattctctctactctcccactcgacgccaaagcctgccttgacagcatcactgattttgttgggcagaatgtcgattcgtccacacatgattcagattgcttggagttatgccgcaatcaactcaaagctgatttggtggctgcctgcgttaatcaggtgtccttctgaaggaacagaaacaggatttccattcagttgaacatgctgatgaagagcattgggcatcaaccttccctggcatcctgcaggcagcgtgacgcgataatcgacttgttgctctttcttttcccaacgtgcttcaatccgtccntgacggcaatcgtgccacattgagataggattgaggtttggaagaatttgggggttcaattgaacctcatcaaagcctggcttttcagcagtcgggctgattccggccacctgctcaaatagccattggcaaactgccccatacgcatagtggttgtagctgttcatctcaggagaataaattgttccatctggggccatcgcatcccagcgctcccaaatggttgtggctccncgttccacctgatagagccaacctggaacctcacgattcaaaaagaccttttcagcaagatccaacaatccaacttttgtcagtgcgggtaagagggctggagtgccaatgaaacctgtgccaatcagataattggcgttctctatcgactttctgaagtaccccttcgctgattcaaaatgagcatctggtacaagatcatagagaaaagcaagggcgtaggaggtctggtcgttatgggccaatcgtccggatagactgaagtactcccgctcaaaagctgtgcggatttcctcaagtttcccagttagntttnnggcagcttcatcttcccctaggacttgagcaattttcttggccagctgtgtggaaatgaagtggtaaagggtcgctgcacagtcatcggcaatcgtgggtctnggttttcgattatcaccgctgggttggagccaatcgccaaaggtaaacccttcaccaaaccatttgttggcaggatggatgatgggtccgtctgaaatgttccagagataatcaagccagcggagcattgcagggaaacactctttcagtacggtggcatctccatagtggagatagtgttgccagggaataacggtgatggcatccccccaaccagtggagccagcccaatcactgcgatattgctcgggatggagtcgggttgggtcaggagtaaaatgtggcagtgcgccgttgctgcgttgatcatgcatcaaatcacgcaggtattttctcaggaattggttacagtccgccaaccaacaggccgttcctgaaaaaacctgagcatctcccgtccagccaaggcgttcatctcgttgtgggcaatcggtagggacttctatgaagttgccacgttgtgaccagatggtgttnagcacc

SEQ ID NO: 388 - DNA, 4000 bp, Escherichia coli
  misc_feature (5)..(5): n is a, c, g, or t
  misc_feature (89)..(89): n is a, c, g, or t
  misc_feature (95)..(95): n is a, c, g, or t
  misc_feature (101)..(101): n is a, c, g, or t
  misc_feature (167)..(167): n is a, c, g, or t
  misc_feature (179)..(179): n is a, c, g, or t
  misc_feature (197)..(197): n is a, c, g, or t
  misc_feature (210)..(210): n is a, c, g, or t
  misc_feature (251)..(251): n is a, c, g, or t
  misc_feature (254)..(254): n is a, c, g, or t
  misc_feature (299)..(299): n is a, c, g, or t
  misc_feature (317)..(317): n is a, c, g, or t
  misc_feature (350)..(350): n is a, c, g, or t
  misc_feature (356)..(356): n is a, c, g, or t
  misc_feature (383)..(383): n is a, c, g, or t
  misc_feature (410)..(410): n is a, c, g, or t
  misc_feature (426)..(426): n is a, c, g, or t
  misc_feature (428)..(428): n is a, c, g, or t
  misc_feature (446)..(446): n is a, c, g, or t
  misc_feature (494)..(494): n is a, c, g, or t
  misc_feature (518)..(518): n is a, c, g, or t
  misc_feature (521)..(521): n is a, c, g, or t
  misc_feature (554)..(554): n is a, c, g, or t
  misc_feature (557)..(557): n is a, c, g, or t
  misc_feature (590)..(590): n is a, c, g, or t
  misc_feature (632)..(632): n is a, c, g, or t
  misc_feature (635)..(635): n is a, c, g, or t
  misc_feature (650)..(650): n is a, c, g, or t
  misc_feature (662)..(662): n is a, c, g, or t
  misc_feature (674)..(674): n is a, c, g, or t
  misc_feature (676)..(676): n is a, c, g, or t
  misc_feature (815)..(815): n is a, c, g, or t
  misc_feature (821)..(821): n is a, c, g, or t
  misc_feature (836)..(836): n is a, c, g, or t
  misc_feature (866)..(866): n is a, c, g, or t
  misc_feature (912)..(912): n is a, c, g, or t
  misc_feature (1008)..(1008): n is a, c, g, or t
  misc_feature (1052)..(1053): n is a, c, g, or t
  misc_feature (1055)..(1055): n is a, c, g, or t
  misc_feature (1064)..(1064): n is a, c, g, or t
  misc_feature (1068)..(1068): n is a, c, g, or t
  misc_feature (1070)..(1070): n is a, c, g, or t
  misc_feature (1106)..(1106): n is a, c, g, or t
  misc_feature (1183)..(1183): n is a, c, g, or t
  misc_feature (1253)..(1253): n is a, c, g, or t
  misc_feature (1262)..(1262): n is a, c, g, or t
  misc_feature (1286)..(1286): n is a, c, g, or t
  misc_feature (1292)..(1292): n is a, c, g, or t
  misc_feature (1310)..(1310): n is a, c, g, or t
  misc_feature (1322)..(1322): n is a, c, g, or t
  misc_feature (1346)..(1347): n is a, c, g, or t
  misc_feature (1358)..(1358): n is a, c, g, or t
  misc_feature (1545)..(1545): n is a, c, g, or t
  misc_feature (1599)..(1599): n is a, c, g, or t
  misc_feature (1719)..(1719): n is a, c, g, or t
  misc_feature (1791)..(1791): n is a, c, g, or t
  misc_feature (2503)..(2503): n is a, c, g, or t
  misc_feature (3159)..(3159): n is a, c, g, or t
  misc_feature (3171)..(3171): n is a, c, g, or t
  misc_feature (3186)..(3186): n is a, c, g, or t
  misc_feature (3303)..(3303): n is a, c, g, or t
  misc_feature (3516)..(3516): n is a, c, g, or t
  misc_feature (3535)..(3535): n is a, c, g, or t
  misc_feature (3555)..(3555): n is a, c, g, or t
  misc_feature (3609)..(3609): n is a, c, g, or t
  misc_feature (3759)..(3759): n is a, c, g, or t
  misc_feature (3933)..(3933): n is a, c, g, or t
cgacnggggcttatggcggtatcgggtcggtcatctcgcagcgccccgatagcacgatcatcatcaacgaccccatggagggtatgccngctgcncaggcnggtctgcgtgctggtgacgtcatcctcgaggtcgacggtcaggacttccgtaagtcgaccagcganaaggtgagtgcngccctcaagggtacgccngggagcaagatcntgctcctcatccagcgtccaggggagtcgaagcctcgccgnatngagttccgccgtcagaagattcaggtcagccccgtgccttactanggtgtcatcgggaagganatgggctatatctccctcacgggcttccccaanacggcngccgctgaggtgaagaaggccttcctngacctcaagtccaagcaccagctccgngggctcatccttgacntncgcgacaatggtggtggnctcatcgacgaagccatcaagatcgtcaacttcttcgtccccgcaggngaggaggtcgtgacgacgcgtggncgnaatgcccgccgtcaggaggtcgtctatcgcacnacngacaagcctctcgacacgcagatccccatcgcngtgctcatcaatgggcagtcggcctcggcctccgagatcgtnagnggtgctctgcagganctcgatcgcgcngtcgtcatgggngncaagagctatggtaagggccttgtgcagacgacgatgcagctcccctacgacgggacgatcaagctcacgacggcgaagtactacatccccagcggtcgctgtatccagcgcatcaactaccagtcgctgcgtgagggnaagggngctacgatcctgccngacagcctgacgaaggtcttccacacgcgngcaggccgtgaggtccgtgatgctggtggtatcctccccgacatcnctctcacgaatgactcgctgcccacgatggtgtactacctgcgtgtcaataacgatgccttcgactggatcaccgactatgtgcgcagccaccgcncgatcgcttcgccccgtgacttcaagctcacggatgcagactanncntccttctcnaatnanatgatcgagaagaagttcgactacgaccgccagagnggcaaggagctgaagaagctggaggacttggcgaagttcgagggctattacaacaagagtcgtgaggccttcgaggngctgaagaagctcctcgtccccgacctcaagcacgacctcgaggagcatcgtcccttcatcgagcagtanctgacgggngctatcctcacccgctactattanaatagnggggcgctggagcgcagngtcgccgagganaagatggtgcgtgccgcagagganntcctcgcagancccgcacgctacacgaaggtcctgagccgccccgaggctaagaccgccgctacccctacagcgaagtagtgcgatgaagaaaatcttttgccccaagtgcgatacggcgatccctctgaggagggagcgtatcgaggagctgcaggcctcgggagaggatcgcctctcgatcatctgcccgcagtgnacgcatcagctcaacctgcgtctgcgcttgccttcggctaagagcacgaagcgncaagagcagcgcacctccgtcgggcatatcatcgtggtagagaatgtcttcggctataagcagctcttccccctctacgtcggggtgaatgccatcggccgtcgcaacaaggataccgcnacggatatccctatcatcacctccgaccccagcatggaccgccatcatgcgatcatcaaggtcaccgagggncgcacggggaagctccgcttcgctgtggcagatgacgatagccgtgtggggaccttcctcgcaggcgagcttctcgccccgaaggagtggcgctacctccagcctggagacgtgctcacgctcggcgctacctccatcatcttcagcgacgaacccctccccgaagatcccaccatcgaggagtcgtagcttgcgccttccctctccactcgcggggccagcgagctacgctcaccgctctcgtcgtggtggacgattttttacgtctgcatagtatagtgggttgcttatgtgcgtattttttgcttactttgcagaccgattgtagagtcctcctgagggaggtgaagatacaagtcgctgattacgttagaaataacaaactaaaatataagagtaatgtcaaagatttgtcagattacaggtaagaaagccctggtcggcaacaatgtctcgcactccaatcgcaagacaaagcgccgcttcgaagtcaacctgtttaccaagaagttcttctggccagaagaagggtgctggatcgtcctgaaggtgtctgccgcaggcctccgcctcatcaacaagatcggtctcgatgccgctgtgcgtcaggctgcaaacaatggctacctaagtgaaatcaaagtaaagtagtaggaagatcatggcaaagaaagctaaaggaaacagagtacaggtcatcctcgagtgcacngagcacaaggagagtggtatgccagggacgtcccgctacatcacgaccaagaacagaaagaatacgaccgagcgtcttgagctgagaaagtacaaccccatcctcaagcgtatgacggtccataaggaaatcaagtaatcacgaggagacaagacaatggcaaagaaagcagtcgcatcattcaagaaggccgacggtcgtacctactctaaggtcatcaagatggtcaagtcccctaagacgggtgcttacatcttccaggaagagatggtccccaacgaagccgtcaaggagttcttctcttaatcgaacgaacttcgtcgggtgctctgccctcgctatagaggtcgcacccaccgccgctacccgagtgtagcaaacacctacaagaggctgccccatgcaatgcaagcgggcagcctcttatcttttcgagacctccgagttaactcccctcaccgcgcctctatcagctgcggtgccgaccctataaagcagagatcttcatgtctacgcaggtagaaaaaaacaccgagcgcatcgagcgcttagctcacgagagcatcccacgcctccttattcactatggtgtcccagctattgtggggacgatggtcaacgcgctctacagcgtcgtcgaccgcatcttcatcggncagggcgtcagngaatttgctatcacngggcttgctctgaccttccctatcctgatcttcatccaagccttcggtatgcttatcggtgtcggggcttcatctcgtgtgtccatcctcctcggcgagaacaagcacgatcaggcngagcgtatcctgagtaatgccctcctgctgactctggtcacgcaggtgctgaccttagtgccggtgatgatctggctcgacgatatcctccgtgctctgggggctaacgaccgcacgctccccttcgcttacgactatctgaagatcatgatcccggggaatatcttctcgacgctctgcttcagcttcaatgcgatcatgcgtgcttcgggntatccctacaaggcgatgntcacgatgctcatcggggcngggctcaatacgctcctcgatgcgctcttcatctatggctttgactggggtatngagggggctgcttgggctacggtgatcgctatggctgtgtcgtcagcgtttgtgatgcagcacttcctcagcagcaagagcgaggtgcagttccgccgacgcaatatgcgcctctcctccgagcagatcctggcgatcctctctatcggnatgtcgcccttcttcctgcagctcctcagtagtggcatcgccttcctcatcaactctaccttggctcgctatgcggagaactctctgatggctgaccgagcggtgggggcttatgggatcatcaatagcgcggcccttgtgggctttatgttcatgctcggtatcgctcagggnatgcagcccatcgtgggctacaactacggagcccgtgcgatggaccgtgtgcgtcaggccttcaaga

SEQ ID NO: 389 - DNA, 4000 bp, Escherichia coli
  misc_feature (1)..(4): n is a, c, g, or t
  misc_feature (6)..(9): n is a, c, g, or t
  misc_feature (12)..(14): n is a, c, g, or t
  misc_feature (16)..(16): n is a, c, g, or t
  misc_feature (18)..(44): n is a, c, g, or t
  misc_feature (46)..(55): n is a, c, g, or t
  misc_feature (59)..(75): n is a, c, g, or t
  misc_feature (77)..(78): n is a, c, g, or t
  misc_feature (80)..(81): n is a, c, g, or t
  misc_feature (83)..(97): n is a, c, g, or t
  misc_feature (99)..(103): n is a, c, g, or t
  misc_feature (106)..(121): n is a, c, g, or t
  misc_feature (123)..(128): n is a, c, g, or t
  misc_feature (130)..(143): n is a, c, g, or t
  misc_feature (145)..(149): n is a, c, g, or t
  misc_feature (151)..(156): n is a, c, g, or t
  misc_feature (158)..(158): n is a, c, g, or t
  misc_feature (160)..(162): n is a, c, g, or t
  misc_feature (164)..(176): n is a, c, g, or t
  misc_feature (178)..(194): n is a, c, g, or t
  misc_feature (196)..(231): n is a, c, g, or t
  misc_feature (233)..(242): n is a, c, g, or t
  misc_feature (244)..(247): n is a, c, g, or t
  misc_feature (249)..(261): n is a, c, g, or t
  misc_feature (263)..(269): n is a, c, g, or t
  misc_feature (271)..(271): n is a, c, g, or t
  misc_feature (273)..(276): n is a, c, g, or t
  misc_feature (278)..(309): n is a, c, g, or t
  misc_feature (311)..(311): n is a, c, g, or t
  misc_feature (314)..(343): n is a, c, g, or t
  misc_feature (345)..(349): n is a, c, g, or t
  misc_feature (351)..(360): n is a, c, g, or t
  misc_feature (362)..(402): n is a, c, g, or t
  misc_feature (404)..(415): n is a, c, g, or t
  misc_feature (417)..(457): n is a, c, g, or t
  misc_feature (459)..(470): n is a, c, g, or t
  misc_feature (472)..(478): n is a, c, g, or t
  misc_feature (480)..(493): n is a, c, g, or t
  misc_feature (495)..(499): n is a, c, g, or t
  misc_feature (501)..(520): n is a, c, g, or t
  misc_feature (522)..(526): n is a, c, g, or t
  misc_feature (528)..(538): n is a, c, g, or t
  misc_feature (540)..(546): n is a, c, g, or t
  misc_feature (548)..(549): n is a, c, g, or t
  misc_feature (551)..(554): n is a, c, g, or t
  misc_feature (556)..(567): n is a, c, g, or t
  misc_feature (569)..(571): n is a, c, g, or t
  misc_feature (573)..(590): n is a, c, g, or t
  misc_feature (592)..(629): n is a, c, g, or t
  misc_feature (631)..(635): n is a, c, g, or t
  misc_feature (637)..(648): n is a, c, g, or t
  misc_feature (650)..(664): n is a, c, g, or t
  misc_feature (666)..(681): n is a, c, g, or t
  misc_feature (683)..(684): n is a, c, g, or t
  misc_feature (686)..(689): n is a, c, g, or t
  misc_feature (691)..(704): n is a, c, g, or t
  misc_feature (706)..(738): n is a, c, g, or t
  misc_feature (740)..(750): n is a, c, g, or t
  misc_feature (752)..(774): n is a, c, g, or t
  misc_feature (777)..(780): n is a, c, g, or t
  misc_feature (783)..(797): n is a, c, g, or t
  misc_feature (800)..(817): n is a, c, g, or t
  misc_feature (819)..(831): n is a, c, g, or t
  misc_feature (833)..(876): n is a, c, g, or t
  misc_feature (878)..(881): n is a, c, g, or t
  misc_feature (884)..(888): n is a, c, g, or t
  misc_feature (890)..(895): n is a, c, g, or t
  misc_feature (898)..(924): n is a, c, g, or t
  misc_feature (926)..(928): n is a, c, g, or t
  misc_feature (930)..(951): n is a, c, g, or t
  misc_feature (953)..(957): n is a, c, g, or t
  misc_feature (959)..(976): n is a, c, g, or t
  misc_feature (978)..(994): n is a, c, g, or t
  misc_feature (996)..(996): n is a, c, g, or t
  misc_feature (998)..(1024): n is a, c, g, or t
  misc_feature (1026)..(1064): n is a, c, g, or t
  misc_feature (1066)..(1073): n is a, c, g, or t
  misc_feature (1075)..(1102): n is a, c, g, or t
  misc_feature (1104)..(1140): n is a, c, g, or t
  misc_feature (1142)..(1160): n is a, c, g, or t
  misc_feature (1162)..(1178): n is a, c, g, or t
  misc_feature (1180)..(1182): n is a, c, g, or t
  misc_feature (1184)..(1208): n is a, c, g, or t
  misc_feature (1210)..(1229): n is a, c, g, or t
  misc_feature (1231)..(1241): n is a, c, g, or t
  misc_feature (1243)..(1259): n is a, c, g, or t
  misc_feature (1261)..(1265): n is a, c, g, or t
  misc_feature (1267)..(1277): n is a, c, g, or t
  misc_feature (1279)..(1281): n is a, c, g, or t
  misc_feature (1283)..(1304): n is a, c, g, or t
  misc_feature (1306)..(1307): n is a, c, g, or t
  misc_feature (1309)..(1315): n is a, c, g, or t
  misc_feature (1317)..(1317): n is a, c, g, or t
  misc_feature (1319)..(1333): n is a, c, g, or t
  misc_feature (1335)..(1341): n is a, c, g, or t
  misc_feature (1345)..(1345): n is a, c, g, or t
  misc_feature (1348)..(1348): n is a, c, g, or t
  misc_feature (1350)..(1350): n is a, c, g, or t
  misc_feature (1357)..(1358): n is a, c, g, or t
  misc_feature (1361)..(1361): n is a, c, g, or t
  misc_feature (1365)..(1366): n is a, c, g, or t
  misc_feature (1368)..(1370): n is a, c, g, or t
  misc_feature (1374)..(1379): n is a, c, g, or t
  misc_feature (1382)..(1384): n is a, c, g, or t
  misc_feature (1388)..(1388): n is a, c, g, or t
  misc_feature (1390)..(1391): n is a, c, g, or t
  misc_feature (1393)..(1393): n is a, c, g, or t
  misc_feature (1396)..(1396): n is a, c, g, or t
  misc_feature (1399)..(1399): n is a, c, g, or t
  misc_feature (1402)..(1402): n is a, c, g, or t
  misc_feature (1410)..(1410): n is a, c, g, or t
  misc_feature (1417)..(1417): n is a, c, g, or t
  misc_feature (1420)..(1421): n is a, c, g, or t
  misc_feature (1427)..(1427): n is a, c, g, or t
  misc_feature (1430)..(1431): n is a, c, g, or t
  misc_feature (1437)..(1437): n is a, c, g, or t
  misc_feature (1442)..(1442): n is a, c, g, or t
  misc_feature (1446)..(1447): n is a, c, g, or t
  misc_feature (1450)..(1450): n is a, c, g, or t
  misc_feature (1453)..(1453): n is a, c, g, or t
  misc_feature (1455)..(1456): n is a, c, g, or t
  misc_feature (1459)..(1459): n is a, c, g, or t
  misc_feature (1465)..(1468): n is a, c, g, or t
  misc_feature (1473)..(1473): n is a, c, g, or t
  misc_feature (1475)..(1475): n is a, c, g, or t
  misc_feature (1479)..(1479): n is a, c, g, or t
  misc_feature (1481)..(1482): n is a, c, g, or t
  misc_feature (1485)..(1491): n is a, c, g, or t
  misc_feature (1496)..(1497): n is a, c, g, or t
  misc_feature (1499)..(1503): n is a, c, g, or t
  misc_feature (1505)..(1505): n is a, c, g, or t
  misc_feature (1508)..(1508): n is a, c, g, or t
  misc_feature (1510)..(1512): n is a, c, g, or t
  misc_feature (1518)..(1525): n is a, c, g, or t
  misc_feature (1527)..(1529): n is a, c, g, or t
  misc_feature (1531)..(1531): n is a, c, g, or t
  misc_feature (1534)..(1534): n is a, c, g, or t
  misc_feature (1537)..(1546): n is a, c, g, or t
  misc_feature (1548)..(1550): n is a, c, g, or t
  misc_feature (1552)..(1552): n is a, c, g, or t
  misc_feature (1554)..(1556): n is a, c, g, or t
  misc_feature (1558)..(1561): n is a, c, g, or t
  misc_feature (1563)..(1563): n is a, c, g, or t
  misc_feature (1565)..(1569): n is a, c, g, or t
  misc_feature (1571)..(1574): n is a, c, g, or t
  misc_feature (1577)..(1577): n is a, c, g, or t
  misc_feature (1595)..(1596): n is a, c, g, or t
  misc_feature (1601)..(1601): n is a, c, g, or t
  misc_feature (1776)..(1776): n is a, c, g, or t
  misc_feature (1987)..(1987): n is a, c, g, or t
  misc_feature (2598)..(2598): n is a, c, g, or t
  misc_feature (2679)..(2679): n is a, c, g, or t
  misc_feature (3226)..(3226): n is a, c, g, or t
  misc_feature (3263)..(3263): n is a, c, g, or t
  misc_feature (3319)..(3319): n is a, c, g, or t
  misc_feature (3419)..(3419): n is a, c, g, or t
  misc_feature (3433)..(3433): n is a, c, g, or t
  misc_feature (3483)..(3483): n is a, c, g, or t
nnnnannnngtnnnanannnnnnnnnnnnnnnnnnnnnnnnnnnannnnnnnnnnagannnnnnnnnnnnnnnnnannannannnnnnnnnnnnnnnannnnnttnnnnnnnnnnnnnnnnannnnnntnnnnnnnnnnnnnntnnnnntnnnnnntntnnnannnnnnnnnnnnntnnnnnnnnnnnnnnnnngnnnnnnnnnnnnnnnnnnnnnnnnnnnnnnnnnnnnannnnnnnnnntnnnnannnnnnnnnnnnnannnnnnnanannnnannnnnnnnnnnnnnnnnnnnnnnnnnnnnnnngnaannnnnnnnnnnnnnnnnnnnnnnnnnnnnntnnnnncnnnnnnnnnnannnnnnnnnnnnnnnnnnnnnnnnnnnnnnnnnnnnnnnnnannnnnnnnnnnnannnnnnnnnnnnnnnnnnnnnnnnnnnnnnnnnnnnnnnnnannnnnnnnnnnnannnnnnntnnnnnnnnnnnnnnannnnncnnnnnnnnnnnnnnnnnnnncnnnnnannnnnnnnnnnannnnnnnannannnnannnnnnnnnnnnannnannnnnnnnnnnnnnnnnnannnnnnnnnnnnnnnnnnnnnnnnnnnnnnnnnnnnnntnnnnnannnnnnnnnnnnannnnnnnnnnnnnnntnnnnnnnnnnnnnnnnannannnntnnnnnnnnnnnnnnannnnnnnnnnnnnnnnnnnnnnnnnnnnnnnnncnnnnnnnnnnnannnnnnnnnnnnnnnnnnnnnnnaannnngtnnnnnnnnnnnnnnntannnnnnnnnnnnnnnnnnannnnnnnnnnnnnannnnnnnnnnnnnnnnnnnnnnnnnnnnnnnnnnnnnnnnnnnncnnnnaannnnngnnnnnngtnnnnnnnnnnnnnnnnnnnnnnnnnnnannnannnnnnnnnnnnnnnnnnnnnnannnnngnnnnnnnnnnnnnnnnnnannnnnnnnnnnnnnnnnancnnnnnnnnnnnnnnnnnnnnnnnnnnnannnnnnnnnnnnnnnnnnnnnnnnnnnnnnnnnnnnnnnannnnnnnntnnnnnnnnnnnnnnnnnnnnnnnnnnnnannnnnnnnnnnnnnnnnnnnnnnnnnnnnnnnnnnnnannnnnnnnnnnnnnnnnnntnnnnnnnnnnnnnnnnntnnntnnnnnnnnnnnnnnnnnnnnnnnnntnnnnnnnnnnnnnnnnnnnntnnnnnnnnnnnannnnnnnnnnnnnnnnnannnnnannnnnnnnnnntnnnannnnnnnnnnnnnnnnnnnnnngnntnnnnnnngngnnnnnnnnnnnnnnnannnnnnntaanttntnataattnnatnattnnannntctnnnnnncannnttgngnngntgnttntgnattataanatagatnaanntaaatnagnntgatangaagnattnntanttntnnacnctcctnnnntatancnaganannacnnnnnnngttgnntnnnnnangtngnnnaaacannnnnnnncnnnantanatnnnnnnnnnntnnnanannnannnntnannnnntnnnnttntatttatactattacttnncctancacctttcagtttcttgcctctatacaaaataagtgaggctattttaaacagcaaatacagcatctacactaactaaatagaacaccgctaatacgcataaaagtctgtactatattgttacttttctttcagatatctgtgagttgcgtctcagatatctgtaacgttcgtttnagatatctgtcagttgcgttttagacgtcataaaaaatacgatatttatagtcgtgtattatttcctgctgagacactcttaacttcagattaaataggaataagaatgcacttattttagtgataagaaactgtttagacgaagtggtaagaaacactactctaccttacacggacatattgtcagacgatagcgacagtatgacactcncattgtattggtacgagtattgtattatacgaggtataaacataaaaaataaacaaataaaataggagataaaattatgatgtataagaattcatggttaccagaagtatttaacgacttcttttataacaacaatatgcccaaaacaaatgcaacagcaccagctatcaacgtattagagaacgaaaacgaatacattgtagagttggctgcaccaggcttaagaaaggaagactttgacattagtattaataacgatggcgacttagttattaagatggagaagaagaacgaagtgaaagatgagaaagcacactacttacgcagagagtttgcatacagcaaatatgaacaaacacttattttgccagacgatgtaaacaaagacgaggttggtgcaagaatgagtgatggtgtgttgaacattacactgccaaaactaaacaagacagttcagaaagtagcaagacaaattgaagttggttaattccatctcataatacgatttctacaatcactttaatgcttcggaatagaagcttccctaaatagaatgaatgaatagtgatgataatagtttattcataatataatgagaaataattgttagnaataaaagaatccccgaatgcgtgagcactcggggattttctatttcttttttccttccacttctatgctattggtgattngcaaaacgaactgcagccaattcttcatatttagtgttgggttttccatagtttgcatacggataaatactaataccgccacgaggagtgaagattcctgttacttctatatacttaggttgcattagttttataaggtctttcattataatgttaacgcaatcttcgtggaaatcgccatgattgcgaaagctaaacaaatagagtttcaggctcttgctttctaccatacgtacatcggggacgtatgatatacgaatttctgcaaagtctggttgtcccgtaataggacacaaactcgtaaattccggacagttaaagcgcacccagtagtcgttatcctgatgcttattttcaaacgtttccaacacttctggtgcataatccattctatatttggttgcagaacctaacgactgcaagccctcttcgtttcgttccataatagttttgtttatttttgttctatgtgcaaaggtaatatattgttagaaaacagcaaacaccatcacgatatattatacgcgaagagtctcttctctattcnctttaatgctgatggcagtattcggatagactacaancaggaatttctttcatatatttataaaaaagcaggtaatacacaaggcagaaagcnactttacaattagtatcgtaggtataaacaaaaataggagatagactcattataaacgcctatctcctattcttaacacttacattagattagacctaantcaaagagaatatnctccaaatgctgtagtttacaccttcatcataaacgtcttcgccttcatnttgctttagcttcttcaccacacgaatggtaagtggtagagcaatcacctcgtaaagtgtctttaacactacctgccaaagcattagtttcggcaattcgggagtaggaacaacaccgcctaatgccagtggaaagaaaattagagaatcgagactttctcctgcaatggtactcaagatggcacgccatgagaaatgtcgtccaccatcacgtagcttcatcttactcattacgtaggcattagcaaatgaacccacaatgaaagctacgaaagaagctgctgctacacgtggagcaagaccaaagacagcatggaatccagcttcattagtccaataaggagcacccggtatccagtcgcacagtgcacccattgccacaaagaagaagttcattgcaaagcccgtccatatcaacagacgtgcttttttaaatccccacacttcacaaacacaatcgtttataatgtaagagatagggaatacgatgagtccacccgtcaatgagatacctaat

SEQ ID NO: 390 - DNA, 4000 bp, Escherichia coli
  misc_feature (16)..(16): n is a, c, g, or t
  misc_feature (21)..(21): n is a, c, g, or t
  misc_feature (24)..(24): n is a, c, g, or t
  misc_feature (26)..(28): n is a, c, g, or t
  misc_feature (31)..(31): n is a, c, g, or t
  misc_feature (36)..(37): n is a, c, g, or t
  misc_feature (40)..(40): n is a, c, g, or t
  misc_feature (42)..(42): n is a, c, g, or t
  misc_feature (45)..(46): n is a, c, g, or t
  misc_feature (49)..(53): n is a, c, g, or t
  misc_feature (55)..(55): n is a, c, g, or t
  misc_feature (57)..(57): n is a, c, g, or t
  misc_feature (59)..(61): n is a, c, g, or t
  misc_feature (65)..(65): n is a, c, g, or t
  misc_feature (74)..(74): n is a, c, g, or t
  misc_feature (80)..(83): n is a, c, g, or t
  misc_feature (86)..(86): n is a, c, g, or t
  misc_feature (90)..(93): n is a, c, g, or t
  misc_feature (98)..(98): n is a, c, g, or t
  misc_feature (102)..(102): n is a, c, g, or t
  misc_feature (104)..(106): n is a, c, g, or t
  misc_feature (109)..(109): n is a, c, g, or t
  misc_feature (111)..(111): n is a, c, g, or t
  misc_feature (113)..(113): n is a, c, g, or t
  misc_feature (115)..(115): n is a, c, g, or t
  misc_feature (117)..(117): n is a, c, g, or t
  misc_feature (122)..(123): n is a, c, g, or t
  misc_feature (128)..(130): n is a, c, g, or t
  misc_feature (136)..(137): n is a, c, g, or t
  misc_feature (143)..(143): n is a, c, g, or t
  misc_feature (147)..(149): n is a, c, g, or t
  misc_feature (153)..(154): n is a, c, g, or t
  misc_feature (156)..(158): n is a, c, g, or t
  misc_feature (160)..(160): n is a, c, g, or t
  misc_feature (163)..(163): n is a, c, g, or t
  misc_feature (165)..(165): n is a, c, g, or t
  misc_feature (169)..(170): n is a, c, g, or t
  misc_feature (172)..(173): n is a, c, g, or t
  misc_feature (176)..(176): n is a, c, g, or t
  misc_feature (178)..(178): n is a, c, g, or t
  misc_feature (185)..(185): n is a, c, g, or t
  misc_feature (187)..(187): n is a, c, g, or t
  misc_feature (193)..(193): n is a, c, g, or t
  misc_feature (195)..(195): n is a, c, g, or t
  misc_feature (207)..(211): n is a, c, g, or t
  misc_feature (213)..(213): n is a, c, g, or t
  misc_feature (218)..(219): n is a, c, g, or t
  misc_feature (221)..(221): n is a, c, g, or t
  misc_feature (233)..(233): n is a, c, g, or t
  misc_feature (236)..(236): n is a, c, g, or t
  misc_feature (238)..(239): n is a, c, g, or t
  misc_feature (243)..(244): n is a, c, g, or t
  misc_feature (247)..(247): n is a, c, g, or t
  misc_feature (249)..(249): n is a, c, g, or t
  misc_feature (251)..(254): n is a, c, g, or t
  misc_feature (256)..(256): n is a, c, g, or t
  misc_feature (259)..(259): n is a, c, g, or t
  misc_feature (263)..(263): n is a, c, g, or t
  misc_feature (265)..(265): n is a, c, g, or t
  misc_feature (267)..(268): n is a, c, g, or t
  misc_feature (271)..(271): n is a, c, g, or t
  misc_feature (273)..(273): n is a, c, g, or t
  misc_feature (276)..(277): n is a, c, g, or t
  misc_feature (279)..(279): n is a, c, g, or t
  misc_feature (282)..(282): n is a, c, g, or t
  misc_feature (284)..(284): n is a, c, g, or t
  misc_feature (287)..(288): n is a, c, g, or t
  misc_feature (290)..(290): n is a, c, g, or t
  misc_feature (292)..(293): n is a, c, g, or t
  misc_feature (296)..(296): n is a, c, g, or t
  misc_feature (298)..(299): n is a, c, g, or t
  misc_feature (308)..(308): n is a, c, g, or t
  misc_feature (310)..(310): n is a, c, g, or t
  misc_feature (312)..(313): n is a, c, g, or t
  misc_feature (315)..(315): n is a, c, g, or t
  misc_feature (319)..(320): n is a, c, g, or t
  misc_feature (328)..(328): n is a, c, g, or t
  misc_feature (335)..(335): n is a, c, g, or t
  misc_feature (337)..(337): n is a, c, g, or t
  misc_feature (344)..(344): n is a, c, g, or t
  misc_feature (347)..(347): n is a, c, g, or t
  misc_feature (355)..(358): n is a, c, g, or t
  misc_feature (361)..(361): n is a, c, g, or t
  misc_feature (363)..(364): n is a, c, g, or t
  misc_feature (371)..(371): n is a, c, g, or t
  misc_feature (375)..(377): n is a, c, g, or t
  misc_feature (379)..(379): n is a, c, g, or t
  misc_feature (381)..(381): n is a, c, g, or t
  misc_feature (385)..(385): n is a, c, g, or t
  misc_feature (387)..(387): n is a, c, g, or t
  misc_feature (389)..(390): n is a, c, g, or t
  misc_feature (392)..(392): n is a, c, g, or t
  misc_feature (394)..(394): n is a, c, g, or t
  misc_feature (398)..(400): n is a, c, g, or t
  misc_feature (404)..(404): n is a, c, g, or t
  misc_feature (407)..(407): n is a, c, g, or t
  misc_feature (412)..(414): n is a, c, g, or t
  misc_feature (416)..(418): n is a, c, g, or t
  misc_feature (422)..(422): n is a, c, g, or t
  misc_feature (424)..(424): n is a, c, g, or t
  misc_feature (431)..(431): n is a, c, g, or t
  misc_feature (433)..(433): n is a, c, g, or t
  misc_feature (438)..(439): n is a, c, g, or t
  misc_feature (442)..(442): n is a, c, g, or t
  misc_feature (444)..(446): n is a, c, g, or t
  misc_feature (451)..(451): n is a, c, g, or t
  misc_feature (453)..(455): n is a, c, g, or t
  misc_feature (457)..(461): n is a, c, g, or t
  misc_feature (466)..(467): n is a, c, g, or t
  misc_feature (469)..(471): n is a, c, g, or t
  misc_feature (473)..(474): n is a, c, g, or t
  misc_feature (476)..(480): n is a, c, g, or t
  misc_feature (483)..(487): n is a, c, g, or t
  misc_feature (489)..(491): n is a, c, g, or t
  misc_feature (498)..(498): n is a, c, g, or t
  misc_feature (500)..(501): n is a, c, g, or t
  misc_feature (505)..(506): n is a, c, g, or t
  misc_feature (510)..(512): n is a, c, g, or t
  misc_feature (514)..(516): n is a, c, g, or t
  misc_feature (519)..(520): n is a, c, g, or t
  misc_feature (522)..(526): n is a, c, g, or t
  misc_feature (528)..(528): n is a, c, g, or t
  misc_feature (530)..(533): n is a, c, g, or t
  misc_feature (535)..(535): n is a, c, g, or t
  misc_feature (537)..(537): n is a, c, g, or t
  misc_feature (540)..(540): n is a, c, g, or t
  misc_feature (542)..(543): n is a, c, g, or t
  misc_feature (546)..(546): n is a, c, g, or t
  misc_feature (548)..(548): n is a, c, g, or t
  misc_feature (557)..(557): n is a, c, g, or t
  misc_feature (560)..(562): n is a, c, g, or t
  misc_feature (564)..(566): n is a, c, g, or t
  misc_feature (568)..(568): n is a, c, g, or t
  misc_feature (572)..(574): n is a, c, g, or t
  misc_feature (578)..(578): n is a, c, g, or t
  misc_feature (580)..(580): n is a, c, g, or t
  misc_feature (589)..(589): n is a, c, g, or t
  misc_feature (593)..(593): n is a, c, g, or t
  misc_feature (595)..(595): n is a, c, g, or t
  misc_feature (597)..(599): n is a, c, g, or t
  misc_feature (601)..(601): n is a, c, g, or t
  misc_feature (604)..(605): n is a, c, g, or t
  misc_feature (612)..(612): n is a, c, g, or t
  misc_feature (619)..(619): n is a, c, g, or t
  misc_feature (622)..(623): n is a, c, g, or t
  misc_feature (630)..(630): n is a, c, g, or t
  misc_feature (632)..(633): n is a, c, g, or t
  misc_feature (636)..(637): n is a, c, g, or t
  misc_feature (640)..(642): n is a, c, g, or t
  misc_feature (645)..(645): n is a, c, g, or t
  misc_feature (649)..(649): n is a, c, g, or t
  misc_feature (651)..(651): n is a, c, g, or t
  misc_feature (654)..(654): n is a, c, g, or t
  misc_feature (656)..(658): n is a, c, g, or t
  misc_feature (660)..(660): n is a, c, g, or t
  misc_feature (662)..(665): n is a, c, g, or t
  misc_feature (672)..(672): n is a, c, g, or t
  misc_feature (674)..(675): n is a, c, g, or t
  misc_feature (679)..(680): n is a, c, g, or t
  misc_feature (683)..(683): n is a, c, g, or t
  misc_feature (686)..(686): n is a, c, g, or t
  misc_feature (688)..(688): n is a, c, g, or t
  misc_feature (691)..(691): n is a, c, g, or t
  misc_feature (695)..(696): n is a, c, g, or t
  misc_feature (699)..(699): n is a, c, g, or t
  misc_feature (704)..(704): n is a, c, g, or t
  misc_feature (707)..(707): n is a, c, g, or t
  misc_feature (718)..(719): n is a, c, g, or t
  misc_feature (723)..(723): n is a, c, g, or t
  misc_feature (725)..(725): n is a, c, g, or t
  misc_feature (727)..(731): n is a, c, g, or t
  misc_feature (734)..(735): n is a, c, g, or t
  misc_feature (739)..(739): n is a, c, g, or t
  misc_feature (741)..(741): n is a, c, g, or t
  misc_feature (744)..(744): n is a, c, g, or t
  misc_feature (747)..(747): n is a, c, g, or t
  misc_feature (749)..(749): n is a, c, g, or t
  misc_feature (752)..(752): n is a, c, g, or t
  misc_feature (755)..(755): n is a, c, g, or t
  misc_feature (762)..(764): n is a, c, g, or t
  misc_feature (766)..(766): n is a, c, g, or t
  misc_feature (769)..(769): n is a, c, g, or t
  misc_feature (771)..(771): n is a, c, g, or t
  misc_feature (779)..(779): n is a, c, g, or t
  misc_feature (783)..(784): n is a, c, g, or t
  misc_feature (787)..(788): n is a, c, g, or t
  misc_feature (790)..(790): n is a, c, g, or t
  misc_feature (792)..(792): n is a, c, g, or t
  misc_feature (795)..(796): n is a, c, g, or t
  misc_feature (801)..(803): n is a, c, g, or t
  misc_feature (806)..(807): n is a, c, g, or t
  misc_feature (810)..(814): n is a, c, g, or t
  misc_feature (816)..(816): n is a, c, g, or t
  misc_feature (820)..(820): n is a, c, g, or t
  misc_feature (824)..(825): n is a, c, g, or t
  misc_feature (827)..(827): n is a, c, g, or t
  misc_feature (829)..(829): n is a, c, g, or t
  misc_feature (832)..(832): n is a, c, g, or t
  misc_feature (835)..(835): n is a, c, g, or t
  misc_feature (841)..(841): n is a, c, g, or t
  misc_feature (845)..(845): n is a, c, g, or t
  misc_feature (848)..(848): n is a, c, g, or t
  misc_feature (852)..(852): n is a, c, g, or t
  misc_feature (856)..(856): n is a, c, g, or t
  misc_feature (860)..(860): n is a, c, g, or t
  misc_feature (864)..(864): n is a, c, g, or t
  misc_feature (870)..(871): n is a, c, g, or t
  misc_feature (877)..(877): n is a, c, g, or t
  misc_feature (880)..(880): n is a, c, g, or t
  misc_feature (884)..(884): n is a, c, g, or t
  misc_feature (888)..(888): n is a, c, g, or t
  misc_feature (895)..(895): n is a, c, g, or t
  misc_feature (897)..(898): n is a, c, g, or t
  misc_feature (908)..(908): n is a, c, g, or t
  misc_feature (910)..(910): n is a, c, g, or t
  misc_feature (912)..(912): n is a, c, g, or t
  misc_feature (916)..(916): n is a, c, g, or t
  misc_feature (918)..(919): n is a, c, g, or t
  misc_feature (927)..(931): n is a, c, g, or t
  misc_feature (935)..(935): n is a, c, g, or t
  misc_feature (937)..(938): n is a, c, g, or t
  misc_feature (940)..(940): n is a, c, g, or t
  misc_feature (943)..(943): n is a, c, g, or t
  misc_feature (946)..(946): n is a, c, g, or t
  misc_feature (955)..(956): n is a, c, g, or t
  misc_feature (958)..(958): n is a, c, g, or t
  misc_feature (962)..(963): n is a, c, g, or t
  misc_feature (969)..(970): n is a, c, g, or t
  misc_feature (973)..(976): n is a, c, g, or t
  misc_feature (979)..(979): n is a, c, g, or t
  misc_feature (987)..(987): n is a, c, g, or t
  misc_feature (993)..(993): n is a, c, g, or t
  misc_feature (995)..(995): n is a, c, g, or t
  misc_feature (999)..(999): n is a, c, g, or t
  misc_feature (1002)..(1003): n is a, c, g, or t
  misc_feature (1007)..(1007): n is a, c, g, or t
  misc_feature (1009)..(1009): n is a, c, g, or t
  misc_feature (1011)..(1011): n is a, c, g, or t
  misc_feature (1016)..(1019): n is a, c, g, or t
  misc_feature (1023)..(1023): n is a, c, g, or t
  misc_feature (1026)..(1026): n is a, c, g, or t
  misc_feature (1031)..(1032): n is a, c, g, or t
  misc_feature (1037)..(1037): n is a, c, g, or t
  misc_feature (1039)..(1039): n is a, c, g, or t
  misc_feature (1043)..(1043): n is a, c, g, or t
  misc_feature (1050)..(1051): n is a, c, g, or t
  misc_feature (1053)..(1053): n is a, c, g, or t
  misc_feature (1057)..(1057): n is a, c, g, or t
  misc_feature (1063)..(1063): n is a, c, g, or t
  misc_feature (1068)..(1068): n is a, c, g, or t
  misc_feature (1071)..(1072): n is a, c, g, or t
  misc_feature (1076)..(1076): n is a, c, g, or t
  misc_feature (1080)..(1080): n is a, c, g, or t
  misc_feature (1082)..(1082): n is a, c, g, or t
  misc_feature (1092)..(1092): n is a, c, g, or t
  misc_feature (1095)..(1095): n is a, c, g, or t
  misc_feature (1099)..(1099): n is a, c, g, or t
  misc_feature (1104)..(1104): n is a, c, g, or t
  misc_feature (1112)..(1114): n is a, c, g, or t
  misc_feature (1118)..(1118): n is a, c, g, or t
  misc_feature (1120)..(1120): n is a, c, g, or t
  misc_feature (1129)..(1129): n is a, c, g, or t
  misc_feature (1131)..(1132): n is a, c, g, or t
  misc_feature (1134)..(1136): n is a, c, g, or t
  misc_feature (1139)..(1139): n is a, c, g, or t
  misc_feature (1144)..(1144): n is a, c, g, or t
  misc_feature (1149)..(1150): n is a, c, g, or t
  misc_feature (1157)..(1158): n is a, c, g, or t
  misc_feature (1160)..(1160): n is a, c, g, or t
  misc_feature (1162)..(1162): n is a, c, g, or t
  misc_feature (1165)..(1165): n is a, c, g, or t
  misc_feature (1167)..(1167): n is a, c, g, or t
  misc_feature (1169)..(1171): n is a, c, g, or t
  misc_feature (1173)..(1175): n is a, c, g, or t
  misc_feature (1178)..(1178): n is a, c, g, or t
  misc_feature (1181)..(1182): n is a, c, g, or t
  misc_feature (1184)..(1184): n is a, c, g, or t
  misc_feature (1190)..(1190): n is a, c, g, or t
  misc_feature (1193)..(1194): n is a, c, g, or t
  misc_feature (1196)..(1196): n is a, c, g, or t
  misc_feature (1210)..(1210): n is a, c, g, or t
  misc_feature (1218)..(1218): n is a, c, g, or t
  misc_feature (1220)..(1220): n is a, c, g, or t
  misc_feature (1222)..(1222): n is a, c, g, or t
  misc_feature (1224)..(1224): n is a, c, g, or t
  misc_feature (1226)..(1226): n is a, c, g, or t
  misc_feature (1243)..(1243): n is a, c, g, or t
tttttacaattatatnaaaanttnannnatntattnnaananttnnttnnnnntntnannnattnttatatatnttaatnnnntantttnnnnatatnaatnannnttngnanantntattnnatttnnnaataannatttanaatnnntttnnannntnctntntatnntnntanantattttnanttattntntattaatatatnnnnnantttannanaatataattaantanannttannatntntnnnnanttnattnantnntantnaanntnttnanttnntnannttnannttatttttntntnntntatnntaatattnattttantntattttnatntattttannnnaantnnaaaaaantttnnntntntttntntnnantntatnnntatnatnaatannntnnnatantnataaatntnattannaanannnaagantnnnannnnnaacannannnannannnnngannnnnannnatcatanannatannaatnnntnnnatnntnnnnnantnnnntnantantnnaantnatataatanaannntnnnanaaannnaaantnatattaatnatananannntnaannaaatatnttaatantannaaaaaantnnatnntannnttntaantnaancnnnanannnnataatananntatnnatnaancnatnaatnnaanaattnaantattaatatanntatnanannnnnaannaaantntantantnaanaanaaaatannntnaanantaataaanttcnnttnnananaannaatannnaannaannnnnanaaanaaannananatnttnaagganaaanaanaaanatanaaanaaanaaaaannaaaaanaanaaanaaanaaaaaanannaaaaaaaatnananaaanannaaaaaaannnnnatananntnaanaanaataaatannantaannataaannaannnntanaataatanaaaaananatanatnnattnananataannnnatanaanaaaannttatntnaaanaaaaaanntntatntataanattanatnnattntttnanaataattaanttntttnaattnaatttatnnnattnantatatattnanntnnnaantaatnaattnnaataaannantnttnantnnnannnaanaannanaaatanatnnanaaaatatataaaanatttatanantnananaaatattttttttaganattaaaaaaaaaaaaaaaaaactattcataaataatcatgaatataaagaatgaaagttaaatgcataatttttttatttttattaattgacattactttctttataatatttatcaagtagtatataattataattattgaaaagtatattgaatatttatatatattttacattccatttttattggagtattatgtaattttaactttattactaatacttttaataaaaatattatttaatttcttaactcttatttaatttactttattcatttatttatttagatacatagatagttaataagttttagatagttattaatatatttattcattgatttattgatttattgctttatatagagattatttattgatttattaaattatagaattattggattatttataggaaatattaaaattaacttataaaatgttaatagttataataattaaatattaaacgctataccatttttagataaaagttttttatataaaaatttaacttaatagttcattaattttggaataatgatttattcatttacattacaaattaattaaaaaccaataattttggtttaacgtgtgctcacatgctcatgattaatgagttattataatagtttagtaatgttaattgaaacgttacacatacaatacagaattcttagtatttatttatcaatacttcatagcttttgttaaacgttgaataaaacgtttttttaaagtattttttttttttttttttttttaaaaaaaaaaaatactataatttgctactgttctaatttgagtaaattttctattattaatacatgtccttcaaaaattttctttaatacataattcaaaaatatgacataaattaggtgttcatttaataaacttattaaaatataacattaaagaaaaaataaatatatataattaaaactattgctataatatattattagctgattaaatatatataatagtatagcttaatatacattagtatatgtaataataaaaaaaaatataaaaattaaaaatattttataataaacttttaaagaattttaaaaaataatatatattgttaagcataattcataatatatgtaatatattttaaatatatttatataaacaattttttaaaagttataaactgactgaagattcgttgttttttattattttcaatttaccaatataaatttacattaaattcaaataaataaataaaattctgtttcctgttactcaaaaaatatatatataattttattataatatattttattgaatatatgtttaatatatgtataatataatatattgcaatatattgaaataaaattaatggcattacttagaattgattattaaaaaggaaattttgtaaatacatgaaaagaatgaaatggtacaaagagttttcatatcaaataaaaaaatttttttaatctatataagcatatagtatatgatagtcacatcataaataataaaattatgttgataattcatataactatgatgctgtttcattaaaattttatcacaataatttccaataaaaaattcataaaacatttaaaaaaatactaatctatttatattagaatctagtgtgtttagcaatagtgcattcacaacgtggcgtattttttgtatgtggcttactttttatataattaaataaataattaatattctttttatatatatataatttattaatattcaattgtaaaaataattttttataaaaaaaaatgatattttataattcttttttaatagaatatattattattacccattttcatattaacatattctaacctagtatttctattctaaattagataatttagaatgaataaaataatttatacattacattaattctttaaattcgacttaaatattgtaaagataatttcttaaatgtatttgtaatctaataatttcctcattttatttccggtgagtaccgctattggtttcagcccaccttcaggggcaatgggaatattgaagttagtcacgcatttacatataggcataattttccctactagacgatcttaccaagcattcagcattggggctctgatattcatattattgctgtaaattttcaagtaccctttttctcggagtgctctcctaacttccctttgtaacgagaggttagtataacctaacccatggagatctgtactagctagattggtaattacattaacgtcagaaaaattgcaatttagtagaataaccaagtagaatatttcttaaatagacacatgaaatcatatatccgaatgataattcccttgcaatatattagatgacagtacttgcgcaactctctcaggcccacagttaggacagtatcttgtctatattatttgaatacttttcctcacaaaactaattctttaatattacatcactaatattggatgtatctaagatatcttttataatataacggtttatatataccatttatatgacggaagcctttctcttgaaaggtgatattataccattttaattagtgtgctgttttttatattactttcaattataattctctttgaagattgatgttcgtttgttttgtagttttaacgataactattaaaattaagtcataatcttaaggtattaaaattgattacatttgtagctaattatattattctagtcatttaaacttattagtaaatagtataaattgtttc

SEQ ID NO: 391 - DNA, 4000 bp, Escherichia coli
  misc_feature (28)..(28): n is a, c, g, or t
  misc_feature (42)..(42): n is a, c, g, or t
  misc_feature (50)..(50): n is a, c, g, or t
  misc_feature (70)..(70): n is a, c, g, or t
  misc_feature (81)..(81): n is a, c, g, or t
  misc_feature (97)..(97): n is a, c, g, or t
  misc_feature (121)..(121): n is a, c, g, or t
  misc_feature (124)..(124): n is a, c, g, or t
  misc_feature (156)..(156): n is a, c, g, or t
  misc_feature (199)..(199): n is a, c, g, or t
  misc_feature (309)..(310): n is a, c, g, or t
  misc_feature (367)..(367): n is a, c, g, or t
  misc_feature (412)..(412): n is a, c, g, or t
  misc_feature (520)..(520): n is a, c, g, or t
  misc_feature (553)..(553): n is a, c, g, or t
  misc_feature (571)..(571): n is a, c, g, or t
  misc_feature (592)..(592): n is a, c, g, or t
  misc_feature (640)..(640): n is a, c, g, or t
  misc_feature (646)..(646): n is a, c, g, or t
  misc_feature (649)..(649): n is a, c, g, or t
  misc_feature (910)..(910): n is a, c, g, or t
  misc_feature (936)..(936): n is a, c, g, or t
  misc_feature (1003)..(1003): n is a, c, g, or t
  misc_feature (1066)..(1066): n is a, c, g, or t
  misc_feature (1129)..(1129): n is a, c, g, or t
  misc_feature (1438)..(1438): n is a, c, g, or t
  misc_feature (1567)..(1567): n is a, c, g, or t
  misc_feature (2274)..(2274): n is a, c, g, or t
  misc_feature (2473)..(2473): n is a, c, g, or t
  misc_feature (2584)..(2584): n is a, c, g, or t
  misc_feature (2907)..(2907): n is a, c, g, or t
  misc_feature (2913)..(2913): n is a, c, g, or t
  misc_feature (2916)..(2916): n is a, c, g, or t
  misc_feature (3114)..(3114): n is a, c, g, or t
  misc_feature (3135)..(3135): n is a, c, g, or t
  misc_feature (3404)..(3404): n is a, c, g, or t
  misc_feature (3580)..(3580): n is a, c, g, or t
  misc_feature (3618)..(3618): n is a, c, g, or t
  misc_feature (3759)..(3759): n is a, c, g, or t
  misc_feature (3800)..(3800): n is a, c, g, or t
ttctttagatccgctagcagtaaatgcnataaaatttaaatnatctttanctactaatgtataaaaatcntttatctgagncattaacttttcatcntctttggtttcgtttaaatcatangcnatcaaccaaaagctataatttttatcatttanaacagaatctgttaaattaacatcatccaaagagtttaccatnaaatcagttatttttggaggattaatcgcatcatgtattaatttattatttgttgcttcccatttccaatttaaagtatcttcccatattttagatttcatataatcagnntgattaaactcttttaactcatcagtttttaagtttttataaactaacattgattcntaaactgcatctttataatctgcagcttttttcatattttctttnatgttcattcctggggcatatgctctaaaatctaaaggcggtaaatttcggtaagcataaattgggaaccaaaaagctaaaaccacagctaatgtaaataaagcaccngatgccattggagcgaaagtttcttttatattntctttaccagaaaataanagtgtaattaatactaataangcaatgtctttccaaaaactttcccaaggttttaattttaaaaaatcnccaaancanccacaatgggttactttattataacatgcagaataaaaagttaaaaaggtaaaaaaagcaatttgagcaaataaaagccataaagttaaatcacgtttgaaaccaattaataacataatgcctaaaataatttcactggcacaaataattattgccaaaggcaaagcgatatgagcaaacatctcaaaaaaagccatacccgtatcggcctgaaatacttcgaagtattcctttaatttataactaaaacctaaaggatcnttagctttaataaagcctgaaaaaanaaataaagctccaactaaaattctagatatatgtgttagaagagttatttttcctatatatccagangcattgattaaaaataattgaataatcaataaaacagataaaataattttactaaaacaaggngggcatagaaaataaaataatgctgctaatccggcagaccaaatgaaccgaaataatttagangataaaatttttttcatatattataatttacaatcttaataaaaaaattaaacttactaatttttacatttaatcaaggcgaaaacagaataatttatcatatccatataattagcatcaacgccctcactaataatggttttaccttcattgtcttctatttgtttaacacgaaaaactttcattaaaattaaatcagttatagaactcatcctcatgtccctccacgcttctccataatcatgatttttatcttccattaattgcttagtttgtttaatatatttattgtataggccttcgacttcnttgtaaggaatatcaatacgcgcatcatcatacagctctatttgaataagagcaattacacaataattaataatgccaacatattctccatttatagcgtcgctaattttttgaattcctttttcttcnatacttttaatgcgttgagctttaataaaaatttgatcggttaaagattttggtcttaaatttcgccaagcggttccatagtcgttcattttctttaaaaagatatctttgcatatcgcaattgcttcgtcgtaatgttgagatgtactttgcataatttatatgaacactaaaattaacgaaaaaaaaacaattgaatattcttgtaatgggaaaattataaaatttaataagccattaataatgagtattgttaatattaccccagatagcttttatgacggtggcaaatatgactcagaatctgatgtattaaaagatgttgaagaaaaaataaattctggggccaatattattgatattggagcatcttcaacgaggccgaattcagacgaaataactgaaaaagaagaatggaagagattaaaagatgttttaatttcggttcgtgctaattttcctgatattttattaagtgtagatacttatcgagcatctgttgcaaaaaaaagtgccgaacatggtatagatattattaatgatattagtgggggtaatttagattcattaatgtttaaaactgttgctgatttaaacattccatatattttaatgcacattcagggcaagcctaaaacaatgcaaaacaatcccaaatatttaaacgtagtggaagaagttaaaaaagattttgaatcaaaaattantcaattaataaatttaggattcaataaaataattttagacccaggatttggatttggaaaatcacttgaaaataattatcaattattaaaaagtcttaatatttttagcagttttaattaccctatactagctggagtttctcgaaaaagtatgattaatcgtgttattggcaccaatcctgttactgccttaaacggnacaactgtcttaaataccattgccttgcaaaatggcgcgtctatattaagagttcacgatgctttcgaagctaaacaagctattgaattagttgagttttataaatcttgntaagaggattaattttaaaactttgagcctataaaaaaataaattaattttataaaatgtataaaaaaatatttttttctttcttgttactttcttttacaattattatattttcttttaaatcaaaaactacttacgcttatcaaattgccttattaaaatataatggtggtggagattggtatgccaatttagaaacatcgctccctaacctaataaaattttgtaatgataatttaaaaacggcaattaatcctgaacaagctattgccgatgcaggaagtattgaaatttttaattatccatttattcatatgactggncatggnaangttattttttcgaatcaagaggctgaaaatttaagaaattatatgcttgccgggggattcttacatataagtgataattatggcatggatagttttatacgtattcaattaaaaaaaatatttcctgaattagatttaatagaattaccttttagccatcccatttatcatcaaaaatatgagtttccaaaaggcctncctaaaattcatgaacatganaaaaaggctccacaaggatttggattaatatataaaggtaaattaatttgcttttatgattttgaatgcgatttaggtgatggctgggaaagtcaagaaattcataatgatagccaagaggcaagaaataatgccttaaaaatgggcgctaatattatttcttatgcctttatgaattttgaaaaaaaataatttatacgtttatattcgtgatcaaatttttaaaacaattaaatttattaaaaataactctaggcatacttttattntttttattcacaaacaccatcgctcaaaactatatcgtgagtgggataataaaaggcggtcatgaaaatcttgcttttgcaacgatctatttaaaaggaactactaaaggagtaaatagtaatgatgccggaaattattctttaaaattagaaaaaggaatacacacacttgtatntaaatatataggttattcaaaacaagaaatcgaaatanatttaaccgaaaataaaatattaaatgttaatttaatccccgaaggagttctgcttcaagaagtaaccattaaatctggcgaagacccctcttacgccataattcgaaaagctatcaaaaaacgtaaattttattttaatnaagttaaagaatatagttgccagtcatacattaaaggactncaacgcttaaatcacgtgcctgaaaaaattaaaaagctgattaaatttactaccggcgaaaaaatagattcttctcaacttggcgtaatttatttaagtgaaagtgaaagtaattacttttttcaaaaaccaaataaagaaaaagaaataatgtttagtagtaaaataagtggcgaaaacaaaaattttagctttaatca

SEQ ID NO: 392 - DNA, 4000 bp, Escherichia coli
  misc_feature (12)..(13): n is a, c, g, or t
  misc_feature (19)..(20): n is a, c, g, or t
  misc_feature (26)..(27): n is a, c, g, or t
  misc_feature (29)..(30): n is a, c, g, or t
  misc_feature (34)..(34): n is a, c, g, or t
  misc_feature (37)..(37): n is a, c, g, or t
  misc_feature (43)..(43): n is a, c, g, or t
  misc_feature (46)..(46): n is a, c, g, or t
  misc_feature (48)..(48): n is a, c, g, or t
  misc_feature (50)..(50): n is a, c, g, or t
  misc_feature (56)..(56): n is a, c, g, or t
  misc_feature (64)..(64): n is a, c, g, or t
  misc_feature (69)..(71): n is a, c, g, or t
  misc_feature (73)..(74): n is a, c, g, or t
  misc_feature (80)..(80): n is a, c, g, or t
  misc_feature (82)..(82): n is a, c, g, or t
  misc_feature (84)..(85): n is a, c, g, or t
  misc_feature (89)..(89): n is a, c, g, or t
  misc_feature (115)..(115): n is a, c, g, or t
  misc_feature (119)..(120): n is a, c, g, or t
  misc_feature (128)..(130): n is a, c, g, or t
  misc_feature (135)..(135): n is a, c, g, or t
  misc_feature (137)..(138): n is a, c, g, or t
  misc_feature (143)..(143): n is a, c, g, or t
  misc_feature (146)..(146): n is a, c, g, or t
  misc_feature (150)..(150): n is a, c, g, or t
  misc_feature (152)..(154): n is a, c, g, or t
  misc_feature (158)..(162): n is a, c, g, or t
  misc_feature (169)..(171): n is a, c, g, or t
  misc_feature (174)..(174): n is a, c, g, or t
  misc_feature (176)..(177): n is a, c, g, or t
  misc_feature (185)..(186): n is a, c, g, or t
  misc_feature (196)..(197): n is a, c, g, or t
  misc_feature (199)..(199): n is a, c, g, or t
  misc_feature (205)..(205): n is a, c, g, or t
  misc_feature (207)..(207): n is a, c, g, or t
  misc_feature (220)..(220): n is a, c, g, or t
  misc_feature (222)..(223): n is a, c, g, or t
  misc_feature (229)..(229): n is a, c, g, or t
  misc_feature (233)..(233): n is a, c, g, or t
  misc_feature (236)..(236): n is a, c, g, or t
  misc_feature (238)..(238): n is a, c, g, or t
  misc_feature (242)..(242): n is a, c, g, or t
  misc_feature (249)..(249): n is a, c, g, or t
  misc_feature (261)..(261): n is a, c, g, or t
  misc_feature (263)..(263): n is a, c, g, or t
  misc_feature (265)..(265): n is a, c, g, or t
  misc_feature (272)..(272): n is a, c, g, or t
  misc_feature (276)..(276): n is a, c, g, or t
  misc_feature (284)..(284): n is a, c, g, or t
  misc_feature (288)..(288): n is a, c, g, or t
  misc_feature (293)..(293): n is a, c, g, or t
  misc_feature (295)..(295): n is a, c, g, or t
  misc_feature (305)..(306): n is a, c, g, or t
  misc_feature (309)..(309): n is a, c, g, or t
  misc_feature (316)..(316): n is a, c, g, or t
  misc_feature (321)..(321): n is a, c, g, or t
  misc_feature (328)..(328): n is a, c, g, or t
  misc_feature (330)..(330): n is a, c, g, or t
  misc_feature (337)..(337): n is a, c, g, or t
  misc_feature (340)..(340): n is a, c, g, or t
  misc_feature (344)..(344): n is a, c, g, or t
  misc_feature (348)..(348): n is a, c, g, or t
  misc_feature (350)..(350): n is a, c, g, or t
  misc_feature (352)..(352): n is a, c, g, or t
  misc_feature (354)..(354): n is a, c, g, or t
  misc_feature (356)..(358): n is a, c, g, or t
  misc_feature (363)..(363): n is a, c, g, or t
  misc_feature (367)..(371): n is a, c, g, or t
  misc_feature (373)..(373): n is a, c, g, or t
  misc_feature (380)..(380): n is a, c, g, or t
  misc_feature (383)..(383): n is a, c, g, or t
  misc_feature (385)..(385): n is a, c, g, or t
  misc_feature (401)..(401): n is a, c, g, or t
  misc_feature (403)..(403): n is a, c, g, or t
  misc_feature (417)..(417): n is a, c, g, or t
  misc_feature (422)..(422): n is a, c, g, or t
  misc_feature (428)..(428): n is a, c, g, or t
  misc_feature (430)..(430): n is a, c, g, or t
  misc_feature (432)..(432): n is a, c, g, or t
  misc_feature (435)..(436): n is a, c, g, or t
  misc_feature (439)..(441): n is a, c, g, or t
  misc_feature (444)..(444): n is a, c, g, or t
  misc_feature (446)..(446): n is a, c, g, or t
  misc_feature (450)..(450): n is a, c, g, or t
  misc_feature (452)..(455): n is a, c, g, or t
  misc_feature (457)..(457): n is a, c, g, or t
  misc_feature (464)..(469): n is a, c, g, or t
  misc_feature (471)..(472): n is a, c, g, or t
  misc_feature (475)..(477): n is a, c, g, or t
  misc_feature (479)..(481): n is a, c, g, or t
  misc_feature (483)..(485): n is a, c, g, or t
  misc_feature (488)..(491): n is a, c, g, or t
  misc_feature (493)..(496): n is a, c, g, or t
  misc_feature (499)..(503): n is a, c, g, or t
  misc_feature (508)..(508): n is a, c, g, or t
  misc_feature (511)..(513): n is a, c, g, or t
  misc_feature (517)..(520): n is a, c, g, or t
  misc_feature (524)..(524): n is a, c, g, or t
  misc_feature (528)..(530): n is a, c, g, or t
  misc_feature (532)..(533): n is a, c, g, or t
  misc_feature (539)..(545): n is a, c, g, or t
  misc_feature (547)..(547): n is a, c, g, or t
  misc_feature (551)..(561): n is a, c, g, or t
  misc_feature (563)..(563): n is a, c, g, or t
  misc_feature (565)..(566): n is a, c, g, or t
  misc_feature (568)..(569): n is a, c, g, or t
  misc_feature (571)..(571): n is a, c, g, or t
  misc_feature (573)..(574): n is a, c, g, or t
  misc_feature (576)..(576): n is a, c, g, or t
  misc_feature (578)..(579): n is a, c, g, or t
  misc_feature (581)..(582): n is a, c, g, or t
  misc_feature (584)..(585): n is a, c, g, or t
  misc_feature (588)..(588): n is a, c, g, or t
  misc_feature (591)..(591): n is a, c, g, or t
  misc_feature (593)..(593): n is a, c, g, or t
  misc_feature (595)..(595): n is a, c, g, or t
  misc_feature (597)..(597): n is a, c, g, or t
  misc_feature (599)..(599): n is a, c, g, or t
  misc_feature (601)..(601): n is a, c, g, or t
  misc_feature (603)..(603): n is a, c, g, or t
  misc_feature (606)..(606): n is a, c, g, or t
  misc_feature (610)..(610): n is a, c, g, or t
  misc_feature (612)..(612): n is a, c, g, or t
  misc_feature (614)..(614): n is a, c, g, or t
  misc_feature (616)..(616): n is a, c, g, or t
  misc_feature (618)..(619): n is a, c, g, or t
  misc_feature (625)..(625): n is a, c, g, or t
  misc_feature (628)..(630): n is a, c, g, or t
  misc_feature (632)..(634): n is a, c, g, or t
  misc_feature (636)..(643): n is a, c, g, or t
  misc_feature (646)..(647): n is a, c, g, or t
  misc_feature (649)..(651): n is a, c, g, or t
  misc_feature (653)..(656): n is a, c, g, or t
  misc_feature (658)..(659): n is a, c, g, or t
  misc_feature (662)..(667): n is a, c, g, or t
  misc_feature (669)..(669): n is a, c, g, or t
  misc_feature (671)..(671): n is a, c, g, or t
  misc_feature (673)..(673): n is a, c, g, or t
  misc_feature (675)..(678): n is a, c, g, or t
  misc_feature (680)..(680): n is a, c, g, or t
  misc_feature (682)..(684): n is a, c, g, or t
  misc_feature (686)..(686): n is a, c, g, or t
  misc_feature (688)..(688): n is a, c, g, or t
  misc_feature (692)..(692): n is a, c, g, or t
  misc_feature (694)..(695): n is a, c, g, or t
  misc_feature (697)..(697): n is a, c, g, or t
  misc_feature (704)..(705): n is a, c, g, or t
  misc_feature (707)..(713): n is a, c, g, or t
  misc_feature (715)..(716): n is a, c, g, or t
  misc_feature (719)..(719): n is a, c, g, or t
  misc_feature (721)..(722): n is a, c, g, or t
  misc_feature (725)..(728): n is a, c, g, or t
  misc_feature (730)..(730): n is a, c, g, or t
  misc_feature (732)..(743): n is a, c, g, or t
  misc_feature (745)..(756): n is a, c, g, or t
  misc_feature (758)..(758): n is a, c, g, or t
  misc_feature (760)..(761): n is a, c, g, or t
  misc_feature (763)..(764): n is a, c, g, or t
  misc_feature (766)..(767): n is a, c, g, or t
  misc_feature (769)..(771): n is a, c, g, or t
  misc_feature (775)..(777): n is a, c, g, or t
  misc_feature (779)..(781): n is a, c, g, or t
  misc_feature (784)..(789): n is a, c, g, or t
  misc_feature (793)..(796): n is a, c, g, or t
  misc_feature (798)..(798): n is a, c, g, or t
  misc_feature (800)..(805): n is a, c, g, or t
  misc_feature (807)..(819): n is a, c, g, or t
  misc_feature (822)..(823): n is a, c, g, or t
  misc_feature (825)..(832): n is a, c, g, or t
  misc_feature (834)..(865): n is a, c, g, or t
  misc_feature (867)..(874): n is a, c, g, or t
  misc_feature (876)..(882): n is a, c, g, or t
  misc_feature (884)..(898): n is a, c, g, or t
  misc_feature (900)..(902): n is a, c, g, or t
  misc_feature (905)..(905): n is a, c, g, or t
  misc_feature (909)..(911): n is a, c, g, or t
  misc_feature (914)..(914): n is a, c, g, or t
  misc_feature (917)..(920): n is a, c, g, or t
  misc_feature (1992)..(1992): n is a, c, g, or t
tctcgcacgcgnngcgcgnntcccgnnanncgcncgngtgcgnggngngngggcgnggggcgcnccgcnnncnngtgtcncntnncgcngcggcgcgccgcgcgcgccgcgcgcncgcnncgcgcggnnngcggncnngcgcncancgcncnnncccnnnnncgtctcnnntcntnntgtctccnnttcgcccccnngngtcgcncngcgctcgggcgcncnngtgcgncgcncgngncccncgcgcgnggcgcgggcgtncngngggcgcntctngggggcgngagnggcgngngggaggcgcnngcngcgcgcnggcgnggggcgngncgcgcgngtntcgngagngncncngnnncgcgncgcnnnnncnccgcgcngcngncgccggggcgcgccgngngcgcgccccgggcncgcanccgggncncncannggnnntcngngcgngnnnngngcgcggnnnnnncnncgnnngnnncnnnggnnnngnnnnggnnnnncgcgngcnnngcgnnnncccngcgnnncnnccgcgnnnnnnncncgcnnnnnnnnnnngngnngnngncnngngnngnngnngcngcngngngncncncncgnggcncncncncnncgcggngcnnncnnngnnnnnnnncgnngnnncnnnngnngcnnnnnngngncncnnnngngnnngngngcgngnngngcgcgcnngnnnnnnncnnggngnngcnnnngngnnnnnnnnnnnngnnnnnnnnnnnngngnngnngnncnnngcgnnngnnncgnnnnnngcgnnnngngnnnnnntnnnnnnnnnnnnnaannannnnnnnnannnnnnnnnnnnnnnnnnnnnnnnnnnnnnnntnnnnnnnngnnnnnnncnnnnnnnnnnnnnnncnnnccnagannnccnctnnnnaacgaaaacggcggacgacaacggctcttccgacgcgagcctttcccactgacgctcgcgcggcggagacgcgtgcgtcgcgtgggcgtatcggcggaccccgcgcgaggttttgcgcggtgcgcgacgtagacgtgtccgagcgacgttcgcgcgggcgaacatggcgcggtgactcgggacgtcacccgtggctcgatccctccgacgaaaagacggtgccaagatcttctcgccgtgagcgaacatggcgagcgtgggtccgtccccgtccaaccccgccgggggtgaatcagaaacccccccgggggtgcgcatgatcatcggcggctacgacgtgcgcttcccgttcaagccgtacgcctcgcagatcggcatcgccagccgcgtcttgaaggcgctcgacacgggaacgaacgcgttgttagaatcgcccaccgggtctgggaaatcgctcgcgctgctgtgcgcggcgatggcgtggcaggagcgctggaaggccacgcgagaagccgcggacgcgcacggtgacgcgcgcgacgtggagaggcacgaccggtgcgcagaggccgagcccactgatcgagcgtcaaagccctccggcggcggcaaaaaggaaaaggtgcctcgcgtctactacgcgactcgcacgcactcgcagatcgcgcaggtcgtgcgcgagctgaaacgcaccgcgtaccggcccacgatgaccgtcctggggtcgagggagcactactgcgtgaaccagaaagcccggaacgcggcgatgaagggcgggaacctgggcgaggagtgtaagtccctgcttgaagccgccgggcgccgcaagcgcggtggcttcgaggaggacgaagacgaaaccgaaaacgacgctccggcgcgctccggcgggtgcgggtacagccacggcgctctgaagctcgcgggcaaggcgtcacgtccgggtgccgagcccttggacatcgaggacctggtgacgctcgggaagaagacgcgcgggtgtccttacttcgcggcgaaacacgcgcacgaaaccgccgagctcgtgttttgcccgtacaactacctnctggacccgtccgtccgcgcggcgatggacgtggacgtcgccggcgcgctggtcatcctggacgaggcgcacaacgtcgaggacactgcccgggaggctgcgagctgcgacgtgcacttgcacgacctgcgagcggcggcggaggagttcgagcgcgtcgcggcggcggaagccgccgacgcggcttccccccgcgggcccgacgtttccgccgccgacggcgccgcggcgacttcgcccgacgtttccgggcatcgcgcgcgagactcgggccacgcgcttttggcgcgcgtcgcgggctccgtcgcgcggtggctgcacggcgcgtccgaccaggacaacccgcggtgccccctgcgcccgcacggcttcgagcggtggatggcggtgtggtcggggggcgccaacgtccagaggcagctccgcgacgcgggcctcgccgtcgagacgctcgcgtccgtcgagcgcgcgcggagcgccgccgtgaaagccgcgaacgactccagcacgcccggcgctctgcgcgtgagcggccacgcgctgaagacggtggaggtgctgctgacgtccgcgcggtacgcgctggccggcggcggcggaaacgtcgggcggagcgcggatgacttccggctcgccgtgcagaaacggttcgacgagccggttccgcggaagcgcggaagcgtctcgtccgacgaaacgcttctgcgtgacggaggcgtctcgttcgacgccgcgaaggtcaccctttccctgtgggccttgaacccggctctggcgttcgcggacatcgccggagcgcgggacgagcgcgggacgaacgcactcgcgcgctcggtggttctcacctccgggacgctcgcgccgctggactcgttcgcctccgagctgggcgcgccgtttccgatccgcatggaggcgccgcactgcgtggacgtgcagacgcaggtgtggtgcggcgcggtggccgcgggcgcgagcggcacgcgcctcagcggcacgttcaagacctccgtggagttttcgtaccaggacgacctcgggggctcgctcgagaagtggtgcctcgagatcccgcacggcgtgctggtgtttttccccagctactcgctgctggaccgcgtcgcgcagcgatggaagagcacgggcgcctggcgccgcctcgagcaggccacggggaagaagctgttccaggagcccagggggggcggcggaggcggaggcggcgggcgaggcaaaggccggggcagccgcgggggccgaggcggcggcggcgagaaaaacgccctcgaatcgcttttgtccaagtattaccgcgcggtgcggatgagcgcggcggcggcgccgcacgcgcacgcggcggcgcccgtcggttcgccgtgccgcggtgccgtgctcctggcggtgtgccgcgggaaggtctccgagggcatcgacttcgcggacgcgaacgcgcgcggcgtggtggtggtgggcatcccctaccccaacctgaaggacaagcaggtggagctcaagcgcaagtacaacgacgagaaaaacgccaagaaccgcgccggcgtcttgtccggcgaccagtggtactcgcagcaggcgtttcgcgcgctcaaccaggcggtgggcaggtgcttgaggcacaggaacgaccacggcgccgtgctgctggtcgacgagaggtacgcgcacggcgcgaacgacgcgctcgtgcggaacctccccaagtggctcaggccggcgacgcggaagtgcgcggacttcgacgcgtccgtcgcggggttgcgcgcgtttttcagcctcaaagcgaaacacgcgccgccggaagccgcgcgcgcgccgccaccggcgaagctgctcccctcggtgggcgcggagaaggacgcgaaggagagggacggcgggggcgggaaagggggcggcaagccgaaggacagcaaggaagccgcggcggatgcgagacagcgcgacataaagcggttcttccagccggcggcggcggcgacggacgcgctcg

SEQ ID NO: 393 - DNA, 4000 bp, Escherichia coli
  misc_feature (1)..(15): n is a, c, g, or t
  misc_feature (17)..(20): n is a, c, g, or t
  misc_feature (22)..(22): n is a, c, g, or t
  misc_feature (24)..(25): n is a, c, g, or t
  misc_feature (27)..(30): n is a, c, g, or t
  misc_feature (32)..(35): n is a, c, g, or t
  misc_feature (37)..(43): n is a, c, g, or t
  misc_feature (45)..(45): n is a, c, g, or t
  misc_feature (48)..(48): n is a, c, g, or t
  misc_feature (50)..(54): n is a, c, g, or t
  misc_feature (58)..(62): n is a, c, g, or t
  misc_feature (64)..(64): n is a, c, g, or t
  misc_feature (66)..(66): n is a, c, g, or t
  misc_feature (68)..(69): n is a, c, g, or t
  misc_feature (71)..(72): n is a, c, g, or t
  misc_feature (76)..(77): n is a, c, g, or t
  misc_feature (79)..(83): n is a, c, g, or t
  misc_feature (85)..(89): n is a, c, g, or t
  misc_feature (91)..(91): n is a, c, g, or t
  misc_feature (94)..(95): n is a, c, g, or t
  misc_feature (98)..(101): n is a, c, g, or t
  misc_feature (103)..(103): n is a, c, g, or t
  misc_feature (105)..(109): n is a, c, g, or t
  misc_feature (111)..(115): n is a, c, g, or t
  misc_feature (118)..(121): n is a, c, g, or t
  misc_feature (125)..(126): n is a, c, g, or t
  misc_feature (128)..(132): n is a, c, g, or t
  misc_feature (134)..(137): n is a, c, g, or t
  misc_feature (139)..(140): n is a, c, g, or t
  misc_feature (142)..(148): n is a, c, g, or t
  misc_feature (150)..(151): n is a, c, g, or t
  misc_feature (153)..(154): n is a, c, g, or t
  misc_feature (157)..(163): n is a, c, g, or t
  misc_feature (165)..(167): n is a, c, g, or t
  misc_feature (170)..(171): n is a, c, g, or t
  misc_feature (175)..(176): n is a, c, g, or t
  misc_feature (179)..(179): n is a, c, g, or t
  misc_feature (181)..(182): n is a, c, g, or t
  misc_feature (184)..(186): n is a, c, g, or t
  misc_feature (188)..(190): n is a, c, g, or t
  misc_feature (193)..(193): n is a, c, g, or t
  misc_feature (195)..(195): n is a, c, g, or t
  misc_feature (197)..(200): n is a, c, g, or t
  misc_feature (203)..(205): n is a, c, g, or t
  misc_feature (208)..(211): n is a, c, g, or t
  misc_feature (213)..(215): n is a, c, g, or t
  misc_feature (219)..(224): n is a, c, g, or t
  misc_feature (226)..(229): n is a, c, g, or t
  misc_feature (232)..(234): n is a, c, g, or t
  misc_feature (236)..(236): n is a, c, g, or t
  misc_feature (238)..(239): n is a, c, g, or t
  misc_feature (241)..(245): n is a, c, g, or t
  misc_feature (247)..(253): n is a, c, g, or t
  misc_feature (256)..(260): n is a, c, g, or t
  misc_feature (262)..(262): n is a, c, g, or t
  misc_feature (264)..(264): n is a, c, g, or t
  misc_feature (266)..(267): n is a, c, g, or t
  misc_feature (269)..(270): n is a, c, g, or t
  misc_feature (272)..(274): n is a, c, g, or t
  misc_feature (276)..(277): n is a, c, g, or t
  misc_feature (280)..(280): n is a, c, g, or t
  misc_feature (282)..(282): n is a, c, g, or t
  misc_feature (284)..(287): n is a, c, g, or t
  misc_feature (290)..(290): n is a, c, g, or t
  misc_feature (292)..(297): n is a, c, g, or t
  misc_feature (299)..(299): n is a, c, g, or t
  misc_feature (301)..(307): n is a, c, g, or t
  misc_feature (309)..(309): n is a, c, g, or t
  misc_feature (311)..(313): n is a, c, g, or t
  misc_feature (315)..(319): n is a, c, g, or t
  misc_feature (321)..(321): n is a, c, g, or t
  misc_feature (324)..(325): n is a, c, g, or t
  misc_feature (327)..(328): n is a, c, g, or t
  misc_feature (330)..(331): n is a, c, g, or t
  misc_feature (333)..(337): n is a, c, g, or t
  misc_feature (340)..(340): n is a, c, g, or t
  misc_feature (342)..(342): n is a, c, g, or t
  misc_feature (344)..(344): n is a, c, g, or t
  misc_feature (346)..(347): n is a, c, g, or t
  misc_feature (349)..(349): n is a, c, g, or t
  misc_feature (354)..(360): n is a, c, g, or t
  misc_feature (365)..(368): n is a, c, g, or t
  misc_feature (371)..(373): n is a, c, g, or t
  misc_feature (375)..(381): n is a, c, g, or t
  misc_feature (383)..(386): n is a, c, g, or t
  misc_feature (388)..(389): n is a, c, g, or t
  misc_feature (391)..(391): n is a, c, g, or t
  misc_feature (395)..(400): n is a, c, g, or t
  misc_feature (403)..(408): n is a, c, g, or t
  misc_feature (410)..(412): n is a, c, g, or t
  misc_feature (414)..(416): n is a, c, g, or t
  misc_feature (420)..(421): n is a, c, g, or t
  misc_feature (423)..(426): n is a, c, g, or t
  misc_feature (429)..(429): n is a, c, g, or t
  misc_feature (432)..(433): n is a, c, g, or t
  misc_feature (436)..(439): n is a, c, g, or t
  misc_feature (441)..(441): n is a, c, g, or t
  misc_feature (448)..(450): n is a, c, g, or t
  misc_feature (452)..(455): n is a, c, g, or t
  misc_feature (460)..(460): n is a, c, g, or t
  misc_feature (467)..(467): n is a, c, g, or t
  misc_feature (596)..(597): n is a, c, g, or t
  misc_feature (599)..(599): n is a, c, g, or t
  misc_feature (1242)..(1242): n is a, c, g, or t
  misc_feature (1245)..(1245): n is a, c, g, or t
  misc_feature (1263)..(1263): n is a, c, g, or t
  misc_feature (1269)..(1269): n is a, c, g, or t
  misc_feature (1284)..(1284): n is a, c, g, or t
  misc_feature (1323)..(1323): n is a, c, g, or t
  misc_feature (1339)..(1339): n is a, c, g, or t
  misc_feature (1341)..(1341): n is a, c, g, or t
  misc_feature (1449)..(1449): n is a, c, g, or t
  misc_feature (1514)..(1514): n is a, c, g, or t
  misc_feature (1987)..(1987): n is a, c, g, or t
  misc_feature (1990)..(1990): n is a, c, g, or t
  misc_feature (1997)..(1998): n is a, c, g, or t
  misc_feature (2207)..(2207): n is a, c, g, or t
  misc_feature (2447)..(2447): n is a, c, g, or t
  misc_feature (2483)..(2483): n is a, c, g, or t
  misc_feature (2494)..(2494): n is a, c, g, or t
  misc_feature (2690)..(2691): n is a, c, g, or t
  misc_feature (2696)..(2696): n is a, c, g, or t
  misc_feature (2698)..(2700): n is a, c, g, or t
  misc_feature (2702)..(2702): n is a, c, g, or t
  misc_feature (2709)..(2709): n is a, c, g, or t
  misc_feature (2712)..(2715): n is a, c, g, or t
  misc_feature (2717)..(2720): n is a, c, g, or t
  misc_feature (2722)..(2723): n is a, c, g, or t
  misc_feature (2725)..(2726): n is a, c, g, or t
  misc_feature (2729)..(2737): n is a, c, g, or t
  misc_feature (2740)..(2751): n is a, c, g, or t
  misc_feature (2753)..(2755): n is a, c, g, or t
  misc_feature (2758)..(2758): n is a, c, g, or t
  misc_feature (2760)..(2766): n is a, c, g, or t
  misc_feature (2768)..(2775): n is a, c, g, or t
  misc_feature (2777)..(2777): n is a, c, g, or t
  misc_feature (2781)..(2790): n is a, c, g, or t
  misc_feature (2792)..(2794): n is a, c, g, or t
  misc_feature (2796)..(2796): n is a, c, g, or t
  misc_feature (2798)..(2800): n is a, c, g, or t
  misc_feature (2802)..(2802): n is a, c, g, or t
  misc_feature (2804)..(2807): n is a, c, g, or t
  misc_feature (2811)..(2811): n is a, c, g, or t
  misc_feature (2813)..(2813): n is a, c, g, or t
  misc_feature (2816)..(2816): n is a, c, g, or t
  misc_feature (2819)..(2819): n is a, c, g, or t
  misc_feature (2821)..(2821): n is a, c, g, or t
  misc_feature (2823)..(2824): n is a, c, g, or t
  misc_feature (2831)..(2832): n is a, c, g, or t
  misc_feature (2834)..(2834): n is a, c, g, or t
  misc_feature (2838)..(2839): n is a, c, g, or t
  misc_feature (2842)..(2842): n is a, c, g, or t
  misc_feature (2849)..(2850): n is a, c, g, or t
  misc_feature (2852)..(2855): n is a, c, g, or t
  misc_feature (2858)..(2862): n is a, c, g, or t
  misc_feature (2865)..(2866): n is a, c, g, or t
  misc_feature (2869)..(2871): n is a, c, g, or t
  misc_feature (2873)..(2873): n is a, c, g, or t
  misc_feature (2876)..(2877): n is a, c, g, or t
  misc_feature (2880)..(2882): n is a, c, g, or t
  misc_feature (2884)..(2888): n is a, c, g, or t
  misc_feature (2890)..(2890): n is a, c, g, or t
  misc_feature (2892)..(2893): n is a, c, g, or t
  misc_feature (2895)..(2896): n is a, c, g, or t
  misc_feature (2898)..(2898): n is a, c, g, or t
  misc_feature (2901)..(2904): n is a, c, g, or t
  misc_feature (2908)..(2917): n is a, c, g, or t
  misc_feature (2919)..(2919): n is a, c, g, or t
  misc_feature (2921)..(2924): n is a, c, g, or t
  misc_feature (2927)..(2936): n is a, c, g, or t
  misc_feature (2939)..(2939): n is a, c, g, or t
  misc_feature (2941)..(2942): n is a, c, g, or t
  misc_feature (2945)..(2950): n is a, c, g, or t
  misc_feature (2952)..(2960): n is a, c, g, or t
  misc_feature (2962)..(2963): n is a, c, g, or t
  misc_feature (2965)..(2965): n is a, c, g, or t
  misc_feature (2967)..(2969): n is a, c, g, or t
  misc_feature (2973)..(2974): n is a, c, g, or t
  misc_feature (2977)..(2979): n is a, c, g, or t
  misc_feature (2981)..(2985): n is a, c, g, or t
  misc_feature (2987)..(2989): n is a, c, g, or t
  misc_feature (2991)..(2991): n is a, c, g, or t
  misc_feature (2993)..(2996): n is a, c, g, or t
  misc_feature (2999)..(2999): n is a, c, g, or t
  misc_feature (3001)..(3001): n is a, c, g, or t
  misc_feature (3005)..(3005): n is a, c, g, or t
  misc_feature (3007)..(3008): n is a, c, g, or t
  misc_feature (3011)..(3015): n is a, c, g, or t
  misc_feature (3017)..(3017): n is a, c, g, or t
  misc_feature (3019)..(3021): n is a, c, g, or t
  misc_feature (3023)..(3024): n is a, c, g, or t
  misc_feature (3026)..(3027): n is a, c, g, or t
  misc_feature (3031)..(3034): n is a, c, g, or t
  misc_feature (3038)..(3046): n is a, c, g, or t
  misc_feature (3048)..(3048): n is a, c, g, or t
  misc_feature (3050)..(3052): n is a, c, g, or t
  misc_feature (3054)..(3058): n is a, c, g, or t
  misc_feature (3060)..(3060): n is a, c, g, or t
  misc_feature (3062)..(3063): n is a, c, g, or t
  misc_feature (3065)..(3067): n is a, c, g, or t
  misc_feature (3069)..(3069): n is a, c, g, or t
  misc_feature (3071)..(3072): n is a, c, g, or t
  misc_feature (3074)..(3076): n is a, c, g, or t
  misc_feature (3078)..(3078): n is a, c, g, or t
  misc_feature (3080)..(3085): n is a, c, g, or t
  misc_feature (3091)..(3110): n is a, c, g, or t
  misc_feature (3112)..(3115): n is a, c, g, or t
  misc_feature (3119)..(3120): n is a, c, g, or t
  misc_feature (3122)..(3122): n is a, c, g, or t
  misc_feature (3125)..(3130): n is a, c, g, or t
  misc_feature (3133)..(3134): n is a, c, g, or t
  misc_feature (3136)..(3136): n is a, c, g, or t
  misc_feature (3139)..(3140): n is a, c, g, or t
  misc_feature (3142)..(3142): n is a, c, g, or t
  misc_feature (3144)..(3148): n is a, c, g, or t
  misc_feature (3150)..(3155): n is a, c, g, or t
  misc_feature (3157)..(3157): n is a, c, g, or t
  misc_feature (3159)..(3161): n is a, c, g, or t
  misc_feature (3163)..(3165): n is a, c, g, or t
  misc_feature (3168)..(3170): n is a, c, g, or t
  misc_feature (3172)..(3172): n is a, c, g, or t
  misc_feature (3175)..(3175): n is a, c, g, or t
  misc_feature (3177)..(3178): n is a, c, g, or t
  misc_feature (3180)..(3180): n is a, c, g, or t
  misc_feature (3182)..(3186): n is a, c, g, or t
  misc_feature (3189)..(3190): n is a, c, g, or t
  misc_feature (3192)..(3194): n is a, c, g, or t
  misc_feature (3196)..(3197): n is a, c, g, or t
  misc_feature (3199)..(3202): n is a, c, g, or t
  misc_feature (3204)..(3204): n is a, c, g, or t
  misc_feature (3206)..(3206): n is a, c, g, or t
  misc_feature (3208)..(3208): n is a, c, g, or t
  misc_feature (3210)..(3210): n is a, c, g, or t
  misc_feature (3214)..(3220): n is a, c, g, or t
  misc_feature (3222)..(3223): n is a, c, g, or t
  misc_feature (3225)..(3225): n is a, c, g, or t
  misc_feature (3228)..(3229): n is a, c, g, or t
  misc_feature (3233)..(3236): n is a, c, g, or t
  misc_feature (3241)..(3246): n is a, c, g, or t
  misc_feature (3249)..(3252): n is a, c, g, or t
  misc_feature (3254)..(3262): n is a, c, g, or t
  misc_feature (3264)..(3264): n is a, c, g, or t
  misc_feature (3268)..(3271): n is a, c, g, or t
  misc_feature (3273)..(3273): n is a, c, g, or t
  misc_feature (3275)..(3277): n is a, c, g, or t
  misc_feature (3280)..(3280): n is a, c, g, or t
  misc_feature (3282)..(3283): n is a, c, g, or t
  misc_feature (3285)..(3292): n is a, c, g, or t
  misc_feature (3294)..(3295): n is a, c, g, or t
  misc_feature (3299)..(3300): n is a, c, g, or t
  misc_feature (3302)..(3309): n is a, c, g, or t
  misc_feature (3312)..(3317): n is a, c, g, or t
  misc_feature (3319)..(3319): n is a, c, g, or t
  misc_feature (3321)..(3322): n is a, c, g, or t
  misc_feature (3327)..(3327): n is a, c, g, or t
  misc_feature (3329)..(3329): n is a, c, g, or t
  misc_feature (3331)..(3331): n is a, c, g, or t
  misc_feature (3333)..(3336): n is a, c, g, or t
  misc_feature (3338)..(3339): n is a, c, g, or t
  misc_feature (3343)..(3343): n is a, c, g, or t
  misc_feature (3347)..(3347): n is a, c, g, or t
  misc_feature (3349)..(3351): n is a, c, g, or t
  misc_feature (3353)..(3358): n is a, c, g, or t
  misc_feature (3360)..(3360): n is a, c, g, or t
  misc_feature (3362)..(3364): n is a, c, g, or t
  misc_feature (3367)..(3368): n is a, c, g, or t
  misc_feature (3370)..(3370): n is a, c, g, or t
  misc_feature (3374)..(3374): n is a, c, g, or t
  misc_feature (3377)..(3379): n is a, c, g, or t
  misc_feature (3384)..(3384): n is a, c, g, or t
  misc_feature (3386)..(3387): n is a, c, g, or t
  misc_feature (3389)..(3391): n is a, c, g, or t
  misc_feature (3393)..(3396): n is a, c, g, or t
  misc_feature (3398)..(3401): n is a, c, g, or t
  misc_feature (3403)..(3407): n is a, c, g, or t
  misc_feature (3409)..(3414): n is a, c, g, or t
  misc_feature (3418)..(3425): n is a, c, g, or t
  misc_feature (3427)..(3427): n is a, c, g, or t
  misc_feature (3429)..(3429): n is a, c, g, or t
  misc_feature (3431)..(3433): n is a, c, g, or t
  misc_feature (3435)..(3437): n is a, c, g, or t
  misc_feature (3439)..(3448): n is a, c, g, or t
  misc_feature (3451)..(3453): n is a, c, g, or t
  misc_feature (3456)..(3456): n is a, c, g, or t
  misc_feature (3458)..(3459): n is a, c, g, or t
  misc_feature (3461)..(3461): n is a, c, g, or t
  misc_feature (3463)..(3463): n is a, c, g, or t
  misc_feature (3466)..(3467): n is a, c, g, or t
  misc_feature (3471)..(3475): n is a, c, g, or t
  misc_feature (3477)..(3477): n is a, c, g, or t
  misc_feature (3481)..(3484): n is a, c, g, or t
  misc_feature (3486)..(3487): n is a, c, g, or t
  misc_feature (3489)..(3490): n is a, c, g, or t
  misc_feature (3493)..(3494): n is a, c, g, or t
  misc_feature (3496)..(3497): n is a, c, g, or t
  misc_feature (3500)..(3505): n is a, c, g, or t
  misc_feature (3508)..(3517): n is a, c, g, or t
  misc_feature (3519)..(3519): n is a, c, g, or t
  misc_feature (3521)..(3522): n is a, c, g, or t
  misc_feature (3524)..(3524): n is a, c, g, or t
  misc_feature (3527)..(3530): n is a, c, g, or t
  misc_feature (3532)..(3534): n is a, c, g, or t
  misc_feature (3536)..(3536): n is a, c, g, or t
  misc_feature (3538)..(3539): n is a, c, g, or t
  misc_feature (3541)..(3560): n is a, c, g, or t
  misc_feature (3562)..(3563): n is a, c, g, or t
  misc_feature (3565)..(3574): n is a, c, g, or t
  misc_feature (3578)..(3579): n is a, c, g, or t
  misc_feature (3581)..(3581): n is a, c, g, or t
  misc_feature (3583)..(3584): n is a, c, g, or t
  misc_feature (3587)..(3587): n is a, c, g, or t
  misc_feature (3589)..(3593): n is a, c, g, or t
  misc_feature (3595)..(3596): n is a, c, g, or t
  misc_feature (3598)..(3599): n is a, c, g, or t
  misc_feature (3601)..(3601): n is a, c, g, or t
  misc_feature (3603)..(3606): n is a, c, g, or t
  misc_feature (3609)..(3616): n is a, c, g, or t
  misc_feature (3618)..(3619): n is a, c, g, or t
  misc_feature (3621)..(3625): n is a, c, g, or t
  misc_feature (3627)..(3628): n is a, c, g, or t
  misc_feature (3630)..(3639): n is a, c, g, or t
  misc_feature (3641)..(3653): n is a, c, g, or t
  misc_feature (3655)..(3662): n is a, c, g, or t
  misc_feature (3664)..(3664): n is a, c, g, or t
  misc_feature (3666)..(3669): n is a, c, g, or t
  misc_feature (3671)..(3672): n is a, c, g, or t
  misc_feature (3674)..(3677): n is a, c, g, or t
  misc_feature (3679)..(3681): n is a, c, g, or t
  misc_feature (3686)..(3692): n is a, c, g, or t
  misc_feature (3694)..(3695): n is a, c, g, or t
  misc_feature (3697)..(3697): n is a, c, g, or t
  misc_feature (3699)..(3709): n is a, c, g, or t
  misc_feature (3711)..(3717): n is a, c, g, or t
  misc_feature (3719)..(3719): n is a, c, g, or t
  misc_feature (3721)..(3729): n is a, c, g, or t
  misc_feature (3731)..(3732): n is a, c, g, or t
  misc_feature (3734)..(3734): n is a, c, g, or t
  misc_feature (3737)..(3737): n is a, c, g, or t
  misc_feature (3739)..(3741): n is a, c, g, or t
  misc_feature (3743)..(3755): n is a, c, g, or t
  misc_feature (3757)..(3758): n is a, c, g, or t
  misc_feature (3760)..(3763): n is a, c, g, or t
  misc_feature (3765)..(3765): n is a, c, g, or t
  misc_feature (3767)..(3768): n is a, c, g, or t
  misc_feature (3770)..(3772): n is a, c, g, or t
  misc_feature (3774)..(3780): n is a, c, g, or t
  misc_feature (3782)..(3784): n is a, c, g, or t
  misc_feature (3786)..(3786): n is a, c, g, or t
  misc_feature (3789)..(3791): n is a, c, g, or t
  misc_feature (3793)..(3806): n is a, c, g, or t
  misc_feature (3809)..(3809): n is a, c, g, or t
  misc_feature (3811)..(3818): n is a, c, g, or t
  misc_feature (3820)..(3823): n is a, c, g, or t
  misc_feature (3825)..(3825): n is a, c, g, or t
  misc_feature (3828)..(3828): n is a, c, g, or t
  misc_feature (3832)..(3832): n is a, c, g, or t
  misc_feature (3834)..(3835): n is a, c, g, or t
  misc_feature (3838)..(3843): n is a, c, g, or t
  misc_feature (3845)..(3858): n is a, c, g, or t
  misc_feature (3861)..(3863): n is a, c, g, or t
  misc_feature (3865)..(3865): n is a, c, g, or t
  misc_feature (3867)..(3872): n is a, c, g, or t
  misc_feature (3874)..(3874): n is a, c, g, or t
  misc_feature (3876)..(3876): n is a, c, g, or t
  misc_feature (3878)..(3879): n is a, c, g, or t
  misc_feature (3881)..(3882): n is a, c, g, or t
  misc_feature (3884)..(3884): n is a, c, g, or t
  misc_feature (3886)..(3888): n is a, c, g, or t
  misc_feature (3890)..(3891): n is a, c, g, or t
  misc_feature (3894)..(3906): n is a, c, g, or t
  misc_feature (3908)..(3912): n is a, c, g, or t
  misc_feature (3914)..(3914): n is a, c, g, or t
  misc_feature (3916)..(3934): n is a, c, g, or t
  misc_feature (3936)..(3941): n is a, c, g, or t
  misc_feature (3943)..(3943): n is a, c, g, or t
  misc_feature (3945)..(3948): n is a, c, g, or t
  misc_feature (3950)..(3954): n is a, c, g, or t
  misc_feature (3956)..(3959): n is a, c, g, or t
  misc_feature (3961)..(3963): n is a, c, g, or t
  misc_feature (3965)..(3969): n is a, c, g, or t
  misc_feature (3971)..(3972): n is a, c, g, or t
  misc_feature (3975)..(3979): n is a, c, g, or t
  misc_feature (3984)..(3987): n is a, c, g, or t
  misc_feature (3989)..(3989): n is a, c, g, or t
  misc_feature (3991)..(3992): n is a, c, g, or t
  misc_feature (3994)..(3995): n is a, c, g, or t
  misc_feature (3997)..(3997): n is a, c, g, or t
nnnnnnnnnnnnnnnannnnantnnannnnannnnannnnnnnanaanannnnnagannnnntncnannannattnnannnnntnnnnnanaanntannnngnannnnnannnnnaannnnatanntnnnnnannnntnnannnnnnngnngnnaannnnnnnannnatnntttnnctntnncnnnannnctnancnnnnaannnaannnntnnnacannnnnntnnnnagnnntnanncnnnnngnnnnnnnacnnnnntncngnncnngnnngnnatntnannnnatncnnnnnncnannnnnnnancnnncnnnnntntgnngnnanntnnnnntanangnanntncaatnnnnnnnggctnnnntgnnntnnnnnnntnnnncnntncttnnnnnncannnnnnannnannncacnntnnnntgntannttnnnntnacgaaannnannnnaaagnaattgancctataccggtcataagagaattgataagaaacaaagccgatgttatcaagtcaacaaaagtagttgatttttattgtagaaataaaaaagataaaggtagattatacattgtcattctatacgaatannanaacgatgaaataatcggtatagatgtattttttgacaagtacaaacaaaaaaagggaggaacccaatgccgaaagaaaaagaaaccttattcgacattgcagcgcagaagagagaagctgaagagcttgctcggtcgcttgcagaactagacctcaacgcagaagacgttgagcaacaattggcagaaatccaagccaagctaataaagaagataaatagtttggatttcgtgtatattaaacttgatgctgaaattgaacagctgaaaatctataaggaactgtatcaagatgagctcaagaaaatcaatagcaagatggaaagtattgagaagagcaaagaccgccttcttcagatgttggcagacgcaaagctagttgatgtgaataagcccctgcgtactcagtatcacacttattcgcttaccaaaacttatggtggtgtagaaatagtagatgaagagctacttccaagtgactacattaaaacaaagattgagcagtatattgatactgcagccttgcggaatgacctcatggctggaaaagaaattccaggcgcagttcttccggtgaagatgaaggtaaggcgtcggtgagaatacttcgacaaatgatgctgaagaccgagtccctgatgtcncanaccatgacgtatgcaatnatgctnttcgaatcgatattntttggaataggagtctcttgctcaattattgttccgaanctgattaaagagtatntngatgacgaaaacaaagaatgcttcgtgtatcaaataatgtttcttggaatatttaacattgtctatatcataatagacgtagaaggagcatacaaatcatatagtttnggaatcggacttaccccgattacgccaatcttcacaataggatggagaaaatgagtgatacaaanatgtcaaagcgtgagaagcgctttcagaatattcttaacacgagaaaggatatgttctcggatgaagaaatcgagtttttgcaaaagaactttcgcagagtaattcctcaagaagagttactatcactccgagacaaagtcaatgtatatacttttgagaattgggtaatgacacatgagtctctcggaataaacgacttcatgaaaagtctttactatgcaattcagagtgatgaatcccaagaattacttatatcaaccgtttttgttctagctctggaatggagcagaggaaaaggagaaaaagatggcaacgaagacaaataagaaaccgagtgtcccaaaaagaaaggtgctatccttcgaaaagtttgtggacaccataaacaacgctccattgctcatgcaagcagtggatgatatgtttaacaagttcgcagatgaacttgatgagaaggaaataatcacaccanacnagcttgnntacaagatatatgaagagattgagaagaataacaatactcttatagctgtggtagctgcagtaacgatattcatgtctagcagaccacataaaggagaaagtaaaaatgacagtaattgatttcaactccgaaaacggaagaaagattcttacattgaatgaattcagtgatctacttaatgatggagaaacaattaaaggtgcactgnatcaattcgataaagacctttcgaaagaattaaacggacaaaagcttccaattgaagaattttgttaccgtgtgtatgaagagatcgaaaagaaaggtaacaccgccttcgaagtattcattataacgatggctgttttgtatggaaagataggaaaatgagtagcatcgttggtgttataataatcattctgcttctgatagtaatctacttctgtggaagaaaacttcagaagcttgnagaagcgaagagacgtcttaagaacttcaatgacgntctctgtattnaagtcagtcagtaccgggaacatttcttaaaagagaagaagaaaggcgatatgtatgacaagataataaaaaagtataagtacgctctcttctcttgtgcggactgtaagaagatagtctctaagaagaatacgcattggctggaagagaagccatattgcggaaagtgttatagaaaaaggaaagactcatgaannaaganannntnataatcngannnnannnngnnannaannnnnnnnntgnnnnnnnnnnnntnnngangnnnnnnntnnnnnnnntnattnnnnnnnnnntnnntngnnncnannnngatnanganganantnnaaggttnntngaanngtntaaaaannannnngcnnnnnttnncannnanaannttnnntnnnnngnannanntnctnnnncttnnnnnnnnnnantnnnntannnnnnnnnnatncnntannnnnngnnnnnnnnnanngngnnnaatnnctnnntnnnnncnnnangnnnntgnanggcnannatnnnnntncnnntnntnngaannnngagnnnnnnnnngnannnannnnngnannannngnanncnnntntnnnnnngaatgnnnnnnnnnnnnnnnnnnnnannnnaaanncnatnnnnnntgnntntgnnangnnnnngnnnnnnanannngnnnagnnncngcntnntnannnnnaanngnnngnnannnngntngnanactnnnnnnnanngntanngcannnnggaannnnnnctnnnnannnnnnnnnantttnnnnangnnnatnanngnnnnnnnngnnattnnannnnnnnnagnnnnnnananngaaangngngnnnnanngaangctngnnncnnnnnnantnnnganntnaaanagnnngctanannannntnnnnannnntnnnnnannnnnnaaannnnnnnntnanannngnnnannnnnnnnnnacnnntgnannancnganncaannnnnanttcnnnntnntnnatnnanntannnnnnacnnnnnnnnnngntnnanaannnntnnnantnngnnnnnnnnnnnnnnnnnnnntnntnnnnnnnnnnaagnnanannaangnnnnngnnanntntnnnnaannnnnnnnannannnnnanntnnnnnnnnnntnnnnnnnnnnnnnannnnnnnnancnnnntnncnnnntnnnaaagnnnnnnnannantnnnnnnnnnnngnnnnnnnantnnnnnnnnngnnanaanannngnnnnnnnnnnnnnanntnnnnananntnnntnnnnnnncnnngntannnannnnnnnnnnnnnnagntnnnnnnnntnnnncngtnctgnannttnnnnnncnnnnnnnnnnnnnntgnnntntnnnnnngnancnnannanannnannaannnnnnnnnnnnngnnnnntncnnnnnnnnnnnnnnnnnnntnnnnnngntnnnncnnnnnannnncnnntnnnnntnntgnnnnnatatnnnnananntnngnaag

SEQ ID NO: 394 - DNA, 4000 bp, Escherichia coli
  misc_feature (1967)..(1995): n is a, c, g, or t
  misc_feature (2043)..(2072): n is a, c, g, or t
  misc_feature (2120)..(2122): n is a, c, g, or t
  misc_feature (2124)..(2149): n is a, c, g, or t
  misc_feature (2197)..(2201): n is a, c, g, or t
  misc_feature (2203)..(2210): n is a, c, g, or t
  misc_feature (2212)..(2218): n is a, c, g, or t
  misc_feature (2220)..(2220): n is a, c, g, or t
  misc_feature (2223)..(2224): n is a, c, g, or t
  misc_feature (2226)..(2227): n is a, c, g, or t
  misc_feature (2229)..(2230): n is a, c, g, or t
  misc_feature (2232)..(2234): n is a, c, g, or t
  misc_feature (2237)..(2243): n is a, c, g, or t
  misc_feature (2246)..(2247): n is a, c, g, or t
  misc_feature (2249)..(2251): n is a, c, g, or t
  misc_feature (2256)..(2259): n is a, c, g, or t
  misc_feature (2261)..(2265): n is a, c, g, or t
  misc_feature (2267)..(2270): n is a, c, g, or t
  misc_feature (2272)..(2304): n is a, c, g, or t
  misc_feature (2306)..(2307): n is a, c, g, or t
  misc_feature (2309)..(2311): n is a, c, g, or t
  misc_feature (2314)..(2320): n is a, c, g, or t
  misc_feature (2323)..(2324): n is a, c, g, or t
  misc_feature (2326)..(2328): n is a, c, g, or t
  misc_feature (2333)..(2336): n is a, c, g, or t
  misc_feature (2338)..(2342): n is a, c, g, or t
  misc_feature (2344)..(2347): n is a, c, g, or t
  misc_feature (2349)..(2379): n is a, c, g, or t
  misc_feature (2381)..(2388): n is a, c, g, or t
  misc_feature (2390)..(2397): n is a, c, g, or t
  misc_feature (2400)..(2401): n is a, c, g, or t
  misc_feature (2403)..(2405): n is a, c, g, or t
  misc_feature (2409)..(2410): n is a, c, g, or t
  misc_feature (2412)..(2412): n is a, c, g, or t
  misc_feature (2414)..(2418): n is a, c, g, or t
  misc_feature (2420)..(2424): n is a, c, g, or t
  misc_feature (2426)..(2457): n is a, c, g, or t
  misc_feature (2459)..(2460): n is a, c, g, or t
  misc_feature (2462)..(2464): n is a, c, g, or t
  misc_feature (2467)..(2473): n is a, c, g, or t
  misc_feature (2476)..(2477): n is a, c, g, or t
  misc_feature (2480)..(2481): n is a, c, g, or t
  misc_feature (2486)..(2489): n is a, c, g, or t
  misc_feature (2491)..(2495): n is a, c, g, or t
  misc_feature (2497)..(2500): n is a, c, g, or t
  misc_feature (2502)..(2520): n is a, c, g, or t
  misc_feature (2522)..(2529): n is a, c, g, or t
  misc_feature (2531)..(2534): n is a, c, g, or t
  misc_feature (2536)..(2537): n is a, c, g, or t
  misc_feature (2539)..(2541): n is a, c, g, or t
  misc_feature (2544)..(2550): n is a, c, g, or t
  misc_feature (2553)..(2554): n is a, c, g, or t
  misc_feature (2556)..(2558): n is a, c, g, or t
  misc_feature (2563)..(2566): n is a, c, g, or t
  misc_feature (2568)..(2572): n is a, c, g, or t
  misc_feature (2574)..(2577): n is a, c, g, or t
  misc_feature (2579)..(2579): n is a, c, g, or t
  misc_feature (2581)..(2611): n is a, c, g, or t
  misc_feature (2614)..(2614): n is a, c, g, or t
  misc_feature (2616)..(2618): n is a, c, g, or t
  misc_feature (2621)..(2623): n is a, c, g, or t
  misc_feature (2625)..(2627): n is a, c, g, or t
  misc_feature (2630)..(2631): n is a, c, g, or t
  misc_feature (2633)..(2635): n is a, c, g, or t
  misc_feature (2640)..(2640): n is a, c, g, or t
  misc_feature (2642)..(2643): n is a, c, g, or t
  misc_feature (2645)..(2649): n is a, c, g, or t
  misc_feature (2651)..(2652): n is a, c, g, or t
  misc_feature (2654)..(2654): n is a, c, g, or t
  misc_feature (2656)..(2656): n is a, c, g, or t
  misc_feature (2658)..(2661): n is a, c, g, or t
  misc_feature (2663)..(2688): n is a, c, g, or t
  misc_feature (2690)..(2690): n is a, c, g, or t
  misc_feature (2693)..(2694): n is a, c, g, or t
  misc_feature (2698)..(2704): n is a, c, g, or t
  misc_feature (2707)..(2707): n is a, c, g, or t
  misc_feature (2710)..(2712): n is a, c, g, or t
  misc_feature (2717)..(2719): n is a, c, g, or t
  misc_feature (2722)..(2726): n is a, c, g, or t
  misc_feature (2728)..(2730): n is a, c, g, or t
  misc_feature (2733)..(2733): n is a, c, g, or t
  misc_feature (2735)..(2737): n is a, c, g, or t
  misc_feature (2739)..(2740): n is a, c, g, or t
  misc_feature (2743)..(2743): n is a, c, g, or t
  misc_feature (2745)..(2746): n is a, c, g, or t
  misc_feature (2748)..(2750): n is a, c, g, or t
  misc_feature (2753)..(2753): n is a, c, g, or t
  misc_feature (2755)..(2765): n is a, c, g, or t
  misc_feature (2767)..(2767): n is a, c, g, or t
  misc_feature (2770)..(2772): n is a, c, g, or t
  misc_feature (2775)..(2781): n is a, c, g, or t
  misc_feature (2784)..(2785): n is a, c, g, or t
  misc_feature (2787)..(2789): n is a, c, g, or t
  misc_feature (2794)..(2797): n is a, c, g, or t
  misc_feature (2799)..(2803): n is a, c, g, or t
  misc_feature (2805)..(2807): n is a, c, g, or t
  misc_feature (2810)..(2822): n is a, c, g, or t
  misc_feature (2824)..(2825): n is a, c, g, or t
  misc_feature (2827)..(2835): n is a, c, g, or t
  misc_feature (2837)..(2838): n is a, c, g, or t
  misc_feature (2840)..(2842): n is a, c, g, or t
  misc_feature (2844)..(2845): n is a, c, g, or t
  misc_feature (2847)..(2848): n is a, c, g, or t
  misc_feature (2851)..(2853): n is a, c, g, or t
  misc_feature (2855)..(2858): n is a, c, g, or t
  misc_feature (2860)..(2866): n is a, c, g, or t
  misc_feature (2871)..(2871): n is a, c, g, or t
  misc_feature (2873)..(2876): n is a, c, g, or t
  misc_feature (2878)..(2879): n is a, c, g, or t
  misc_feature (2881)..(2883): n is a, c, g, or t
  misc_feature (2885)..(2887): n is a, c, g, or t
  misc_feature (2889)..(2893): n is a, c, g, or t
  misc_feature (2895)..(2897): n is a, c, g, or t
  misc_feature (2899)..(2899): n is a, c, g, or t
  misc_feature (2901)..(2901): n is a, c, g, or t
  misc_feature (2904)..(2908): n is a, c, g, or t
  misc_feature (2910)..(2918): n is a, c, g, or t
  misc_feature (2920)..(2920): n is a, c, g, or t
  misc_feature (2923)..(2925): n is a, c, g, or t
  misc_feature (2928)..(2934): n is a, c, g, or t
  misc_feature (2937)..(2937): n is a, c, g, or t
  misc_feature (2940)..(2941): n is a, c, g, or t
  misc_feature (2948)..(2948): n is a, c, g, or t
  misc_feature (2950)..(2950): n is a, c, g, or t
  misc_feature (2953)..(2956): n is a, c, g, or t
  misc_feature (2959)..(2961): n is a, c, g, or t
  misc_feature (2963)..(2963): n is a, c, g, or t
  misc_feature (2965)..(2971): n is a, c, g, or t
  misc_feature (2973)..(2979): n is a, c, g, or t
  misc_feature (2981)..(2981): n is a, c, g, or t
  misc_feature (2983)..(2995): n is a, c, g, or t
  misc_feature (2997)..(2997): n is a, c, g, or t
  misc_feature (3000)..(3002): n is a, c, g, or t
  misc_feature (3007)..(3007): n is a, c, g, or t
  misc_feature (3009)..(3011): n is a, c, g, or t
  misc_feature (3014)..(3015): n is a, c, g, or t
  misc_feature (3019)..(3019): n is a, c, g, or t
  misc_feature (3024)..(3027): n is a, c, g, or t
  misc_feature (3029)..(3030): n is a, c, g, or t
  misc_feature (3032)..(3033): n is a, c, g, or t
  misc_feature (3036)..(3038): n is a, c, g, or t
  misc_feature (3040)..(3053): n is a, c, g, or t
  misc_feature (3055)..(3071): n is a, c, g, or t
  misc_feature (3074)..(3074): n is a, c, g, or t
  misc_feature (3077)..(3078): n is a, c, g, or t
  misc_feature (3083)..(3083): n is a, c, g, or t
  misc_feature (3085)..(3087): n is a, c, g, or t
  misc_feature (3091)..(3091): n is a, c, g, or t
  misc_feature (3094)..(3095): n is a, c, g, or t
  misc_feature (3101)..(3101): n is a, c, g, or t
  misc_feature (3103)..(3103): n is a, c, g, or t
  misc_feature (3106)..(3108): n is a, c, g, or t
  misc_feature (3113)..(3114): n is a, c, g, or t
  misc_feature (3117)..(3117): n is a, c, g, or t
  misc_feature (3119)..(3121): n is a, c, g, or t
  misc_feature (3123)..(3145): n is a, c, g, or t
  misc_feature (3147)..(3148): n is a, c, g, or t
  misc_feature (3150)..(3151): n is a, c, g, or t
  misc_feature (3154)..(3155): n is a, c, g, or t
  misc_feature (3158)..(3164): n is a, c, g, or t
  misc_feature (3167)..(3168): n is a, c, g, or t
  misc_feature (3170)..(3172): n is a, c, g, or t
  misc_feature (3177)..(3180): n is a, c, g, or t
  misc_feature (3182)..(3186): n is a, c, g, or t
  misc_feature (3188)..(3191): n is a, c, g, or t
  misc_feature (3193)..(3206): n is a, c, g, or t
  misc_feature (3208)..(3225): n is a, c, g, or t
  misc_feature (3228)..(3228): n is a, c, g, or t
  misc_feature (3230)..(3232): n is a, c, g, or t
  misc_feature (3235)..(3236): n is a, c, g, or t
  misc_feature (3239)..(3240): n is a, c, g, or t
  misc_feature (3244)..(3245): n is a, c, g, or t
  misc_feature (3247)..(3248): n is a, c, g, or t
  misc_feature (3254)..(3257): n is a, c, g, or t
  misc_feature (3259)..(3262): n is a, c, g, or t
  misc_feature (3266)..(3268): n is a, c, g, or t
  misc_feature (3270)..(3270): n is a, c, g, or t
  misc_feature (3272)..(3295): n is a, c, g, or t
  misc_feature (3297)..(3302): n is a, c, g, or t
  misc_feature (3304)..(3305): n is a, c, g, or t
  misc_feature (3307)..(3309): n is a, c, g, or t
  misc_feature (3312)..(3318): n is a, c, g, or t
  misc_feature (3321)..(3322): n is a, c, g, or t
  misc_feature (3324)..(3326): n is a, c, g, or t
  misc_feature (3331)..(3334): n is a, c, g, or t
  misc_feature (3336)..(3340): n is a, c, g, or t
  misc_feature (3342)..(3345): n is a, c, g, or t
  misc_feature (3347)..(3350): n is a, c, g, or t
  misc_feature (3352)..(3371): n is a, c, g, or t
  misc_feature (3373)..(3379): n is a, c, g, or t
  misc_feature (3381)..(3382): n is a, c, g, or t
  misc_feature (3384)..(3386): n is a, c, g, or t
  misc_feature (3389)..(3395): n is a, c, g, or t
  misc_feature (3398)..(3399): n is a, c, g, or t
  misc_feature (3401)..(3403): n is a, c, g, or t
  misc_feature (3408)..(3411): n is a, c, g, or t
  misc_feature (3413)..(3417): n is a, c, g, or t
  misc_feature (3419)..(3422): n is a, c, g, or t
  misc_feature (3424)..(3446): n is a, c, g, or t
  misc_feature (3448)..(3454): n is a, c, g, or t
  misc_feature (3502)..(3509): n is a, c, g, or t
  misc_feature (3511)..(3511): n is a, c, g, or t
  misc_feature (3513)..(3519): n is a, c, g, or t
  misc_feature (3521)..(3524): n is a, c, g, or t
  misc_feature (3526)..(3526): n is a, c, g, or t
  misc_feature (3528)..(3535): n is a, c, g, or t
  misc_feature (3537)..(3540): n is a, c, g, or t
  misc_feature (3542)..(3545): n is a, c, g, or t
  misc_feature (3547)..(3548): n is a, c, g, or t
  misc_feature (3552)..(3552): n is a, c, g, or t
  misc_feature (3554)..(3557): n is a, c, g, or t
  misc_feature (3561)..(3565): n is a, c, g, or t
  misc_feature (3567)..(3570): n is a, c, g, or t
  misc_feature (3572)..(3574): n is a, c, g, or t
  misc_feature (3576)..(3593): n is a, c, g, or t
  misc_feature (3595)..(3596): n is a, c, g, or t
  misc_feature (3598)..(3608): n is a, c, g, or t
  misc_feature (3610)..(3615): n is a, c, g, or t
  misc_feature (3618)..(3618): n is a, c, g, or t
  misc_feature (3620)..(3628): n is a, c, g, or t
  misc_feature (3630)..(3634): n is a, c, g, or t
  misc_feature (3637)..(3651): n is a, c, g, or t
  misc_feature (3653)..(3664): n is a, c, g, or t
  misc_feature (3666)..(3671): n is a, c, g, or t
  misc_feature (3673)..(3675): n is a, c, g, or t
  misc_feature (3677)..(3684): n is a, c, g, or t
  misc_feature (3690)..(3698): n is a, c, g, or t
  misc_feature (3700)..(3700): n is a, c, g, or t
  misc_feature (3702)..(3705): n is a, c, g, or t
  misc_feature (3707)..(3709): n is a, c, g, or t
  misc_feature (3711)..(3711): n is a, c, g, or t
  misc_feature (3714)..(3723): n is a, c, g, or t
  misc_feature (3725)..(3728): n is a, c, g, or t
  misc_feature (3731)..(3757): n is a, c, g, or t
  misc_feature (3759)..(3761): n is a, c, g, or t
  misc_feature (3763)..(3764): n is a, c, g, or t
  misc_feature (3767)..(3773): n is a, c, g, or t
  misc_feature (3775)..(3775): n is a, c, g, or t
  misc_feature (3777)..(3781): n is a, c, g, or t
  misc_feature (3783)..(3785): n is a, c, g, or t
  misc_feature (3790)..(3792): n is a, c, g, or t
  misc_feature (3794)..(3794): n is a, c, g, or t
  misc_feature (3796)..(3804): n is a, c, g, or t
  misc_feature (3806)..(3811): n is a, c, g, or t
  misc_feature (3813)..(3828): n is a, c, g, or t
  misc_feature (3830)..(3838): n is a, c, g, or t
  misc_feature (3840)..(3841): n is a, c, g, or t
  misc_feature (3843)..(3845): n is a, c, g, or t
  misc_feature (3848)..(3848): n is a, c, g, or t
  misc_feature (3850)..(3850): n is a, c, g, or t
  misc_feature (3852)..(3853): n is a, c, g, or t
  misc_feature (3857)..(3861): n is a, c, g, or t
  misc_feature (3867)..(3871): n is a, c, g, or t
  misc_feature (3873)..(3874): n is a, c, g, or t
  misc_feature (3876)..(3876): n is a, c, g, or t
  misc_feature (3878)..(3879): n is a, c, g, or t
  misc_feature (3882)..(3889): n is a, c, g, or t
  misc_feature (3891)..(3895): n is a, c, g, or t
  misc_feature (3897)..(3900): n is a, c, g, or t
  misc_feature (3902)..(3912): n is a, c, g, or t
  misc_feature (3915)..(3915): n is a, c, g, or t
  misc_feature (3917)..(3917): n is a, c, g, or t
  misc_feature (3920)..(3922): n is a, c, g, or t
  misc_feature (3926)..(3928): n is a, c, g, or t
  misc_feature (3930)..(3931): n is a, c, g, or t
  misc_feature (3934)..(3935): n is a, c, g, or t
  misc_feature (3937)..(3937): n is a, c, g, or t
  misc_feature (3944)..(3944): n is a, c, g, or t
  misc_feature (3946)..(3946): n is a, c, g, or t
  misc_feature (3950)..(3950): n is a, c, g, or t
  misc_feature (3955)..(3955): n is a, c, g, or t
  misc_feature (3957)..(3958): n is a, c, g, or t
  misc_feature (3960)..(3974): n is a, c, g, or t
  misc_feature (3976)..(3977): n is a, c, g, or t
  misc_feature (3979)..(3993): n is a, c, g, or t
  misc_feature (3995)..(3999): n is a, c, g, or t
ccgaccttgtgggggccgaccttgaaggttttgtgggggctgaccttgaaggttttgaagggtctgaccttgaaggttttgaaaaccttcaaggtcgggaagagggaaaccttcaaggtcggaaggggggagaccttcaaggtcgggcaaggggaaaccttcaaggccgggtatcccggcaattcagcaatttattcaactcatattccaaagcattcaacaaaatgtataacagaaaaggcagtttgtttatgcgaagtatgaaacgaaaagtaatcacttcagaagagtatttgaaaaagataatttgttacattcatcataaccctgttcatcatggacttatcaaatctatggaacaatggaaattttcatcctattcggtattcgtaaatgaaaattttaccttcccgtcggacaaatcgctgccatgggttcccaaaaatgaggtgatcgcttggtttgataacaagagtaatttcatctattgccatcaaaattcactcaacatgaaattatggaacagtttggaataaataatgattaaatttaaaaataatgatcaaacgcattttactttttggcaatcccgcaaaattgcggttggaaaacaaacaactaaaaattattctgaaaaaagaaccgcccgaggaaaagacggtccctatagaggatataggttatgtgatcatagatcatccacaaatcaccatcaccagcggagccatcggagaaatgatgaaaaacaatgtagccatcatttcctgcgatcaaaactatatgccgacggcactcatgttgccctttgaagggcatcacgttcaaacccaacgcatgcgggcacaaattgaagcatccgaacctttgaaaaaaaatctctggatgcaaaccgtcaaagcaaagattctcaaccaggccaatttgatggagaggttgggtatttgtgatcaccctctgcgaaagtatgccaaagatgtcaaaagtggcgatacgaccaatcgcgaagctgctgctgccaatcattactggaatgtgttgtttccatcaatcccaaactttttcagagatccgatgggaccctatcccaacaattttttgaattatgcttacgccatacttcgttcggtgatggcccgagccattgtgggagccggtttgtttccttcttttgggctttttcataaaaacaaatacaatgcgttttgccttgccgacgatttgatggagccctaccgcccttttgccgatctgttggtcatcaacaccatgaaaaaatttcctgaacaggaggtgatcaataccgatataaagaaagaattgctgatgttgccgcatatggatgtcttcattgccggacacaaaagcccgttgatgattgcggcacagcatacggctgcatcattggtgcaatgtttcgagggaaaaaagaaaaaaatgctttatccggtgctacaatgaatcacgaacgtttaaatgcatacagaattatgtgggtaatatgttgctttgatctgccaacagtggagaaaaaagatcaaaaagccgccaaccgttttcgcaaatttctcaacgaagacggatttatcatgatacaattcagcatctatggccgccattgtcccagcagcgaaaatgccaatgtgcacatagaaagaattaaacgtaacctacctcctaaagggtcggtgatcatttttaaaatcaccgacaaacagtttggcgaaagcatcatctatcaaaatgccaaaaaagatgatccgcctaccggatggatacaattggaactattttaaaatccgttggtaaaacagaaataaaaaaatcccggccgaagccgggatttttaatttgcaacaacatttttttaatttgaaaaaatggctgaaatccttgatatacttgctttttgacgtgttctgttgttgcaaatatatcaaagaactaaaaatgtaagcgattcacaactnnnnnnnnnnnnnnnnnnnnnnnnnnnnngttgttgcaaatatatcaaagaactaaaaatgtaagcgattcacaacnnnnnnnnnnnnnnnnnnnnnnnnnnnnnngttgttgcaaatatatcaaagaactaaaaatgtaagcgattcacaacnnnannnnnnnnnnnnnnnnnnnnnnnnnngttgttgcaaatatatcaaagaactaaaaatgtaagcgattcacaacnnnnnannnnnnnntnnnnnnntnaannanntnntnnnaannnnnnnaannannnaaaannnnannnnntnnnnannnnnnnnnnnnnnnnnnnnnnnnnnnnnnnnntnntnnnaannnnnnnaannannnaaaannnnannnnntnnnnannnnnnnnnnnnnnnnnnnnnnnnnnnnnnntnnnnnnnnannnnnnnnaannannnaaanntnannnnntnnnnnannnnnnnnnnnnnnnnnnnnnnnnnnnnnnnntnntnnnaannnnnnnaannaannaaaannnnannnnntnnnnannnnnnnnnnnnnnnnnnntnnnnnnnnannnntnntnnnaannnnnnnaannannnaaaannnnannnnntnnnnancnnnnnnnnnnnnnnnnnnnnnnnnnnnnnnnttntnnnaannntnnnaannannnaaaantnnannnnntnnanancnnnntnnnnnnnnnnnnnnnnnnnnnnnnnntnttnnaaannnnnnnaanaannnaaaannnaannnnntnnnaancnnntnnctntnnannnttntnnnnnnnnnnntnttnnnaannnnnnnaannannnaaaannnnannnnntnnnaannnnnnnnnnnnnannannnnnnnnnanncnnntnntnnaannnannnnannnnnnnaaaantnnnngnntnnnannncnnnnngnnntnanatnnnnnannnnnnnnntnttnnnaannnnnnnaanaannaaaaatntnagnnnntcnnnancnnnnnnngnnnnnnntntnnnnnnnnnnnnntnttnnnaatanannnaannactnaaaannnnanngnntcnnnannnnnnnnnnnnnnannnnnnnnnnnnnnnnnttnttnnaaatntnnnaaanaannaaaaangnaannnattcnnaancnnncnnnnnnnnnnnnnnnnnnnnnnnanntnnttnnaannnnnnnaannannnaaaannnnannnnntnnnnannnnnnnnnnnnnnannnnnnnnnnnnnnnnnnttntnnnaannatnncaannanntaaaannnnannnnattnnnancnnnnnnnnnnnnnnnnnnnnnnnngnnnnnntnntnnnaannnnnnnaannannnaaaannnnannnnntnnnnannnnannnnnnnnnnnnnnnnnnnntnnnnnnntnntnnnaannnnnnnaannannnaaaannnnannnnntnnnnannnnnnnnnnnnnnnnnnnnnnnannnnnnngttgttgcaaatatatcaaagaactaaaaatgtaagcgattcacaacnnnnnnnntntnnnnnnncnnnnantnnnnnnnntnnnnannnntnnaaanannnnaaannnnnannnntnnnannnnnnnnnnnnnnnnnncnnannnnnnnnnnntnnnnnnaanannnnnnnnnannnnnaannnnnnnnnnnnnnnannnnnnnnnnnnannnnnntnnntnnnnnnnnttgttnnnnnnnnntnannnnannnanaannnnnnnnnntnnnnacnnnnnnnnnnnnnnnnnnnnnnnnnnncnnntnnttnnnnnnntntnnnnnannnaaaannntnannnnnnnnnannnnnntnnnnnnnnnnnnnnnnannnnnnnnntnntnnnaananannaaannnnnaaaaannnnngnnantnncannnnnnnnannnnnannnnannnnnnnnnnnagntnttnnnaatnnntnnaannantaaaaangnaagngattnannannnnnnnnnnnnnnnanntnnnnnnnnnnnnnnntnnnnna

SEQ ID NO: 395 - DNA, 4000 bp, Escherichia coli
  misc_feature (41)..(41): n is a, c, g, or t
  misc_feature (2908)..(2908): n is a, c, g, or t
gagatgcattcatagctgaacctggacatttattagtcgcngctgattactctcaaattgaattacgtttgttagctcatactgctaaccttcctactatgaagaaagcattttctgatggtgtagacattcatgcgttaactgcatcggaaatttttaatataaagctatcaaatatggatgcttcaactagaaggcgagctaaagctataaacttcggtattatttatggaatttctgcatttggcttagctaataatttaggaatatcacgtacagaggcgagtgattatatcaaaaattactttatgaaattcccaggcattaaagattatatggaaaatgcaaaagatgaggctagaaagcatggttatgtgcaaactctttttggccgaagatgtcatattaaaggaattaaagatagaaatcccgctgttaggggttttgctgaacgacaggctattaatgccccaattcagggctctgcagccgatataattcgtcgagctatgataaggattccaaatagtataaagcccataggtggctccaaaatgctattacaggttcacgatgaactgatttttgaagttcccgaagcaaatgctaatgaattgattgaaatagttactacaacaatgcaaaatgcggcaatgcctgctgttgatatatctgttccactggttgtcgaagcgcatgcagcaaaaaattggaatgatgcgcactaaggaattaataatatgacgtttgtcgttttagtccgtcacggacaatcggaatggaatcttcagaatcgttttactggatgggtggatgtggatcttaccgatagaggagtaagtgaagctataaaatcgggtgaattaatagctaaagagggtattatatttgaccaagcttttactagtcttcaacgcagagccataaaaacattatggttgtccttagaggcagcaaatcaatttcatttacctgtaataaaagactggagattaaacgaaaggcattatggagatttaactgggtgtaataaacaagaaacaagatctaaatatggtgaagagcaagttcatatttggagaagaagttttgatatacctcctccaaaaattgatagaaaaaataaatatcatccaattcatgatgcaaaatatagtaatttaaaccctgagttattaccaactggtgagagtttgaaaatgacatgcgaccgcgtattaccttacttttcaagttcaattgctcccctaataaacaataagaaaaatctaattatttcagcacatggaaatagtctaagagcgatattaaaatttctttttaaagttaccgacatagaaattcctaattacgaatttccaacaggaaaccctcttttaattgaatttggttctgatattaatgaaatagaaactgctcgatacttggatgctaagcgcgctaaagtgctaccggagatttaaactggttaatcatattaaatggatgaaaattgcgcttgatttatcaaaaaaacagtcaggcagaacagctgataacccttcagtaggttgcattatagtaaaaaaaaataaaataattgcaagcggggtaacatcagatgggggtaggcctcatgctgaaacaaatgctctccagattgctggaagtgaagcaagggggtcgacagtttatgtaactcttgagccttgttctcattacggacagactgaaccttgtgttaatgctttaatacaagcgggtataaaaaactgtgtaattgcaattattgacccagataaaagagtgaactggcggggagcggcgcttcttcaggaggctggaattgatactcttataggagtttgtaaaattgaggcctatgaagttaattcagatttttttaaaagacataatattcataagtttgatgaacttatatattaatgaatactttgtgatttatattataaatcaaaatatatggtagaaatatctttcattaccttgcctttagtaagatattattaacttattaagtgctaagcctttactatgaagacaaaagcaattgagatgctcatagagccaggagctgaaaagctaattgctaaaatgggccgccgtttaaacacaaaggcacgttcaaagataattaatctaatcttaagccatattagagaagagtatcataactctgaaataactgaatggttctctgaaattagattttcagccaataaaagaactactattcgaattaatttagaaaatgcagattatttaaactttatatcccaagtcgtagctcaaggtcgtccttctgtaacattggaactagtctactttgctgcggctaatctttcacgcgaagatttagaaagtttagtttaatgttttgagttatgttgaagttttaagacaatcctaaactttctttaagggcaagctcttgaggcatccctactgaatgaaaaccaccatcaacatgatgagtttcaccggtgcaagataggcctaagtcagaaagaagatacaaagctgcacctgcaacccccattggatcagtgttatcctgaagcgaactagcagctttgttaaacctaaacatatgtctgcctgaaccaatacctgcagcagcgagtgttttaatggggcctgccgatatagcgtttactcgtatttgccttggccctaaatcagcggccatgtaacgtgtacttgcctctaaagcagcttttgctactcccattacattgtagtttggaataactctttcagaaccaagatatgtgagcgttatcatggacccaccatcattcattatttctgcagcacgtcttcctgcatccacaaagctgtaagctgatatgtccaaagctgacttaaagccttcacgcgtagtgttttctatgaaacttcctgctanttgatccttaccagcaaaagcaatagcatgaaccaagaaatcaattttaccccattctgtctctaattttgagaaagtagagtccattgtttcatcatttgtcacatcgcattcacaaagtattgaagaacctatagattctgcaagaggtttaacacgtcgtaaaagagcttctccttgataagtgaaggcgagctctgccccttgcgaggatagctgacgcgcaattgcccatgcaattgagtttttgttagcaactcccatcacaaggccgcgtttgcccttcattaaagtaccagttggaaaatgttgatctgccattacagtatcctttgtaatatgtgctgctaaataattaaaaatagcagtattttaaattatttattattcaactttagtaaatattacactaccattcgtgccaccaaacccaaaactgtttgacattactgaggttaaattggtttcgatcattttagttacgatattaactttgggaagttcaggatctagctctgttatgtttattgatggtgcaataaaccctttatccatcattattaaactataaatggcctcttgaactccagcagcgcctaagctgtgtccagttaaacatttagtagctgatatatatggacaatactctttaaaaactcgatcaattgcacctgtttcagcaacgtcccctactggtgtcgaagttgcgtgagggttaatatagtcaatttttgatattcctcttgttttagcatcatctaatgccattcgcatcgctctttccgcaccttcaccagacggtgcaaccatgtcatacccatcagatgtagcggcataacctgttacttcagcatatattttagcacctcttgcaatggcatggtcataatcctctaaaactaccattcctgctccacctgctataacaaagccatcgcgacttatatcgaatgctcttgaagcagtttctggagtgtcattatatttgctactcatggcacccatcgcatcaaaaagtgacgacattgcccattcaacttcttcgcctcctcccgcaaacattatatcttgtttcccccattgtatttgttc

SEQ ID NO: 396 - DNA, 4000 bp, Escherichia coli
  misc_feature (1662)..(1662): n is a, c, g, or t
  misc_feature (1665)..(1665): n is a, c, g, or t
  misc_feature (1962)..(1962): n is a, c, g, or t
  misc_feature (1965)..(1965): n is a, c, g, or t
  misc_feature (1968)..(1968): n is a, c, g, or t
  misc_feature (1971)..(1971): n is a, c, g, or t
  misc_feature (1974)..(1974): n is a, c, g, or t
  misc_feature (1977)..(1977): n is a, c, g, or t
  misc_feature (1986)..(1986): n is a, c, g, or t
  misc_feature (1998)..(1998): n is a, c, g, or t
  misc_feature (2378)..(2378): n is a, c, g, or t
  misc_feature (2672)..(2672): n is a, c, g, or t
  misc_feature (2744)..(2744): n is a, c, g, or t
  misc_feature (2750)..(2750): n is a, c, g, or t
  misc_feature (2765)..(2765): n is a, c, g, or t
  misc_feature (2774)..(2774): n is a, c, g, or t
  misc_feature (3023)..(3023): n is a, c, g, or t
  misc_feature (3030)..(3032): n is a, c, g, or t
  misc_feature (3039)..(3039): n is a, c, g, or t
  misc_feature (3043)..(3043): n is a, c, g, or t
  misc_feature (3045)..(3045): n is a, c, g, or t
  misc_feature (3047)..(3048): n is a, c, g, or t
  misc_feature (3051)..(3051): n is a, c, g, or t
  misc_feature (3053)..(3053): n is a, c, g, or t
  misc_feature (3055)..(3055): n is a, c, g, or t
  misc_feature (3058)..(3058): n is a, c, g, or t
  misc_feature (3061)..(3062): n is a, c, g, or t
  misc_feature (3065)..(3067): n is a, c, g, or t
  misc_feature (3075)..(3075): n is a, c, g, or t
  misc_feature (3078)..(3078): n is a, c, g, or t
  misc_feature (3081)..(3081): n is a, c, g, or t
  misc_feature (3084)..(3084): n is a, c, g, or t
  misc_feature (3086)..(3086): n is a, c, g, or t
  misc_feature (3089)..(3089): n is a, c, g, or t
  misc_feature (3091)..(3095): n is a, c, g, or t
  misc_feature (3099)..(3099): n is a, c, g, or t
  misc_feature (3104)..(3104): n is a, c, g, or t
  misc_feature (3110)..(3110): n is a, c, g, or t
  misc_feature (3114)..(3114): n is a, c, g, or t
  misc_feature (3116)..(3117): n is a, c, g, or t
  misc_feature (3120)..(3121): n is a, c, g, or t
  misc_feature (3123)..(3126): n is a, c, g, or t
  misc_feature (3128)..(3130): n is a, c, g, or t
  misc_feature (3133)..(3133): n is a, c, g, or t
  misc_feature (3135)..(3135): n is a, c, g, or t
  misc_feature (3137)..(3138): n is a, c, g, or t
  misc_feature (3140)..(3140): n is a, c, g, or t
  misc_feature (3144)..(3144): n is a, c, g, or t
  misc_feature (3146)..(3147): n is a, c, g, or t
  misc_feature (3151)..(3153): n is a, c, g, or t
  misc_feature (3158)..(3160): n is a, c, g, or t
  misc_feature (3162)..(3162): n is a, c, g, or t
  misc_feature (3164)..(3165): n is a, c, g, or t
  misc_feature (3171)..(3171): n is a, c, g, or t
  misc_feature (3173)..(3173): n is a, c, g, or t
  misc_feature (3175)..(3176): n is a, c, g, or t
  misc_feature (3178)..(3178): n is a, c, g, or t
  misc_feature (3180)..(3180): n is a, c, g, or t
  misc_feature (3182)..(3182): n is a, c, g, or t
  misc_feature (3188)..(3188): n is a, c, g, or t
  misc_feature (3191)..(3194): n is a, c, g, or t
  misc_feature (3198)..(3199): n is a, c, g, or t
  misc_feature (3202)..(3204): n is a, c, g, or t
  misc_feature (3206)..(3207): n is a, c, g, or t
  misc_feature (3211)..(3211): n is a, c, g, or t
  misc_feature (3214)..(3214): n is a, c, g, or t
  misc_feature (3218)..(3219): n is a, c, g, or t
  misc_feature (3222)..(3222): n is a, c, g, or t
  misc_feature (3224)..(3224): n is a, c, g, or t
  misc_feature (3226)..(3226): n is a, c, g, or t
  misc_feature (3228)..(3230): n is a, c, g, or t
  misc_feature (3233)..(3233): n is a, c, g, or t
  misc_feature (3237)..(3237): n is a, c, g, or t
  misc_feature (3240)..(3240): n is a, c, g, or t
  misc_feature (3246)..(3247): n is a, c, g, or t
  misc_feature (3251)..(3251): n is a, c, g, or t
  misc_feature (3257)..(3257): n is a, c, g, or t
  misc_feature (3264)..(3266): n is a, c, g, or t
  misc_feature (3268)..(3268): n is a, c, g, or t
  misc_feature (3270)..(3270): n is a, c, g, or t
  misc_feature (3273)..(3274): n is a, c, g, or t
  misc_feature (3276)..(3278): n is a, c, g, or t
  misc_feature (3281)..(3282): n is a, c, g, or t
  misc_feature (3285)..(3286): n is a, c, g, or t
  misc_feature (3289)..(3292): n is a, c, g, or t
  misc_feature (3296)..(3296): n is a, c, g, or t
  misc_feature (3303)..(3303): n is a, c, g, or t
  misc_feature (3306)..(3306): n is a, c, g, or t
  misc_feature (3309)..(3312): n is a, c, g, or t
  misc_feature (3317)..(3322): n is a, c, g, or t
  misc_feature (3324)..(3327): n is a, c, g, or t
  misc_feature (3332)..(3335): n is a, c, g, or t
  misc_feature (3338)..(3340): n is a, c, g, or t
  misc_feature (3342)..(3342): n is a, c, g, or t
  misc_feature (3344)..(3345): n is a, c, g, or t
  misc_feature (3347)..(3348): n is a, c, g, or t
  misc_feature (3353)..(3360): n is a, c, g, or t
  misc_feature (3362)..(3366): n is a, c, g, or t
  misc_feature (3369)..(3369): n is a, c, g, or t
  misc_feature (3371)..(3374): n is a, c, g, or t
  misc_feature (3378)..(3380): n is a, c, g, or t
  misc_feature (3383)..(3383): n is a, c, g, or t
  misc_feature (3386)..(3386): n is a, c, g, or t
  misc_feature (3390)..(3390): n is a, c, g, or t
  misc_feature (3392)..(3396): n is a, c, g, or t
  misc_feature (3399)..(3400): n is a, c, g, or t
  misc_feature (3402)..(3405): n is a, c, g, or t
  misc_feature (3412)..(3415): n is a, c, g, or t
  misc_feature (3417)..(3419): n is a, c, g, or t
  misc_feature (3426)..(3426): n is a, c, g, or t
  misc_feature (3429)..(3431): n is a, c, g, or t
  misc_feature (3433)..(3435): n is a, c, g, or t
  misc_feature (3437)..(3437): n is a, c, g, or t
  misc_feature (3439)..(3439): n is a, c, g, or t
  misc_feature (3442)..(3443): n is a, c, g, or t
  misc_feature (3445)..(3448): n is a, c, g, or t
  misc_feature (3450)..(3451): n is a, c, g, or t
  misc_feature (3459)..(3459): n is a, c, g, or t
  misc_feature (3461)..(3462): n is a, c, g, or t
  misc_feature (3465)..(3465): n is a, c, g, or t
  misc_feature (3467)..(3472): n is a, c, g, or t
  misc_feature (3474)..(3474): n is a, c, g, or t
  misc_feature (3476)..(3477): n is a, c, g, or t
  misc_feature (3483)..(3486): n is a, c, g, or t
  misc_feature (3489)..(3489): n is a, c, g, or t
  misc_feature (3491)..(3491): n is a, c, g, or t
  misc_feature (3493)..(3495): n is a, c, g, or t
  misc_feature (3498)..(3498): n is a, c, g, or t
  misc_feature (3500)..(3500): n is a, c, g, or t
  misc_feature (3502)..(3503): n is a, c, g, or t
  misc_feature (3508)..(3508): n is a, c, g, or t
  misc_feature (3510)..(3510): n is a, c, g, or t
  misc_feature (3512)..(3516): n is a, c, g, or t
  misc_feature (3522)..(3522): n is a, c, g, or t
  misc_feature (3524)..(3525): n is a, c, g, or t
  misc_feature (3528)..(3530): n is a, c, g, or t
  misc_feature (3532)..(3533): n is a, c, g, or t
  misc_feature (3536)..(3537): n is a, c, g, or t
  misc_feature (3540)..(3540): n is a, c, g, or t
  misc_feature (3542)..(3542): n is a, c, g, or t
  misc_feature (3544)..(3544): n is a, c, g, or t
  misc_feature (3547)..(3547): n is a, c, g, or t
  misc_feature (3550)..(3550): n is a, c, g, or t
  misc_feature (3552)..(3552): n is a, c, g, or t
  misc_feature (3555)..(3556): n is a, c, g, or t
  misc_feature (3560)..(3561): n is a, c, g, or t
  misc_feature (3564)..(3565): n is a, c, g, or t
  misc_feature (3568)..(3568): n is a, c, g, or t
  misc_feature (3571)..(3573): n is a, c, g, or t
  misc_feature (3575)..(3575): n is a, c, g, or t
  misc_feature (3577)..(3578): n is a, c, g, or t
  misc_feature (3580)..(3580): n is a, c, g, or t
  misc_feature (3582)..(3582): n is a, c, g, or t
  misc_feature (3584)..(3585): n is a, c, g, or t
  misc_feature (3589)..(3590): n is a, c, g, or t
  misc_feature (3592)..(3595): n is a, c, g, or t
  misc_feature (3598)..(3598): n is a, c, g, or t
  misc_feature (3601)..(3604): n is a, c, g, or t
  misc_feature (3606)..(3607): n is a, c, g, or t
  misc_feature (3610)..(3610): n is a, c, g, or t
  misc_feature (3613)..(3613): n is a, c, g, or t
  misc_feature (3617)..(3618): n is a, c, g, or t
  misc_feature (3623)..(3623): n is a, c, g, or t
  misc_feature (3626)..(3627): n is a, c, g, or t
  misc_feature (3630)..(3630): n is a, c, g, or t
  misc_feature (3639)..(3640): n is a, c, g, or t
  misc_feature (3642)..(3642): n is a, c, g, or t
  misc_feature (3644)..(3644): n is a, c, g, or t
  misc_feature (3651)..(3651): n is a, c, g, or t
  misc_feature (3654)..(3654): n is a, c, g, or t
  misc_feature (3659)..(3659): n is a, c, g, or t
  misc_feature (3662)..(3662): n is a, c, g, or t
  misc_feature (3664)..(3664): n is a, c, g, or t
  misc_feature (3666)..(3668): n is a, c, g, or t
  misc_feature (3672)..(3674): n is a, c, g, or t
  misc_feature (3676)..(3676): n is a, c, g, or t
  misc_feature (3678)..(3678): n is a, c, g, or t
  misc_feature (3680)..(3681): n is a, c, g, or t
  misc_feature (3683)..(3683): n is a, c, g, or t
  misc_feature (3687)..(3687): n is a, c, g, or t
  misc_feature (3690)..(3690): n is a, c, g, or t
  misc_feature (3694)..(3696): n is a, c, g, or t
  misc_feature (3699)..(3700): n is a, c, g, or t
  misc_feature (3703)..(3703): n is a, c, g, or t
  misc_feature (3707)..(3707): n is a, c, g, or t
  misc_feature (3710)..(3711): n is a, c, g, or t
  misc_feature (3713)..(3718): n is a, c, g, or t
  misc_feature (3720)..(3720): n is a, c, g, or t
  misc_feature (3726)..(3734): n is a, c, g, or t
  misc_feature (3736)..(3736): n is a, c, g, or t
  misc_feature (3738)..(3738): n is a, c, g, or t
  misc_feature (3740)..(3741): n is a, c, g, or t
  misc_feature (3745)..(3749): n is a, c, g, or t
  misc_feature (3755)..(3756): n is a, c, g, or t
  misc_feature (3761)..(3761): n is a, c, g, or t
  misc_feature (3763)..(3763): n is a, c, g, or t
  misc_feature (3765)..(3765): n is a, c, g, or t
  misc_feature (3769)..(3769): n is a, c, g, or t
  misc_feature (3773)..(3773): n is a, c, g, or t
  misc_feature (3776)..(3776): n is a, c, g, or t
  misc_feature (3778)..(3778): n is a, c, g, or t
  misc_feature (3780)..(3783): n is a, c, g, or t
  misc_feature (3785)..(3786): n is a, c, g, or t
  misc_feature (3791)..(3792): n is a, c, g, or t
  misc_feature (3795)..(3795): n is a, c, g, or t
  misc_feature (3801)..(3801): n is a, c, g, or t
  misc_feature (3804)..(3804): n is a, c, g, or t
  misc_feature (3807)..(3807): n is a, c, g, or t
  misc_feature (3809)..(3809): n is a, c, g, or t
  misc_feature (3812)..(3812): n is a, c, g, or t
  misc_feature (3814)..(3814): n is a, c, g, or t
  misc_feature (3820)..(3821): n is a, c, g, or t
  misc_feature (3825)..(3826): n is a, c, g, or t
  misc_feature (3830)..(3830): n is a, c, g, or t
  misc_feature (3840)..(3840): n is a, c, g, or t
  misc_feature (3844)..(3845): n is a, c, g, or t
  misc_feature (3847)..(3848): n is a, c, g, or t
  misc_feature (3850)..(3851): n is a, c, g, or t
  misc_feature (3856)..(3857): n is a, c, g, or t
  misc_feature (3865)..(3866): n is a, c, g, or t
  misc_feature (3872)..(3872): n is a, c, g, or t
  misc_feature (3874)..(3874): n is a, c, g, or t
  misc_feature (3876)..(3879): n is a, c, g, or t
  misc_feature (3881)..(3885): n is a, c, g, or t
  misc_feature (3890)..(3890): n is a, c, g, or t
  misc_feature (3896)..(3898): n is a, c, g, or t
  misc_feature (3907)..(3909): n is a, c, g, or t
  misc_feature (3916)..(3916): n is a, c, g, or t
  misc_feature (3921)..(3921): n is a, c, g, or t
  misc_feature (3924)..(3926): n is a, c, g, or t
  misc_feature (3930)..(3931): n is a, c, g, or t
  misc_feature (3933)..(3933): n is a, c, g, or t
  misc_feature (3937)..(3937): n is a, c, g, or t
  misc_feature (3940)..(3940): n is a, c, g, or t
  misc_feature (3946)..(3946): n is a, c, g, or t
  misc_feature (3952)..(3952): n is a, c, g, or t
  misc_feature (3955)..(3955): n is a, c, g, or t
  misc_feature (3957)..(3957): n is a, c, g, or t
  misc_feature (3961)..(3961): n is a, c, g, or t
  misc_feature (3966)..(3966): n is a, c, g, or t
  misc_feature (3968)..(3970): n is a, c, g, or t
  misc_feature (3972)..(3972): n is a, c, g, or t
  misc_feature (3980)..(3980): n is a, c, g, or t
  misc_feature (3982)..(3982): n is a, c, g, or t
  misc_feature (3988)..(3988): n is a, c, g, or t
  misc_feature (3991)..(3991): n is a, c, g, or t
  misc_feature (3994)..(3995): n is a, c, g, or t
  misc_feature (3998)..(3998): n is a, c, g, or t
ctttcaacattgattatgacatcaatatttttaattttttttcctgttggtggatttggtatatctttcaaatcaacctggttaatatcaatcaattctttatttttaatatcaaaaaaatgggaatgggtacctgtgttagtatcaaaatagcttttatcagttgctataacaatttcttttaaataaccattttttttaaaagcatgcactgtgttgtaaactgttgctagagaaattttttcatctaatttttcttcaattattttactaaggtcattaattgtaaaatgaaaagtttcctttggtgaaaataaggcctcacatatttttaatctttgtctagttggtcttaaaccagattctcttaacttttctttatatatatttaaattgttcattattgtttataattgttctaaactattactatattataatctctttaaatcaagtattaaggagtttattttttatgaaaaaaaattcatacacatataatgaactaattaattgtggaaatggagagctttttggccccggtaatgcaaaattacctcttccgccaatgctcatgtttgatagaataaccgaaatcagtgataatagtggtacttttaaaaaaggatctttaaaggctgaattagatatcaaagatgatctttggttctttgagtgtcattttaaagaagaccctgttatgccaggttgtcttggcttagatgctatgtggcaactagttggtttttatcttgggtggcttggtaacccaggtaaagggagagctttaggagtgagtacagtaaaattcactggtgaagttttaaaaaatgttaaaaatgtaagatatgaaattgatatgaaaaaaattatggctccaggtggaacaacagttggtcttgcaaatggcttagtatttgcagatgacaaaaaaatatattcagcagaaagcttgaaagtaggattatttaaataatgagaagagtagttatcacaggtttaggaattgtatcttgtttgggaaacaatcaagaagaggttcatcagtcactattaaagtctaaatcaggaatttcatatgctgaggaatataaagaacataatcttaaaagccatgttcatggtaaaccaaatataaaacttgaggatcatattgatagaaaaacaattagattcatgggttcagggtcagcctataattatattgcaatgaaagaggcgattgaagactctggattagaagaaagtgaagttagtaattttaaaactggtattgttatgggttcaggaggaccttcaattgaaaatgtaattttagcagcagataaaactagagccaaaactccaaaattaatgggtcctttcattgttccaagaacaatggcaagtacagcttcagctactttagcagtgccatttaaaattaaaggaaccaactacacaatgagctctgcatgtgctactagcggacactgcattggaaattcaatggaattaatccaaatgggcaaacaagatgttgtttttgcaggtggaagtgaagaagttcactgggcaatgacagcaatgtttgatgcaatgacagcgttatcttcaaaatacaacgatacacctgagactgcatcaagagcttatgataaaactagagacggtttcgtaatngcnggtggtggtggagttttagttcttgaagaatacgaacatgctaaagcaagaggagctaaaatatacgcagaattaactggttatggagcaacatcagacggatatgatatggtagccccatcaggagaaggagcaatcagatgtatgcaaatggctatggcaactgctaaaaataaaattgattatataaatacccacggaacatcaacaccagttggtgatattacagaattaaatgctgttaaaggagtttttggagatacaattccaaaaattagttcaaccaaatctttatcnggncanccnttnggngctgcatcngttcatgaagcnatctattgtttaattatgatgaaaaataatttcattgctggttctgcaaatattggtgaaatggatgaagaggctaaaaaatttccaatagttgctaaaacagaaactggagcaactttaaatactgttatgtctaatagttttggttttggtggaaccaatgctgctttaatttttgagaaaatataatcatgagtttgatgaagggtaaaaaaggattaatcatgggcgttgccaatgaaagatcaattgcttggggcatttcacaaaagcttgctgaagctggagctgaacttgcattcacttaccttggagatgcactaaagaaaagagtaattcctttagctgaaaaattaaattcaaaaacaacattcagttgngatgttgaaaacaaagaagaagttataaaattatttgaagatattaaatcagagtggggtcaaattgattttgttgtccacgcagtagcattctcagataaatcagaactatcaggtgaatatttaaatacatcaagagagaattttttaagaagcatgttgatttcatgtttttcatttactgaagttgcaaaagaagcttcaaaaataatgaaagaaggtggcagtatgttaactctaacgtacgaatctactaaagctattccaaattataatgtaatgggtgtttgtaantcagcgttagaggcaagtgttaaatatcttgcaagagatttaggtgctaaaggcatgagagtaaatgcaatnagtgcnggaccgattaaaacnttagcagcntctgctataggagatgcaaaattcctatataagtggaatgaagaccattctttccttaaaagaaacgtagatatccatgatgttggaaattcagcattatatctattaagcgaccttgcaaacggtgtaacgggtgaaattcactacgtagatgccggatataataaagttggaatgccagatcctaagaatattacttaaaatatagttaaatttagttaaaaatattaggggcgttctgttgccagntgccccnnnaaaaaancccngnannttnantncanggnnttnnnaatttaanttnaantantnttnannnnnttgnttcanagaaantttnannttnncnnnntnnnaancnannantttnanntttnnntcgtnnncntnnttaacnanannantnantttttntannnntttnngannnanntctnagntatnnacnangncnnnttntttnccnaaaaanntaanaaatgncccaaannncntnatnntnnntannttnnctnnnnaaantttattnaanttnnnnttttnnnnnnannnntttannnnttnnnanannanngtttnnnnnnnntnnnnntgnannnncaannnttncanctcntnnnnnatnnannnnaactttnnnncnnnatttttnaannntnnntntnatnntnnnncnnccttttcnannaanannnnnnananntttttnnnnaanantnnnttntncnnttttngnannnnnttgccnannatnnncnnttnnttnantnaangcntnatnnattnnacnnaanatnnnantnntncnanntttnncnnnnttnaannnntnntcnatnattnnaaaantannacnagtaatttnnananccatttnaantgaantantncnnncttnnntncnannancttnaangtcnnnatnnccnaaanganntnnnnnncntaaaannnnnnnnngnanannaaannnnncacctnntttantnantccnattncantncnnnnanntggtnnttnatttgnaanacntnctncnataaannaaannaggnaacaaaaaanattnncnntnnagaannaacaatanntttcantnannnntnnnnnaattntaaaannntaagaaatnnnttttttngaagnaannnaaanntnaatnccnctcaangtaaanttncnttgnccaantnnngntttcctgntncaaatnttncannttnaa

SEQ ID NO: 397 - DNA, 4000 bp, Escherichia coli
  misc_feature (3)..(6): n is a, c, g, or t
  misc_feature (8)..(27): n is a, c, g, or t
  misc_feature (30)..(33): n is a, c, g, or t
  misc_feature (35)..(37): n is a, c, g, or t
  misc_feature (39)..(39): n is a, c, g, or t
  misc_feature (41)..(46): n is a, c, g, or t
  misc_feature (50)..(51): n is a, c, g, or t
  misc_feature (53)..(53): n is a, c, g, or t
  misc_feature (56)..(56): n is a, c, g, or t
  misc_feature (58)..(58): n is a, c, g, or t
  misc_feature (60)..(61): n is a, c, g, or t
  misc_feature (63)..(64): n is a, c, g, or t
  misc_feature (66)..(67): n is a, c, g, or t
  misc_feature (69)..(70): n is a, c, g, or t
  misc_feature (73)..(84): n is a, c, g, or t
  misc_feature (86)..(91): n is a, c, g, or t
  misc_feature (93)..(95): n is a, c, g, or t
  misc_feature (97)..(98): n is a, c, g, or t
  misc_feature (100)..(103): n is a, c, g, or t
  misc_feature (105)..(122): n is a, c, g, or t
  misc_feature (124)..(125): n is a, c, g, or t
  misc_feature (127)..(128): n is a, c, g, or t
  misc_feature (130)..(135): n is a, c, g, or t
  misc_feature (138)..(140): n is a, c, g, or t
  misc_feature (142)..(158): n is a, c, g, or t
  misc_feature (160)..(161): n is a, c, g, or t
  misc_feature (163)..(163): n is a, c, g, or t
  misc_feature (166)..(167): n is a, c, g, or t
  misc_feature (169)..(174): n is a, c, g, or t
  misc_feature (176)..(188): n is a, c, g, or t
  misc_feature (190)..(194): n is a, c, g, or t
  misc_feature (196)..(196): n is a, c, g, or t
  misc_feature (198)..(203): n is a, c, g, or t
  misc_feature (205)..(206): n is a, c, g, or t
  misc_feature (208)..(208): n is a, c, g, or t
  misc_feature (210)..(218): n is a, c, g, or t
  misc_feature (220)..(224): n is a, c, g, or t
  misc_feature (226)..(229): n is a, c, g, or t
  misc_feature (231)..(232): n is a, c, g, or t
  misc_feature (234)..(240): n is a, c, g, or t
  misc_feature (242)..(243): n is a, c, g, or t
  misc_feature (245)..(247): n is a, c, g, or t
  misc_feature (249)..(254): n is a, c, g, or t
  misc_feature (256)..(266): n is a, c, g, or t
  misc_feature (268)..(268): n is a, c, g, or t
  misc_feature (271)..(271): n is a, c, g, or t
  misc_feature (273)..(283): n is a, c, g, or t
  misc_feature (285)..(290): n is a, c, g, or t
  misc_feature (292)..(293): n is a, c, g, or t
  misc_feature (295)..(302): n is a, c, g, or t
  misc_feature (304)..(310): n is a, c, g, or t
  misc_feature (312)..(313): n is a, c, g, or t
  misc_feature (315)..(316): n is a, c, g, or t
  misc_feature (318)..(323): n is a, c, g, or t
  misc_feature (326)..(329): n is a, c, g, or t
  misc_feature (332)..(335): n is a, c, g, or t
  misc_feature (337)..(340): n is a, c, g, or t
  misc_feature (342)..(349): n is a, c, g, or t
  misc_feature (351)..(356): n is a, c, g, or t
  misc_feature (358)..(370): n is a, c, g, or t
  misc_feature (372)..(379): n is a, c, g, or t
  misc_feature (381)..(383): n is a, c, g, or t
  misc_feature (385)..(385): n is a, c, g, or t
  misc_feature (387)..(389): n is a, c, g, or t
  misc_feature (391)..(392): n is a, c, g, or t
  misc_feature (394)..(394): n is a, c, g, or t
  misc_feature (397)..(397): n is a, c, g, or t
  misc_feature (399)..(399): n is a, c, g, or t
  misc_feature (401)..(402): n is a, c, g, or t
  misc_feature (404)..(421): n is a, c, g, or t
  misc_feature (423)..(427): n is a, c, g, or t
  misc_feature (429)..(431): n is a, c, g, or t
  misc_feature (435)..(436): n is a, c, g, or t
  misc_feature (438)..(458): n is a, c, g, or t
  misc_feature (460)..(472): n is a, c, g, or t
  misc_feature (474)..(486): n is a, c, g, or t
  misc_feature (488)..(489): n is a, c, g, or t
  misc_feature (491)..(493): n is a, c, g, or t
  misc_feature (495)..(503): n is a, c, g, or t
  misc_feature (505)..(508): n is a, c, g, or t
  misc_feature (510)..(510): n is a, c, g, or t
  misc_feature (513)..(513): n is a, c, g, or t
  misc_feature (516)..(516): n is a, c, g, or t
  misc_feature (519)..(519): n is a, c, g, or t
  misc_feature (521)..(522): n is a, c, g, or t
  misc_feature (525)..(525): n is a, c, g, or t
  misc_feature (528)..(528): n is a, c, g, or t
  misc_feature (531)..(538): n is a, c, g, or t
  misc_feature (540)..(541): n is a, c, g, or t
  misc_feature (544)..(545): n is a, c, g, or t
  misc_feature (547)..(548): n is a, c, g, or t
  misc_feature (550)..(562): n is a, c, g, or t
  misc_feature (564)..(565): n is a, c, g, or t
  misc_feature (567)..(568): n is a, c, g, or t
  misc_feature (570)..(571): n is a, c, g, or t
  misc_feature (573)..(581): n is a, c, g, or t
  misc_feature (583)..(583): n is a, c, g, or t
  misc_feature (586)..(587): n is a, c, g, or t
  misc_feature (589)..(596): n is a, c, g, or t
  misc_feature (598)..(599): n is a, c, g, or t
  misc_feature (601)..(602): n is a, c, g, or t
  misc_feature (604)..(610): n is a, c, g, or t
  misc_feature (613)..(613): n is a, c, g, or t
  misc_feature (616)..(616): n is a, c, g, or t
  misc_feature (619)..(619): n is a, c, g, or t
  misc_feature (622)..(623): n is a, c, g, or t
  misc_feature (625)..(626): n is a, c, g, or t
  misc_feature (629)..(632): n is a, c, g, or t
  misc_feature (637)..(637): n is a, c, g, or t
  misc_feature (640)..(668): n is a, c, g, or t
  misc_feature (671)..(671): n is a, c, g, or t
  misc_feature (673)..(674): n is a, c, g, or t
  misc_feature (680)..(680): n is a, c, g, or t
  misc_feature (682)..(682): n is a, c, g, or t
  misc_feature (686)..(686): n is a, c, g, or t
  misc_feature (688)..(688): n is a, c, g, or t
  misc_feature (695)..(695): n is a, c, g, or t
  misc_feature (698)..(698): n is a, c, g, or t
  misc_feature (700)..(704): n is a, c, g, or t
  misc_feature (706)..(708): n is a, c, g, or t
  misc_feature (711)..(711): n is a, c, g, or t
  misc_feature (713)..(714): n is a, c, g, or t
  misc_feature (718)..(721): n is a, c, g, or t
  misc_feature (724)..(726): n is a, c, g, or t
  misc_feature (728)..(728): n is a, c, g, or t
  misc_feature (730)..(742): n is a, c, g, or t
  misc_feature (744)..(751): n is a, c, g, or t
  misc_feature (753)..(771): n is a, c, g, or t
  misc_feature (773)..(774): n is a, c, g, or t
  misc_feature (776)..(777): n is a, c, g, or t
  misc_feature (779)..(785): n is a, c, g, or t
  misc_feature (788)..(789): n is a, c, g, or t
  misc_feature (795)..(795): n is a, c, g, or t
  misc_feature (797)..(798): n is a, c, g, or t
  misc_feature (800)..(805): n is a, c, g, or t
  misc_feature (807)..(811): n is a, c, g, or t
  misc_feature (813)..(816): n is a, c, g, or t
  misc_feature (819)..(819): n is a, c, g, or t
  misc_feature (822)..(822): n is a, c, g, or t
  misc_feature (824)..(826): n is a, c, g, or t
  misc_feature (828)..(829): n is a, c, g, or t
  misc_feature (833)..(834): n is a, c, g, or t
  misc_feature (836)..(837): n is a, c, g, or t
  misc_feature (839)..(847): n is a, c, g, or t
  misc_feature (850)..(850): n is a, c, g, or t
  misc_feature (852)..(852): n is a, c, g, or t
  misc_feature (854)..(856): n is a, c, g, or t
  misc_feature (858)..(859): n is a, c, g, or t
  misc_feature (862)..(867): n is a, c, g, or t
  misc_feature (869)..(870): n is a, c, g, or t
  misc_feature (873)..(873): n is a, c, g, or t
  misc_feature (876)..(876): n is a, c, g, or t
  misc_feature (879)..(880): n is a, c, g, or t
  misc_feature (882)..(883): n is a, c, g, or t
  misc_feature (885)..(885): n is a, c, g, or t
  misc_feature (888)..(889): n is a, c, g, or t
  misc_feature (892)..(894): n is a, c, g, or t
  misc_feature (896)..(896): n is a, c, g, or t
  misc_feature (898)..(898): n is a, c, g, or t
  misc_feature (900)..(900): n is a, c, g, or t
  misc_feature (903)..(904): n is a, c, g, or t
  misc_feature (906)..(907): n is a, c, g, or t
  misc_feature (909)..(910): n is a, c, g, or t
  misc_feature (913)..(914): n is a, c, g, or t
  misc_feature (916)..(920): n is a, c, g, or t
  misc_feature (923)..(925): n is a, c, g, or t
  misc_feature (928)..(928): n is a, c, g, or t
  misc_feature (932)..(932): n is a, c, g, or t
  misc_feature (936)..(936): n is a, c, g, or t
  misc_feature (939)..(943): n is a, c, g, or t
  misc_feature (946)..(947): n is a, c, g, or t
  misc_feature (950)..(950): n is a, c, g, or t
  misc_feature (953)..(953): n is a, c, g, or t
  misc_feature (956)..(956): n is a, c, g, or t
  misc_feature (958)..(959): n is a, c, g, or t
  misc_feature (961)..(964): n is a, c, g, or t
  misc_feature (966)..(967): n is a, c, g, or t
  misc_feature (969)..(970): n is a, c, g, or t
  misc_feature (972)..(973): n is a, c, g, or t
  misc_feature (976)..(976): n is a, c, g, or t
  misc_feature (978)..(979): n is a, c, g, or t
  misc_feature (981)..(987): n is a, c, g, or t
  misc_feature (989)..(990): n is a, c, g, or t
  misc_feature (992)..(993): n is a, c, g, or t
  misc_feature (995)..(995): n is a, c, g, or t
  misc_feature (997)..(998): n is a, c, g, or t
  misc_feature (1000)..(1002): n is a, c, g, or t
  misc_feature (1004)..(1007): n is a, c, g, or t
  misc_feature (1009)..(1009): n is a, c, g, or t
  misc_feature (1012)..(1025): n is a, c, g, or t
  misc_feature (1027)..(1028): n is a, c, g, or t
  misc_feature (1031)..(1031): n is a, c, g, or t
  misc_feature (1033)..(1033): n is a, c, g, or t
  misc_feature (1036)..(1037): n is a, c, g, or t
  misc_feature (1039)..(1049): n is a, c, g, or t
  misc_feature (1051)..(1052): n is a, c, g, or t
  misc_feature (1054)..(1054): n is a, c, g, or t
  misc_feature (1057)..(1057): n is a, c, g, or t
  misc_feature (1060)..(1061): n is a, c, g, or t
  misc_feature (1063)..(1063): n is a, c, g, or t
  misc_feature (1066)..(1066): n is a, c, g, or t
  misc_feature (1071)..(1071): n is a, c, g, or t
  misc_feature (1073)..(1079): n is a, c, g, or t
  misc_feature (1082)..(1082): n is a, c, g, or t
  misc_feature (1085)..(1086): n is a, c, g, or t
  misc_feature (1088)..(1089): n is a, c, g, or t
  misc_feature (1091)..(1092): n is a, c, g, or t
  misc_feature (1095)..(1095): n is a, c, g, or t
  misc_feature (1098)..(1098): n is a, c, g, or t
  misc_feature (1100)..(1101): n is a, c, g, or t
  misc_feature (1104)..(1104): n is a, c, g, or t
  misc_feature (1109)..(1109): n is a, c, g, or t
  misc_feature (1111)..(1111): n is a, c, g, or t
  misc_feature (1113)..(1116): n is a, c, g, or t
  misc_feature (1123)..(1125): n is a, c, g, or t
  misc_feature (1133)..(1133): n is a, c, g, or t
  misc_feature (1139)..(1139): n is a, c, g, or t
  misc_feature (1151)..(1151): n is a, c, g, or t
  misc_feature (1158)..(1162): n is a, c, g, or t
  misc_feature (1169)..(1169): n is a, c, g, or t
  misc_feature (1229)..(1229): n is a, c, g, or t
  misc_feature (1250)..(1250): n is a, c, g, or t
  misc_feature (1256)..(1256): n is a, c, g, or t
  misc_feature (1258)..(1258): n is a, c, g, or t
  misc_feature (1261)..(1261): n is a, c, g, or t
  misc_feature (1265)..(1267): n is a, c, g, or t
  misc_feature (1271)..(1271): n is a, c, g, or t
  misc_feature (1278)..(1278): n is a, c, g, or t
  misc_feature (1286)..(1286): n is a, c, g, or t
  misc_feature (1291)..(1292): n is a, c, g, or t
  misc_feature (1295)..(1295): n is a, c, g, or t
  misc_feature (1304)..(1306): n is a, c, g, or t
  misc_feature (1316)..(1316): n is a, c, g, or t
  misc_feature (1343)..(1343): n is a, c, g, or t
  misc_feature (1361)..(1361): n is a, c, g, or t
  misc_feature (1364)..(1364): n is a, c, g, or t
  misc_feature (1367)..(1367): n is a, c, g, or t
  misc_feature (1373)..(1373): n is a, c, g, or t
  misc_feature (1379)..(1379): n is a, c, g, or t
  misc_feature (1448)..(1448): n is a, c, g, or t
  misc_feature (1464)..(1464): n is a, c, g, or t
  misc_feature (1469)..(1469): n is a, c, g, or t
  misc_feature (1929)..(1929): n is a, c, g, or t
  misc_feature (1932)..(1932): n is a, c, g, or t
  misc_feature (1953)..(1953): n is a, c, g, or t
  misc_feature (1992)..(1993): n is a, c, g, or t
  misc_feature (1995)..(1996): n is a, c, g, or t
  misc_feature (2001)..(2001): n is a, c, g, or t
  misc_feature (2004)..(2005): n is a, c, g, or t
  misc_feature (2020)..(2020): n is a, c, g, or t
  misc_feature (2025)..(2026): n is a, c, g, or t
  misc_feature (2034)..(2034): n is a, c, g, or t
  misc_feature (2049)..(2049): n is a, c, g, or t
  misc_feature (2056)..(2056): n is a, c, g, or t
  misc_feature (2059)..(2059): n is a, c, g, or t
ttnnnncnnnnnnnnnnnnnnnnnnnnacnnnncnnnanannnnnnaccnncnacnancnncnncnncnnccnnnnnnnnnnnncnnnnnncnnngnngnnnntnnnnnnnnnnnnnnnnnnannannannnnnnaannngnnnnnnnnnnnnnnnnnannangannannnnnnannnnnnnnnnnnngnnnnngntnnnnnngnngncnnnnnnnnnannnnngnnnnanntnnnnnnncnncnnncnnnnnngnnnnnnnnnnnancancnnnnnnnnnnntnnnnnnannannnnnnnnannnnnnncnncnncnnnnnnttnnnnatnnnncnnnngnnnnnnnncnnnnnngnnnnnnnnnnnnntnnnnnnnncnnngntnnnannanaanancnncnnnnnnnnnnnnnnnnnnannnnnannnacannannnnnnnnnnnnnnnnnnnnnannnnnnnnnnnnngnnnnnnnnnnnnncnncnnncnnnnnnnnngnnnncnacnacnacnanncancancannnnnnnncnncannannannnnnnnnnnnnntnntnntnntnnnnnnnnngnagnngnnnnnnnngnngnngnnnnnnntgntgntgntgnngnnacnnnnaccancannnnnnnnnnnnnnnnnnnnnnnnnnnnnaangnnaacggngntggngntgctgcngcngnnnnngnnnctncnnctannnncannnangnnnnnnnnnnnnnannnnnnnncnnnnnnnnnnnnnnnnnnncnncnncnnnnnnngcnnctgctncnncnnnnnncnnnnntnnnnacnacnannntnntgcnncnncnnnnnnnnncancncnnncnnttnnnnnntnnctnctnctnntnntnatnntcnnntncntnttnntnntnntannannnnnaannntantaanaatnatnnnnnttnnaanacnacnannannnntnntnntnntcntnntnnnnnnnannannancnncnnnannnnantannnnnnnnnnnnnnannaanancannannnnnnnnnnnannantgntgnngnaanaatantnnnnnnngangannannannttnttncnnctnctacnantnnnnacgatgnnngcggcganggttanttagacttcgangttaagnnnnncgacatnaagagtggcaacgccgttgtagctgttaccaaaggtggcactgtagtttggtcttggcanttatggtttgctcctaagagngcactnanaanaatnnntgtnaccaacnatcaaggnaaaanntanaacttcacnnnagagacactnggttggaagcctaaaggcgaagttacnacctacaatgctcctcgnacngtnaaagtnaaggtngaacaaaccattgctaatggtggagcaaaactatttaccgttatcaatatcactcaaaataatggtggnaagaaggaaggtattnctacnctttatcaattcggtcgtaaagatgcactccctggtaccgatactttctacccaacaaatagttactctttcgataacaccactggtggtcgttctttaggttacgcaatccagcatccagagaatatgtttatttacgcacagactggcacatactactacgactggtgcaatgcaacttactacaacctttggtctgctgataacaccactactggtttcaacgacaacgctgtagttaaaaccgtttacgatccttgtcctgttggttttaagatgcctgcctctaatgcctttactggttttaccagcaatggtcagtatcaaagtggcgctgccaatatcaacgctaacggcacagccgactcttgggacaagttctctgcagcctacggtcataacttctataccaatggtagcaagactgcaacaatcttctttcctgcttcgggtttccgcnacnacagcgatgggtcgttgagcnatgttgggagctacggttactattggtcggcagttccgnncnncacgnacnncggttgcagcctgancttcnnctggagcnacgtgaaccctcagngcaacancanccgttcgtacgggtttgcggcacggccagtctcagaatagattgtttcatttgattaatttgattaatttgcaggcggcttttaaagccagccgcctgcacacaaaaccggctttggcggtcgaaattttttgaaaaatgggcgggtttcttatcagtattatttcatgctgagatatttttttagacttttgggagttcccgccttttaatataactatataatttaaacaaataaataacagaaattaattatgacctacaaagaaattaaaaaattagagagtgataaccttacaaagataatcctttataaggaaggtttgtttttgcgtgcctacgaaaagtctgcattttcgttgtgtaccctatatggttttaagccaattagacgtaaagtgaagtcgttaggcaatcaagatatagtttatgctggtttccctgcctcacagttgcataagtatattggtaaggaactacttgaagaacaaaatgatggaacctttgtgttagattttggtgtacctatcgaagtggagtattacgaggagtgggtaaacagaataccttacagcgaaccatctgttaagacaaagccaagcgcagacaatatgccaaaagatatagttggtaagttgcgttcattcaatttagcagatagcacaccactgcaatgtatgtcgttggtgcaagaattgcaaagtatggtgtgatatagagagagtaatgattagctattagagtttaagatagataactgatgttgttgatattccgttaaatgtaatacacaaatatggcacaatatgagaatcttcctgtgtttaaggctacatacgatttgttgcttgacttatataaaacattgaataatgttccacgcgaccttcgttacacgttggtacaagatttgaaaaacgagcttacacagttgatggtgcttatatacaaagccaatagccaacgtgaaaagacagccacattgcgcaaatgtttagatttgtttctaagtgtgcgccttcgtataaggcttttgaaagatatgcactttttgagcgttgcgcgttttgccgaactttcgctgaaaacagagattatatcgaagcaactaacaggctggcacaaccacagtgtaaagttggcaaccaaagaaggacacagcacaacgatatgagccttgcttttaatgaataacgaaaagactacacacttactaccaatgggaacaacaaaaaaaatatacgtcctgcaaaatgtttgtgggtgcgacaataaggcgatacatctataccataatacgaagaaagtttgtgaatgatgatatctgccatgaaaacatttagtttcagttaatctattttcgtgtgttggcgacgtgagtcgatggcacactttttagaacctaaagaggctattatggttaaacaattgcaataacaataaacaagacactgcttcccctctctcaggcacgcgagaatgtctacacaccacggtggtaggcagagtgtatttgtaaattcagtaacccaccagcacgtgtaaacgcacgcaaaagccctttatggcaatgtgtctcggctggttatggtacaccaatctgacgtatggttatcagtaatgttcccgcacgtcatttagagagtggttactcttacctcctgcttcgggtttccgcaacaacagcgatgggtcgttgaacaatgttgggaacaacggttactattggtcggcagttccgaacaacacgaacaacggttgcaacctgaacttcaactggagcaacgtgaaccctcagaacaacaacaaccgttcgtacgggtttgcggcacggccagtctcagcatttacagcccaatgggggagtatgtgtttttataacctatatttatggacgacacagtattgttatacgacgtatttgatgcttactatgatgcac

SEQ ID NO: 398 - DNA, 4000 bp, Escherichia coli
  misc_feature (1991)..(1992): n is a, c, g, or t
gctttttgcgggcattggcctcttcgtcgtttgtctcaagtgcaaaacctgcaagtatctgtcccggctttttgatacggcccaggtctgcagctatatctgggtttggtaccagcttgagcaccaactcatctcccgacctttttatcttttgttcctcagcttttgcgggacgatagtcacttactgcagccgacataacagcaccatctgccccttgaaaatgcgcaaggcattccctatgcatctcaagagctgagtgaacatctatacgattgatattgggattctttgtcttcagacttaccgggccacagacaaggtcaaccagagcaccacgcgatgccagctcctcagctattgcaaaacccatcttaccagaggagtagtttccaacaaacctcacagggtctattgcttcataagttggtcctgcgctcacaaggaagcgtttgcccgacagtatgccggaactttccttagcggcaaagtatgacttaagcctttcgacgatagcctcaggttcctccatcctacctttacccaacaatccacttgcaagttcaccaacccccggttcgataacctcacaaccatatgttttaagcttttcaatattgttgaccgtcgaagggtggctgaacatgtcaaggtccatcgcaggggctataaataccttacaacgtgcagaaagataggtagccaccaaaagattatcggccagaccattgaccatcttggcgagtgtcgaggccgtggccggtgcaatcagcatggcgtcagcccagattccaaaatccacatggctgtgccaggtcccgtcgttggctccgaaaaattcggatagtactggtttacctgataaggccgaaagggtaaccggcgtaataaactccttgcctgcaggggtaatgataacctgtacctctgcaccctccttaacaagaagccggagcagtaatgcagccttgtaggctgcaatgcttccggtcactccaagtactattttcttcccttttagcatcttcaggtatagaagtgataaggggacttattcggctgattctgccttttcgcccttaccgggtttgcggtaataaatcttaccttcgagaaattcctcaacacctatagcagaaggcttgggcaatctctcataaaagcgtgatatttctatttgctccctgttttcaaacacctcttcgaggttgtcggtataggaggcaaactcctggagcttacggttaagctcttccttcatatcaaccccgatctggttagcacgtctggcaataatattgattgtctcatagatattgcctgtttgctcgcttagcttgcgggtgtcgtaggtaatggtgtttcccggagcttttgactttttaaaatccatatctgcaaactataattaagactattgattactacttgttgttgatttaagcaatttgtttatgtcctgaaagattttgttggcattgctaagatacgcactttcagggtattcgtttataaaagaataatattcatcaagagtatcccttagacgctcatccttcttggcctcaacactgttgacagcctctttgtacttggcatcaaggatcaggaaataaagctcttccctgtattttgtatcgggaaaatcatcaagagtgttacgggctgtaattactgctgacagataattgttacccagatatgatcccaaatcataatacatctttgcatttagataagccttgtatgccagtttgtcacgcaactcatccataaaagctgtcgcttccttaacccttttgcttgtgggataaagattgataaacagctgaaaaccttcaagtgctttatttgtctcagtctgatccagacgggctgtaggtgaaagcatgtaactacagtatgctgcattaaactgagcctcttctgcatatgcactgctgggatagctttgaacaaagactgtaaaataatgaccagcaagcacatannccctggtcttgagaaggcaatctgcatagatatagtgagataactcacccctctcagtagcccggtagctcctcatcacatcattgaaaagagttgcagcccttttataatccccattgttatagtattccattgccttctcaaacttcaaatcggtatcattgctctttaaaagcttttgataattactgcatgaagtgctcaggattagcaaggtaaaaaagagtactccccttacaagctgacttttattcatagttattttctgtagtttttcaacaggagccatacctggaaacatcctgcaaaaatagataattccacgtaattccccaataaatgatttctttaatttatagcactatgaccatagcgggtcatagcgctacaaggataagcaaaattcagaccatcttttaaggcatatgcaggcaaataccgaaaaaaataaaaaacccttggcgactaaggtgaatatataaaaaaacttacctttgccttagaaataattaaaaccttattaacgtggatatttttgataagatacacacaagtatgggccctttgggccaatatggtaaagaagcccatggttatttcatgttccccaaacttgaaggggaaattcatcctagaatgaagttccgcggtaaggaagttcttacctggagtttgaacaactaccttggattggccaaccatcctgaagtgcgcaaggctgatgctgatgctgcaaaggaatacggactgggctatcctatgggtgccaggatgatgtcaggacataccagcaagcacgaggaactggaagctcagctcgctgattttgtcggaaaggaagatgcttatcttctcaacttcggttatcagggtatgatttcaattatcgacactctggtaaatcgaaatgatgtcatcgtatacgactctgagtcgcatgcttgtatcatcgacggtctgaggttgcatatgggtaaacgcttcgttttcccacacaataacattgagaacctacacaaacagctacaaagggcaacagaactagcagaaaaacaaggtggtggagtactcgtaatcactgaaggtgtattcggtatggccggtgaccttggtaagcttgatgaaatcgtagccctcaagaaggaatttaacttccgcattctggttgacgatgctcacggttttggtaccatgggtaagaccggtgccggtactgcagaacacttcggcgttgctgatcagatagaccttatcttcggaaccttcgccaaatcaatggctagcataggagctttcgttgccggtcgtgaagatgtaatcagctacctgcgctataatatgcgctcacagatctttgccaagtcactgccaatgccattggttatcggtgctctgaagcgtctggaactggttcgcacacaacctgaactgcgtgaaaacctgtggaatgtagtacacaacctgcaaaagggtctgcgcgaacaaggcttcgaccttggccacactcaaagtccggttactccggtgtacctcaacggtactattccagaggctaccgaacttactatggacctgagggaaaactacagcatcttctgctctattgttgtttatcccgttgttccaaagggtgttatcatgcttcgtattatcccgacagcagttcacactctcgaagacgtggattacactatcaaagcatttgctgagattaaggaaaagcttgctgccggtaagtacaaagccgacaagatcgcaagcatctgataatattgcgagtcatcctgattagggtaatgtttattcattatatctgaattaggttgatgagacttttaaagaaaaagaggttgtccccaccgggacagcctctttttctttaccggagcctattgaccggaatctcgtatttgttgtacctttacccttgaattaaccaaaaaaggaacaccatgaaaaggattgttagtacactatttcttagcattttaatcactacccttggaat

SEQ ID NO: 399 - DNA, 4000 bp, Escherichia coli
  misc_feature (12)..(12): n is a, c, g, or t
  misc_feature (48)..(48): n is a, c, g, or t
  misc_feature (92)..(92): n is a, c, g, or t
  misc_feature (94)..(94): n is a, c, g, or t
  misc_feature (154)..(154): n is a, c, g, or t
  misc_feature (344)..(344): n is a, c, g, or t
  misc_feature (371)..(371): n is a, c, g, or t
  misc_feature (383)..(383): n is a, c, g, or t
  misc_feature (554)..(554): n is a, c, g, or t
  misc_feature (1989)..(1989): n is a, c, g, or t
  misc_feature (3293)..(3294): n is a, c, g, or t
  misc_feature (3680)..(3680): n is a, c, g, or t
  misc_feature (3884)..(3884): n is a, c, g, or t
ttagattaagtnatttagttaaaggatttgatatgaaaatattagtanattccaaatcacttgaatcaagaaaaaaagattttccacatgtnancaatgtaagttttgatgaactaattggcgctagcgatataattagctttcattgtaaagnagcagctgatggcaaacctttaataacaaaagaacattataaaaaaatgaaaccgactgcttatataattaatgcggcacgcggtaatatagttgatgaaaaagatttaaatgatgctttaaataaaaacttaatagccggggccgcagtagatgttttttcaaaagaaccaaccaaagaaaatattttntttaataacccaaaagctatattaacncctcatatagcngcctcaacaacagaagcttcaataactgtagctgaaatgatagcaaaccaaatatcaaatttcttaataaaaggtgttaaaattaatacggtatagttcgattatttaatggtagatttaagtattgtgatgagtgcagaaatctatagttgtcaaataatcagttaaganttatccataagaaaaattaagaaaataatgaaaaatctttaacttattaactattttgggttaaattttgagtttaatctttttaaactagagtttattatttagactagagtttgttttataaaaaattttatgtttgaaaaattagaagaattagcaaagaataataaaaaaatttcagattttcatataagaagtggctcgccattagcatataggcaaactggtgaaatttataaagtaaaagaagttgtggttaaatcacaagatcttatggatcttatgtctaccaactgcaatgaggtagaaacaaaaaggtttcaagaaactcacgaattagactcttctgttacattaagtggattaagatttagagcaaacttttacaaaacaattaatggacctgctgccgttcttagaagagtggaaactgtaatgcccgaaatggctcaatttgatttgccacaagtgctttatgacatcgttgatatgcacaaaggattagttttagtaaccggaccaactggctctggaaaatcgacaacactcgctgcaattgttaatgagataaataaaacaagaacttcgaacataattacagttgaagatccagtagaatttattcataaagatattaaaagtattgtatctcatagagaagttggaaaacaaacacaaacctttgcaagtgctttaaaagcagcattaagagaagatccagatgtcatacttgttggagagatgcgagatttagaaacagttggacttgcattaacggcagctgagacaggacacctagtttttggaacactgcatacaagtggtgccccaagtacaataaatagaattatagacgtatttccacctgagcaacaagcacagatacgtgcacagatctcaacatctttaaaaatggttgtgacacaaagattgttaaaaacaaaagacggccaaggtcgtgttggtgcttttgaagtgatgaaatgtactgcccctattcaaaacttaattagagaatctaaaattcatcaaattccaagcatcatgcaaacttcagtcaaagatggtatgataaccatgacaaagacattagaagaacttgttaaagcaggcaaaatagatgcagcagctggaaaagaacattaaaggttttaatatattagaactattggtagtagttgcaattataggaattgtatctgctgttgcatatcctaatttttctgactggagaaaagaaagagaagctagagctgcaacacttaaagtaaaaaatttaattcaagggattaatgcacaagttcaaagaggtctatacgcatttgttcaggttcatgtagaagctcaagctgataatttaactataatttcaaagggaatgaaaatggctacacttactccaaaaataaatgatggagaaagtgattggtacaancattatgaatcaagatgcgatatcgattcagatacttactgggatgatgatggatctatagatgataagttagaagttattcaaattgaattagatgaagttacaaccacttttgccagtggaattggtgctgtttgtttttcaaaaaatgtaagatggtatagtggtggaggcaactttgttactaccagcggaggagagacgagcgttgatagtatattatttctttgcacaagaaactcagattttgcaacttgtgatattaacaacgctaatggtgaacctaatagagatcatgataatttatttttagttgaatggacaagatttggagaagtgacaatggaaaaatggagcattagagaagacgaatggatactacaataacaaatgataaaaaaaattaaaaatattttaggtttaactatacttgagtctcttgtttctactgcaatagtgggaatagggtttattgcaatcctacaaatgactaatttttcagttcaatcaattgatagttccggagagagaacaaaagcaaattatttagtaagcatgttggcagaagatgttattggacacagaaatactatttatggagcaagctctcaggcagaaggaattaccatgggtgttgatggcacaattaaacttgtaaatactgatggaagtatgacagaagtagacaaatttgttgaccatttagtgggtcaagattttattgctaatgaaggtgcaggagcatgcggtgatggcactacatcaggcataatatcttcagagtcaaatatttacgaaacccaagaagttgatgcaccaagaaataaagaatctaagtggaaagcaatatttaatgataatcgatatttaaaatgcaggggagacaaagacatcaaaaaaatgaaagtttataaaatatgcaaatgggccggagtatgttctcatataaataacgatgttactgatgatggaatgtacattggtagaattcaaattaacttaaacaatggcagaaaaagaaaatatctgtatttccaagcagattataaaattagaaaataatgaaaaaaaatactcttaaaaatattgctggattaactttaatagaaattcttataggtgttgtaatctcatcgattatgatggcagcgatgtacacaacctactcagttgtaaataatagttatggacaagttactgatcgagcaaaaataagtcgttcaggaagagatatagttgaaatgctgatgagagacataagaatggcaggatttaaatatatgcttggaacgaataaccttggnntttcaacaagaagttatttagaatttaaaggtggacatacttcgttatccgaaagccacgatccaataataattgtcaaaagtgaattaggttatacaagagcagatttgggaacggatcctacaccacctcctaaacataatgcagccgatttatgctgtgataaaatacatattgtttatgatgactttaaccaaaatgatgaagaacaaccttacaaaaggtacaaaattacctactttgctgcaccagcagattattatcccgatggtgaaatagattttgaagatccaagatatgcagtttacaaaactttagaaagttggaagcaagttataggctctgatggagtaccaaatgaaacaggaagttggattgatgattgnaccgagtgctataaggcacaaaaaattcgtgaccatgtagttgatatggaattcattgccttcaatcatgaaggaagaataattaacccaaacgatgcaaggccagacaacgctgatgcagacagaagagcaaaaatttatgatacaagggcagtagatgtaagattgacatttagatcaaaaaatgaattttttagatttgcnccatctgccagtaaaccaagattagtaaaaggacttagcgatagaactatagaatttttggataaatatttaagagattcggttgtagttacaattcatacaagaaacattggtga

SEQ ID NO: 400 - DNA, 4000 bp, Escherichia coli
  misc_feature (54)..(54): n is a, c, g, or t
  misc_feature (111)..(111): n is a, c, g, or t
  misc_feature (1195)..(1195): n is a, c, g, or t
  misc_feature (1224)..(1224): n is a, c, g, or t
  misc_feature (1245)..(1245): n is a, c, g, or t
  misc_feature (1278)..(1278): n is a, c, g, or t
  misc_feature (1308)..(1308): n is a, c, g, or t
  misc_feature (1344)..(1344): n is a, c, g, or t
  misc_feature (1365)..(1365): n is a, c, g, or t
  misc_feature (1407)..(1407): n is a, c, g, or t
  misc_feature (1422)..(1422): n is a, c, g, or t
  misc_feature (1964)..(1964): n is a, c, g, or t
  misc_feature (1966)..(1969): n is a, c, g, or t
  misc_feature (1971)..(1974): n is a, c, g, or t
  misc_feature (1976)..(1982): n is a, c, g, or t
  misc_feature (1984)..(1992): n is a, c, g, or t
  misc_feature (2041)..(2047): n is a, c, g, or t
  misc_feature (2049)..(2052): n is a, c, g, or t
  misc_feature (2054)..(2054): n is a, c, g, or t
  misc_feature (2056)..(2063): n is a, c, g, or t
  misc_feature (2065)..(2067): n is a, c, g, or t
  misc_feature (2120)..(2124): n is a, c, g, or t
  misc_feature (2126)..(2135): n is a, c, g, or t
  misc_feature (2137)..(2138): n is a, c, g, or t
  misc_feature (2140)..(2140): n is a, c, g, or t
  misc_feature (2142)..(2147): n is a, c, g, or t
  misc_feature (2195)..(2196): n is a, c, g, or t
  misc_feature (2198)..(2209): n is a, c, g, or t
  misc_feature (2211)..(2225): n is a, c, g, or t
  misc_feature (2227)..(2228): n is a, c, g, or t
  misc_feature (2230)..(2231): n is a, c, g, or t
  misc_feature (2233)..(2237): n is a, c, g, or t
  misc_feature (2239)..(2241): n is a, c, g, or t
  misc_feature (2244)..(2244): n is a, c, g, or t
  misc_feature (2246)..(2252): n is a, c, g, or t
  misc_feature (2256)..(2257): n is a, c, g, or t
  misc_feature (2259)..(2261): n is a, c, g, or t
  misc_feature (2264)..(2268): n is a, c, g, or t
  misc_feature (2270)..(2277): n is a, c, g, or t
  misc_feature (2279)..(2297): n is a, c, g, or t
  misc_feature (2299)..(2302): n is a, c, g, or t
  misc_feature (2305)..(2305): n is a, c, g, or t
  misc_feature (2308)..(2308): n is a, c, g, or t
  misc_feature (2349)..(2349): n is a, c, g, or t
  misc_feature (2351)..(2351): n is a, c, g, or t
  misc_feature (2353)..(2357): n is a, c, g, or t
  misc_feature (2359)..(2359): n is a, c, g, or t
  misc_feature (2361)..(2363): n is a, c, g, or t
  misc_feature (2365)..(2366): n is a, c, g, or t
  misc_feature (2368)..(2368): n is a, c, g, or t
  misc_feature (2371)..(2371): n is a, c, g, or t
  misc_feature (2373)..(2375): n is a, c, g, or t
  misc_feature (2379)..(2379): n is a, c, g, or t
  misc_feature (2382)..(2382): n is a, c, g, or t
  misc_feature (2385)..(2385): n is a, c, g, or t
  misc_feature (2387)..(2391): n is a, c, g, or t
  misc_feature (2395)..(2395): n is a, c, g, or t
  misc_feature (2398)..(2398): n is a, c, g, or t
  misc_feature (2400)..(2404): n is a, c, g, or t
  misc_feature (2406)..(2406): n is a, c, g, or t
  misc_feature (2410)..(2411): n is a, c, g, or t
  misc_feature (2413)..(2415): n is a, c, g, or t
  misc_feature (2418)..(2419): n is a, c, g, or t
  misc_feature (2422)..(2422): n is a, c, g, or t
  misc_feature (2426)..(2428): n is a, c, g, or t
  misc_feature (2430)..(2432): n is a, c, g, or t
  misc_feature (2436)..(2437): n is a, c, g, or t
  misc_feature (2440)..(2441): n is a, c, g, or t
  misc_feature (2443)..(2443): n is a, c, g, or t
  misc_feature (2445)..(2449): n is a, c, g, or t
  misc_feature (2451)..(2451): n is a, c, g, or t
  misc_feature (2453)..(2454): n is a, c, g, or t
  misc_feature (2456)..(2456): n is a, c, g, or t
  misc_feature (2459)..(2459): n is a, c, g, or t
  misc_feature (2462)..(2462): n is a, c, g, or t
  misc_feature (2464)..(2468): n is a, c, g, or t
  misc_feature (2472)..(2472): n is a, c, g, or t
  misc_feature (2475)..(2475): n is a, c, g, or t
  misc_feature (2477)..(2481): n is a, c, g, or t
  misc_feature (2483)..(2483): n is a, c, g, or t
  misc_feature (2487)..(2488): n is a, c, g, or t
  misc_feature (2490)..(2492): n is a, c, g, or t
  misc_feature (2495)..(2496): n is a, c, g, or t
  misc_feature (2499)..(2499): n is a, c, g, or t
  misc_feature (2502)..(2509): n is a, c, g, or t
  misc_feature (2511)..(2511): n is a, c, g, or t
  misc_feature (2515)..(2515): n is a, c, g, or t
  misc_feature (2519)..(2522): n is a, c, g, or t
  misc_feature (2526)..(2526): n is a, c, g, or t
  misc_feature (2530)..(2532): n is a, c, g, or t
  misc_feature (2542)..(2542): n is a, c, g, or t
  misc_feature (2544)..(2544): n is a, c, g, or t
  misc_feature (2549)..(2549): n is a, c, g, or t
  misc_feature (2552)..(2552): n is a, c, g, or t
  misc_feature (2554)..(2558): n is a, c, g, or t
  misc_feature (2560)..(2560): n is a, c, g, or t
  misc_feature (2564)..(2565): n is a, c, g, or t
  misc_feature (2568)..(2569): n is a, c, g, or t
  misc_feature (2573)..(2573): n is a, c, g, or t
  misc_feature (2579)..(2586): n is a, c, g, or t
  misc_feature (2588)..(2589): n is a, c, g, or t
  misc_feature (2591)..(2591): n is a, c, g, or t
  misc_feature (2593)..(2594): n is a, c, g, or t
  misc_feature (2596)..(2596): n is a, c, g, or t
  misc_feature (2598)..(2599): n is a, c, g, or t
  misc_feature (2601)..(2605): n is a, c, g, or t
  misc_feature (2607)..(2608): n is a, c, g, or t
  misc_feature (2619)..(2619): n is a, c, g, or t
  misc_feature (2621)..(2621): n is a, c, g, or t
  misc_feature (2626)..(2626): n is a, c, g, or t
  misc_feature (2628)..(2628): n is a, c, g, or t
  misc_feature (2630)..(2630): n is a, c, g, or t
  misc_feature (2634)..(2635): n is a, c, g, or t
  misc_feature (2637)..(2637): n is a, c, g, or t
  misc_feature (2640)..(2641): n is a, c, g, or t
  misc_feature (2645)..(2646): n is a, c, g, or t
  misc_feature (2650)..(2650): n is a, c, g, or t
  misc_feature (2654)..(2654): n is a, c, g, or t
  misc_feature (2656)..(2660): n is a, c, g, or t
  misc_feature (2662)..(2663): n is a, c, g, or t
  misc_feature (2665)..(2666): n is a, c, g, or t
  misc_feature (2668)..(2668): n is a, c, g, or t
  misc_feature (2670)..(2681): n is a, c, g, or t
  misc_feature (2683)..(2683): n is a, c, g, or t
  misc_feature (2687)..(2687): n is a, c, g, or t
  misc_feature (2690)..(2690): n is a, c, g, or t
  misc_feature (2693)..(2693): n is a, c, g, or t
  misc_feature (2695)..(2696): n is a, c, g, or t
  misc_feature (2698)..(2700): n is a, c, g, or t
  misc_feature (2703)..(2703): n is a, c, g, or t
  misc_feature (2705)..(2705): n is a, c, g, or t
  misc_feature (2707)..(2707): n is a, c, g, or t
  misc_feature (2711)..(2712): n is a, c, g, or t
  misc_feature (2714)..(2714): n is a, c, g, or t
  misc_feature (2717)..(2718): n is a, c, g, or t
  misc_feature (2722)..(2723): n is a, c, g, or t
  misc_feature (2726)..(2727): n is a, c, g, or t
  misc_feature (2733)..(2734): n is a, c, g, or t
  misc_feature (2737)..(2738): n is a, c, g, or t
  misc_feature (2740)..(2746): n is a, c, g, or t
  misc_feature (2748)..(2749): n is a, c, g, or t
  misc_feature (2751)..(2752): n is a, c, g, or t
  misc_feature (2754)..(2757): n is a, c, g, or t
  misc_feature (2759)..(2760): n is a, c, g, or t
  misc_feature (2762)..(2762): n is a, c, g, or t
  misc_feature (2764)..(2764): n is a, c, g, or t
  misc_feature (2767)..(2767): n is a, c, g, or t
  misc_feature (2770)..(2770): n is a, c, g, or t
  misc_feature (2772)..(2773): n is a, c, g, or t
  misc_feature (2775)..(2777): n is a, c, g, or t
  misc_feature (2780)..(2780): n is a, c, g, or t
  misc_feature (2782)..(2782): n is a, c, g, or t
  misc_feature (2784)..(2784): n is a, c, g, or t
  misc_feature (2788)..(2789): n is a, c, g, or t
  misc_feature (2791)..(2791): n is a, c, g, or t
  misc_feature (2794)..(2795): n is a, c, g, or t
  misc_feature (2799)..(2800): n is a, c, g, or t
  misc_feature (2803)..(2804): n is a, c, g, or t
  misc_feature (2809)..(2812): n is a, c, g, or t
  misc_feature (2815)..(2823): n is a, c, g, or t
  misc_feature (2826)..(2826): n is a, c, g, or t
  misc_feature (2829)..(2829): n is a, c, g, or t
  misc_feature (2831)..(2831): n is a, c, g, or t
  misc_feature (2833)..(2833): n is a, c, g, or t
  misc_feature (2835)..(2836): n is a, c, g, or t
  misc_feature (2839)..(2841): n is a, c, g, or t
  misc_feature (2844)..(2844): n is a, c, g, or t
  misc_feature (2846)..(2847): n is a, c, g, or t
  misc_feature (2849)..(2850): n is a, c, g, or t
  misc_feature (2852)..(2852): n is a, c, g, or t
  misc_feature (2857)..(2858): n is a, c, g, or t
  misc_feature (2860)..(2860): n is a, c, g, or t
  misc_feature (2862)..(2865): n is a, c, g, or t
  misc_feature (2868)..(2868): n is a, c, g, or t
  misc_feature (2870)..(2873): n is a, c, g, or t
  misc_feature (2876)..(2877): n is a, c, g, or t
  misc_feature (2881)..(2882): n is a, c, g, or t
  misc_feature (2884)..(2884): n is a, c, g, or t
  misc_feature (2887)..(2889): n is a, c, g, or t
  misc_feature (2891)..(2894): n is a, c, g, or t
  misc_feature (2896)..(2896): n is a, c, g, or t
  misc_feature (2898)..(2900): n is a, c, g, or t
  misc_feature (2902)..(2908): n is a, c, g, or t
  misc_feature (2910)..(2914): n is a, c, g, or t
  misc_feature (2923)..(2924): n is a, c, g, or t
  misc_feature (2926)..(2927): n is a, c, g, or t
  misc_feature (2929)..(2930): n is a, c, g, or t
  misc_feature (2932)..(2932): n is a, c, g, or t
  misc_feature (2934)..(2936): n is a, c, g, or t
  misc_feature (2938)..(2938): n is a, c, g, or t
  misc_feature (2943)..(2943): n is a, c, g, or t
  misc_feature (2945)..(2949): n is a, c, g, or t
  misc_feature (2953)..(2954): n is a, c, g, or t
  misc_feature (2957)..(2957): n is a, c, g, or t
  misc_feature (2961)..(2961): n is a, c, g, or t
  misc_feature (2963)..(2967): n is a, c, g, or t
  misc_feature (2970)..(2977): n is a, c, g, or t
  misc_feature (2979)..(2983): n is a, c, g, or t
  misc_feature (2985)..(2987): n is a, c, g, or t
  misc_feature (2990)..(2991): n is a, c, g, or t
  misc_feature (3003)..(3003): n is a, c, g, or t
  misc_feature (3005)..(3005): n is a, c, g, or t
  misc_feature (3010)..(3018): n is a, c, g, or t
  misc_feature (3023)..(3026): n is a, c, g, or t
  misc_feature (3029)..(3031): n is a, c, g, or t
  misc_feature (3034)..(3034): n is a, c, g, or t
  misc_feature (3039)..(3040): n is a, c, g, or t
  misc_feature (3042)..(3043): n is a, c, g, or t
  misc_feature (3045)..(3045): n is a, c, g, or t
  misc_feature (3047)..(3049): n is a, c, g, or t
  misc_feature (3051)..(3051): n is a, c, g, or t
  misc_feature (3053)..(3055): n is a, c, g, or t
  misc_feature (3057)..(3061): n is a, c, g, or t
  misc_feature (3067)..(3070): n is a, c, g, or t
  misc_feature (3072)..(3072): n is a, c, g, or t
  misc_feature (3074)..(3074): n is a, c, g, or t
  misc_feature (3078)..(3079): n is a, c, g, or t
  misc_feature (3081)..(3084): n is a, c, g, or t
  misc_feature (3089)..(3089): n is a, c, g, or t
  misc_feature (3091)..(3092): n is a, c, g, or t
  misc_feature (3098)..(3101): n is a, c, g, or t
  misc_feature (3103)..(3103): n is a, c, g, or t
  misc_feature (3105)..(3105): n is a, c, g, or t
  misc_feature (3107)..(3113): n is a, c, g, or t
  misc_feature (3115)..(3115): n is a, c, g, or t
  misc_feature (3118)..(3123): n is a, c, g, or t
  misc_feature (3125)..(3129): n is a, c, g, or t
  misc_feature (3132)..(3137): n is a, c, g, or t
  misc_feature (3139)..(3140): n is a, c, g, or t
  misc_feature (3142)..(3144): n is a, c, g, or t
  misc_feature (3148)..(3148): n is a, c, g, or t
  misc_feature (3151)..(3155): n is a, c, g, or t
  misc_feature (3157)..(3158): n is a, c, g, or t
  misc_feature (3160)..(3160): n is a, c, g, or t
  misc_feature (3162)..(3163): n is a, c, g, or t
  misc_feature (3165)..(3167): n is a, c, g, or t
  misc_feature (3169)..(3169): n is a, c, g, or t
  misc_feature (3171)..(3173): n is a, c, g, or t
  misc_feature (3175)..(3175): n is a, c, g, or t
  misc_feature (3178)..(3178): n is a, c, g, or t
  misc_feature (3181)..(3185): n is a, c, g, or t
  misc_feature (3187)..(3187): n is a, c, g, or t
  misc_feature (3190)..(3192): n is a, c, g, or t
  misc_feature (3194)..(3198): n is a, c, g, or t
  misc_feature (3200)..(3200): n is a, c, g, or t
  misc_feature (3203)..(3205): n is a, c, g, or t
  misc_feature (3207)..(3210): n is a, c, g, or t
  misc_feature (3212)..(3212): n is a, c, g, or t
  misc_feature (3214)..(3214): n is a, c, g, or t
  misc_feature (3216)..(3216): n is a, c, g, or t
  misc_feature (3218)..(3218): n is a, c, g, or t
  misc_feature (3220)..(3220): n is a, c, g, or t
  misc_feature (3222)..(3223): n is a, c, g, or t
  misc_feature (3225)..(3226): n is a, c, g, or t
  misc_feature (3229)..(3230): n is a, c, g, or t
  misc_feature (3232)..(3233): n is a, c, g, or t
  misc_feature (3238)..(3245): n is a, c, g, or t
  misc_feature (3247)..(3247): n is a, c, g, or t
  misc_feature (3249)..(3249): n is a, c, g, or t
  misc_feature (3251)..(3251): n is a, c, g, or t
  misc_feature (3254)..(3255): n is a, c, g, or t
  misc_feature (3257)..(3258): n is a, c, g, or t
  misc_feature (3260)..(3275): n is a, c, g, or t
  misc_feature (3278)..(3278): n is a, c, g, or t
  misc_feature (3280)..(3280): n is a, c, g, or t
  misc_feature (3282)..(3284): n is a, c, g, or t
  misc_feature (3286)..(3287): n is a, c, g, or t
  misc_feature (3289)..(3290): n is a, c, g, or t
  misc_feature (3292)..(3296): n is a, c, g, or t
  misc_feature (3299)..(3300): n is a, c, g, or t
  misc_feature (3303)..(3303): n is a, c, g, or t
  misc_feature (3305)..(3315): n is a, c, g, or t
  misc_feature (3317)..(3322): n is a, c, g, or t
  misc_feature (3324)..(3325): n is a, c, g, or t
  misc_feature (3327)..(3329): n is a, c, g, or t
  misc_feature (3331)..(3333): n is a, c, g, or t
  misc_feature (3335)..(3335): n is a, c, g, or t
  misc_feature (3338)..(3338): n is a, c, g, or t
  misc_feature (3340)..(3340): n is a, c, g, or t
  misc_feature (3342)..(3342): n is a, c, g, or t
  misc_feature (3345)..(3347): n is a, c, g, or t
  misc_feature (3349)..(3350): n is a, c, g, or t
  misc_feature (3352)..(3361): n is a, c, g, or t
  misc_feature (3364)..(3367): n is a, c, g, or t
  misc_feature (3369)..(3371): n is a, c, g, or t
  misc_feature (3373)..(3374): n is a, c, g, or t
  misc_feature (3376)..(3381): n is a, c, g, or t
  misc_feature (3385)..(3387): n is a, c, g, or t
  misc_feature (3390)..(3390): n is a, c, g, or t
  misc_feature (3394)..(3394): n is a, c, g, or t
  misc_feature (3396)..(3405): n is a, c, g, or t
  misc_feature (3407)..(3407): n is a, c, g, or t
  misc_feature (3409)..(3413): n is a, c, g, or t
  misc_feature (3415)..(3421): n is a, c, g, or t
  misc_feature (3423)..(3423): n is a, c, g, or t
  misc_feature (3425)..(3426): n is a, c, g, or t
  misc_feature (3428)..(3429): n is a, c, g, or t
  misc_feature (3431)..(3432): n is a, c, g, or t
  misc_feature (3434)..(3438): n is a, c, g, or t
  misc_feature (3440)..(3448): n is a, c, g, or t
  misc_feature (3450)..(3454): n is a, c, g, or t
  misc_feature (3457)..(3463): n is a, c, g, or t
  misc_feature (3468)..(3469): n is a, c, g, or t
  misc_feature (3472)..(3472): n is a, c, g, or t
  misc_feature (3474)..(3474): n is a, c, g, or t
  misc_feature (3476)..(3482): n is a, c, g, or t
  misc_feature (3485)..(3486): n is a, c, g, or t
  misc_feature (3488)..(3489): n is a, c, g, or t
  misc_feature (3491)..(3500): n is a, c, g, or t
  misc_feature (3502)..(3509): n is a, c, g, or t
  misc_feature (3513)..(3520): n is a, c, g, or t
  misc_feature (3523)..(3531): n is a, c, g, or t
  misc_feature (3533)..(3534): n is a, c, g, or t
  misc_feature (3536)..(3537): n is a, c, g, or t
  misc_feature (3540)..(3541): n is a, c, g, or t
  misc_feature (3543)..(3544): n is a, c, g, or t
  misc_feature (3546)..(3556): n is a, c, g, or t
  misc_feature (3559)..(3565): n is a, c, g, or t
  misc_feature (3567)..(3569): n is a, c, g, or t
  misc_feature (3571)..(3575): n is a, c, g, or t
  misc_feature (3577)..(3577): n is a, c, g, or t
  misc_feature (3580)..(3586): n is a, c, g, or t
  misc_feature (3589)..(3598): n is a, c, g, or t
  misc_feature (3600)..(3608): n is a, c, g, or t
  misc_feature (3610)..(3611): n is a, c, g, or t
  misc_feature (3614)..(3625): n is a, c, g, or t
  misc_feature (3627)..(3629): n is a, c, g, or t
  misc_feature (3631)..(3636): n is a, c, g, or t
  misc_feature (3639)..(3640): n is a, c, g, or t
  misc_feature (3642)..(3644): n is a, c, g, or t
  misc_feature (3647)..(3649): n is a, c, g, or t
  misc_feature (3651)..(3651): n is a, c, g, or t
  misc_feature (3653)..(3658): n is a, c, g, or t
  misc_feature (3660)..(3678): n is a, c, g, or t
  misc_feature (3680)..(3683): n is a, c, g, or t
  misc_feature (3685)..(3686): n is a, c, g, or t
  misc_feature (3689)..(3706): n is a, c, g, or t
  misc_feature (3708)..(3712): n is a, c, g, or t
  misc_feature (3715)..(3722): n is a, c, g, or t
  misc_feature (3725)..(3726): n is a, c, g, or t
  misc_feature (3729)..(3730): n is a, c, g, or t
  misc_feature (3732)..(3735): n is a, c, g, or t
  misc_feature (3739)..(3739): n is a, c, g, or t
  misc_feature (3743)..(3743): n is a, c, g, or t
  misc_feature (3745)..(3745): n is a, c, g, or t
  misc_feature (3749)..(3750): n is a, c, g, or t
  misc_feature (3753)..(3753): n is a, c, g, or t
  misc_feature (3759)..(3760): n is a, c, g, or t
  misc_feature (3763)..(3765): n is a, c, g, or t
  misc_feature (3768)..(3768): n is a, c, g, or t
  misc_feature (3770)..(3770): n is a, c, g, or t
  misc_feature (3773)..(3774): n is a, c, g, or t
  misc_feature (3776)..(3776): n is a, c, g, or t
  misc_feature (3778)..(3779): n is a, c, g, or t
  misc_feature (3781)..(3782): n is a, c, g, or t
  misc_feature (3784)..(3786): n is a, c, g, or t
  misc_feature (3788)..(3791): n is a, c, g, or t
  misc_feature (3794)..(3796): n is a, c, g, or t
  misc_feature (3799)..(3803): n is a, c, g, or t
  misc_feature (3805)..(3809): n is a, c, g, or t
  misc_feature (3811)..(3813): n is a, c, g, or t
  misc_feature (3815)..(3818): n is a, c, g, or t
  misc_feature (3820)..(3820): n is a, c, g, or t
  misc_feature (3823)..(3823): n is a, c, g, or t
  misc_feature (3825)..(3825): n is a, c, g, or t
  misc_feature (3828)..(3828): n is a, c, g, or t
  misc_feature (3830)..(3832): n is a, c, g, or t
  misc_feature (3836)..(3836): n is a, c, g, or t
  misc_feature (3839)..(3840): n is a, c, g, or t
  misc_feature (3842)..(3848): n is a, c, g, or t
  misc_feature (3850)..(3858): n is a, c, g, or t
  misc_feature (3860)..(3861): n is a, c, g, or t
  misc_feature (3864)..(3865): n is a, c, g, or t
  misc_feature (3868)..(3872): n is a, c, g, or t
  misc_feature (3876)..(3876): n is a, c, g, or t
  misc_feature (3878)..(3878): n is a, c, g, or t
  misc_feature (3881)..(3882): n is a, c, g, or t
  misc_feature (3884)..(3892): n is a, c, g, or t
  misc_feature (3894)..(3894): n is a, c, g, or t
  misc_feature (3898)..(3898): n is a, c, g, or t
  misc_feature (3901)..(3903): n is a, c, g, or t
  misc_feature (3906)..(3906): n is a, c, g, or t
  misc_feature (3909)..(3912): n is a, c, g, or t
  misc_feature (3916)..(3916): n is a, c, g, or t
  misc_feature (3919)..(3920): n is a, c, g, or t
  misc_feature (3923)..(3924): n is a, c, g, or t
  misc_feature (3927)..(3929): n is a, c, g, or t
  misc_feature (3931)..(3935): n is a, c, g, or t
  misc_feature (3937)..(3942): n is a, c, g, or t
  misc_feature (3944)..(3944): n is a, c, g, or t
  misc_feature (3948)..(3949): n is a, c, g, or t
  misc_feature (3952)..(3952): n is a, c, g, or t
  misc_feature (3954)..(3954): n is a, c, g, or t
  misc_feature (3956)..(3956): n is a, c, g, or t
  misc_feature (3959)..(3959): n is a, c, g, or t
  misc_feature (3961)..(3962): n is a, c, g, or t
  misc_feature (3964)..(3965): n is a, c, g, or t
  misc_feature (3971)..(3974): n is a, c, g, or t
  misc_feature (3978)..(3980): n is a, c, g, or t
  misc_feature (3984)..(3985): n is a, c, g, or t
  misc_feature (3988)..(3991): n is a, c, g, or t
  misc_feature (3994)..(3995): n is a, c, g, or t
  misc_feature (3997)..(3997): n is a, c, g, or t
  misc_feature (3999)..(4000): n is a, c, g, or t
aaatcagctaagtatgttgaagctcaaaaaggaacaaatctttattttgcaatntatgaagatgaagaaggtaaacgcagttatgaaacaatacctctaaatgaagttgtngaacgtttgaaacaaggccttagccctgtcccagaaaagaataaagcacaagttccacttaagttttatctttctcctaatgatttggtatatgtacctgatacaggcgatgtaaatgaaattaaaaaggaacaaatatataagtttgttgattctagtgggacaacagcaaattttattcctcatagagcatctgatctcatctataatgtggataagaagttcgctacaagtttttgcaatcgcgaagtaattcagaatgaatatggtgtaggtagtccacaatcaaagaatcagaaggcaattactggtgaaatggttaaggctatttgttggaaacttgttgtagatcgcttaggtaatattattaaaattataaagtagtgaactttctagcctatgataaagaaaacgctttgttttagtaacccaatctatttgagtcttcgtaatgctcagttagtattgcatttaccagaggtagaaacaaatgatatgttgccagagatgatgaagaaggaagccgagcgcactatcccaattgaagatattgggatagttgtacttgacaaccgacgtatcacagtcacttctggtgtccttgatgcccttttggagaataattgtgccgtaataacatgtgatcagaagagtatgcccgttggcttacttctccctttgagtggtcataagacacaaaatgaacgtttccgatctcaacttgattcttcagttccgttacgtaaacagttgtggcaacagactgtgaagcaaaagattctaaatcaagaatgtgttttacgaacaaatacagataaggaaacaaattgtatgcgtgtatggtcaaatgacgtgcgtagtggtgaccctgataatcttgaggcaagagctgcagcttattactggcgtaatctttttgctgattatcctgattttgttcgtgatagggaggggggaccgcccaataacctcttaaattatggctatgccattttacgtgctgtaattgctcgcgctttagtaggaagtggtctgttacctactttgggtatacaccatcataatcgttacaacgcttattgtntggctgatgacatcatggagccatatcgnccttatgtagatcaacttgtnatagatattcttcataaatcggaggaagtaacntctctatctaaagagttgaaaatggagttnttaagtattccgatgattgatgtcgtcgtgaatggnaaacgtagtccattgatggtngcagctcagcaaaccacagcttcacttgcaaagtgttttgcnggggagatacgtcgnattagttatccagaaatgtaaaatctatcatgtccaacttttaccgtctcagtgaatatcgtattatgtggattctagtattctttgatttaccgacagaaacaaagaaggaaaagaaggcatatcttgatttccgtaaatctttgatgaaggacggttttacaatgttccagttctccatttatgttcggcactgtgcaagcattgaaaatgctgaggttcatatgaagcgtgtgaaggcttgccttcctaaacatggaaaagttggtatattgtgtattacggataagcagtttgctaacattcagctgttttatggtgagaaacctaaagctcctaatgcaccggggcagcaattagaacttttctaattcaaaccttatagaaaacgaaaatcccactcacttagagtgggattttgttttgtggcatctttttaattttcttctaacaacgctatatcatgttgataaccagagtcttgcatgtaatgagttgttgttgctaccacaaaggtacgtattttcaagcaaatcacaacnannnnannnnannnnnnnannnnnnnnnagttgttgttgctaccacaaaggtacgtattttcaagcaaatcacaacnnnnnnnannnnanannnnnnnntnnntaagttgttgttgctaccacaaaggtacgtattttcaagcaaatcacaactannnnnannnnnnnnnntnntnannnnnngttgttgttgctaccacaaaggtacgtattttcaagcaaatcacaacnntnnnnnnnnnnnntnnnnnnnnnnnnnnntnntnntnnnnncnnnaangnnnnnnntttnnannnaannnnnannnnnnnncnnnnnnnnnnnnnnnnnnntnnnnttnttnttgctaccacaaaggtacgtattttcaagcaaatcacaacngnannnnntntnnntnnanatngnnntggnttnttntnnnnnccanaangnnnnntntttnnannnaanncanaacnnntnnnttgnnaannangnnnnncncnntnttnttntnnnnnccanaangnnnnntntttnnannnaanncanaannnnnnnnantaantttnnnnattngttnnngttgttgttncnaccanaangnnnnntntttnnaannaaancacaannnnnnnncnngngnngntnnannnnntnntgttgttgttncnaccananangtanntnttnncaannaaancacnannnnntnnannantnnnnnnnnnnnntnttgnttnttntnncnnncananangtanntnttnncaannaanncacaanncgnngnnnnnnntnntnntnnnntnntngnttnttntnncnnncananangtanntnttnncaannaanncacannnntgnnnnnnnnnctnctncntntnnttnnnttntnntnncnacaannangnnnnttntnnnnaannaaannanaannngnnnnanannntnnnnnnntnnnnnttttttttnntnncnnanannnangtatntnnnnncaannaanacanannnnnaannnnnnnncnnnnntnnntcnnttgttgttgttncnacaannnnnnnnnttttnnnnaannnaanaacanngnngntnnnantnnnannnnntttaannnngntntttnnannnnaaagntnnatattnnnnananannnnnnnancannnnnnannnnnatnnnnnngnnannnggtngtnnnnncnncnannannnangnnntntcnaannnnncnacnnntnnnnntnttnnntnnnntntntntntntnntnnttnntnntacannnnnnnnantntntannannannnnnnnnnnnnnnnnaanantnnntnntnntnnnnnatnnttntnnnnnnnnnnnannnnnnannannnannnanatnanancannnanngnnnnnnnnnnttnnnngnnntnntnnnnnntttnnnaanaaanannnnnnnnnntncnnnnnannnnnnncntnnanntnntnnnnntnnnnnnnnnannnnnttnnnnnnnctacnncanangnnnnnnnttnnanncnnnnnnnnnntnnnnnnnnttcnnnnnnnngtnnnnnnnnntnntnnttnntnncnnnnnnnnnnntannnnnnngnnnannnnnantgnnnnnnncannnnnnnnnnannnnnnnnntnnttnnnnnnnnnnnnannntnnnnnnttnnannnaannncnannnnnncnnnnnnnnnnnnnnnnnnntnnnntnnttnnnnnnnnnnnnnnnnnntnnnnnttnnnnnnnntannaanncnnnnttantttnanctgnntcnttcatnnttnnnacntnaanntnanngnnannntnnnncannnctnnnnnannnnnannnannnnantcntnttntnnncttntanncnnnnnnncnnnnnnnnnannaanntgnnnnnaaananctnntnnnnnnnnntnatcnttnnnttnttnnnnttgnttnnggnnatnnngnnnnnannnnnntncttnnaancnanatntnntnnctatgnnnntacnnntgtnnttnnnncanntnann

SEQ ID NO: 401 - DNA, 4000 bp, Escherichia coli
  misc_feature (641)..(641): n is a, c, g, or t
  misc_feature (1353)..(1353): n is a, c, g, or t
  misc_feature (1938)..(1939): n is a, c, g, or t
  misc_feature (1950)..(1951): n is a, c, g, or t
  misc_feature (1956)..(1956): n is a, c, g, or t
  misc_feature (1968)..(1968): n is a, c, g, or t
  misc_feature (1990)..(1990): n is a, c, g, or t
  misc_feature (2010)..(2010): n is a, c, g, or t
  misc_feature (2019)..(2019): n is a, c, g, or t
  misc_feature (2025)..(2025): n is a, c, g, or t
tacgcaagacatagtatttaatattaataagagataccctaatagacatattgttatctaccctgatgcttcaggttatgcaggcaagactaatgctagcttatcagatatagacatacttagaaatgctgggttcaagattaatgcacctagaaagaatggtagagttaaagacagagtcaatacggttaataacttacttagcaagaataaactgcttataaacactactaaatgccctgaaactactaaagcattagaacaacaagcatatgacaagaatggcgagcctgagaagtttaatggagcttcaacagtggatgattggaatgatgcccttgggtatttcttagtaagacaattccataaacctaagaatgttgatttacgaatgagaattggctaaaatataagagatattaaaacaaaggataaatatgagcttattagctaaagaccataacggcaaagaaatacaagggtttgcccctactaggattgtaacggcttcaagtattgatgtatcagatgcagttgctattagagtttttgaacctactcaataccagattaatggtgctggtactattggtactatgacaggggttacagttgtaaatgttggggtttcaagctttaantttacagagtctgtaactttcgaagtaatggattagaaatgtttgatttatcttgtagctttggggttacaaaagtatttcaaacttggtgggctttattttttgagcctaattatatagacagcgattacattctaggagaataatatggcatcagtaacaacaagaagtggcaaggggtcagctctaactcactcagagatggatagcaaccttaacaatttaaacacagacaaattagagtctacagactttaagactattaatggcgagagtattgttggtagtggggacattgtactaatacaagacatagagccgtatggggttacttggaatcaagataacgatacatatgcaagagttggtggaagtgactttactcacatccaaagaaagatgagaagagtaacgctactggcaaatggtacagtaaactactacttaggtgctaatgacagtactaagaaagcaaatggtacagacgcagtacttacgggtgcagatggtaatgtaatggtagagataccaaagttctaccataagtatacgtacagtaatgggacacataatcatatgattaacttagagccatttgaaggtgctagtgtacatccagcgttcgttaagaatggtgtagaagtaagtaatagatacattggtgcttatggtgcatctgtaagtggaagtacacttatttcagcaagtgggntatatcctgctggttcaatgactagaggttcgtttagaactaaagctgctgcaattggttcaggttgggcattgcaagattggaatttaattagtgcagttcaattgctaatgctagttgaatttggaacttttaatagtcaagctgcaatcggtcaaggaagaactcaattatcaggtggagcttggtcaaatggttcgtatattggaattaatggtagaagtgatacttctggtaatgctactggaaatcatgaatattcaggtgatgcagatgatgcagctgctgatttagctttcatgtcttatagaggaattgaagacttctttggaaatatttggaactgggtagatggtattaatattcaagataatgtgccatttattaataataatccatcaacttttgcagatgatgtatttagtggggactatgtgaatgctggaattactatggcaaatgctaatggttggcaaaatactttagagcaagttgggactggattcttccctgcttcggttggtgcgggttcaagtactaaaattacagattactattatcaagctgcaggaaatagggtcgtgnngctcggtggtnntgcgnataatggttcgnctgctggtgctttctatctgantgcgtctaattcttcgggtnattcgtctncgaatntcggctcggtcttgtcattttagtatggcaaggttagtttaatatgacaaagggcagtttattagtcgtgaaactcagtagtaatgcgaataatggttcgaatactggtactttctatctgaatacgaataattcttcaggtaattcgaatacgaatatcgactcagaatcttgtataaaaataaagaatataaactgtccttaccaacatggtaaaatacactactatactccattacatattggtactttaggggaagatttgggagcgacaagactgtgaaaagatatggcaatctatttcataatatatataatttagaaaatattaaactagcccaccaaaatgcaagaaaaggcaaaacattttacaaagaagttaaaatggttgatgcagatatagaaaaatatgctttaaaaattcaagcaatgctaagagataaaacatttaaaaatagcgactatactgtctttaataaagtagacaaaggtaaggttagagagatctataaactaccttacttcccagacagaataatacatcattgtattatgcaagtcttagaacctgtatggcataaagtattaattaaagatactttccagtctataaaaggtagaggaatacataaagctaaaagtagagtagagccaactatcagaaaagagaaattaaaatactctttaaagatagatattaaaaagttttatcctagtattgacaatgagatattaaaacaaatagttcgtaaaaagattaaatgtagtgatactttgtggttattagatgaaattattgactcaactaaaggtgtaccaattggtaactatatgagtcaatattttggaaatctttatttggggtattttgaccattggatgaaagaagttaaaagagtaaagtactattacagatattgtgatgatgttgttattcttagtagtgataagaaatatttacactatcttcttgaagagatgagaatgtatttaagaactaatttaaaactaactattaaagaaaattatcaaatatctcctataaaaataagaggtgttgattttttgggctttagattcttttttaaatatactttacttagaaagaagatagtaaaaggctttaaaagaggtatagcattgatattaaaattctatgctatacttaaaatagaaaaagtacaaggagtagtgatgagctactatggttggattaagcacagtagtgggcttcatctttggagcaaatatgtaacttatgaagttaagaaaatatttgtacaattaaaaataaaaaacaagatactaggagtataaaatgttagtaaaatcagatacaagaccagaggcaacagagttgctacaaggtaagaaactaatcaattttgacattaaagaagttgaaattaaagatgaaaatagtgaagatattagagttgggtttgaatatctacaagcaaaagtagaattaaatactacaagaagtgatattatagaagcaattatagcgactaaatattcagctggtgcagaaattgcattaactaatgacaaagatactaaacaagatgagtataaagcatatcaagagtttagagctactgctaaagaattagcagaatagagaataactattaaattcataggtgtcattttaaatggcacttattgagtttataaacttaaaacaaaacaataggaaataaaatgggattattaggagtaacaaatgattaatatagcattcgtattattaaaagagatactgctgtctatggtagctaaggttgcatttaaagcagtagcagagaggtttgctacaaggcttgtagtatatggactagagaagctagaaagctactcaactaactatgttgttaaagacacagttaatgatattaaaaatcagctgaaaggcaaaggtttaaaagtaatagatggataatgacctgacagatctaaaagtttcaatagc

SEQ ID NO: 402 - DNA, 4000 bp, Escherichia coli
  misc_feature (3969)..(3969): n is a, c, g, or t
ctcggcgaccgcgtacgaggcggagcccgcgagcaccggagtcgccagcaacccggtgccgatcagaccgaccgcgaacagcagataggcgccgtcaccggccaggggccgcagcgcctcggccgcctgacggctcgtctcgatgtcgttccggcccgcgcggaagagcgtggcggccgtggcgagaatgatgaagtacatcaccacgttcgagaaggccatgccggtgaagacgtcctggcgcgcgtcgcgcagctcgtggtcgctggcgccgcggcgctcggccaccgtgcggcgtcccttggcgcgctcctcctcgacctcctgcgaggcctgccagaagaacaggtacggcgagatcgtcgtgccgaggatgccgacgagcgtcggcacggcgcgggcgtcccagggcacgtgcgggacgagcgtgtcgcgaagggccgccgaccagttcggctgcgcgaggacggcggacaggatgtacgcgaagagcacggcggtgagccacttgagccaggcggcgaacctggcgtagctcgtgtacacggtggccacgatcacgccgagcccgaacagcggcacccagaactccgacggcacgcccgtcagcatctccgcggcgtccgccatgccggcgagatcggcggcgatattgaagacgttcgccgcgagcagcagcaggcaggcgccgtacaggaaccagcgcggatagtggcggcgcgtggcgccggcgagcccgcggcccgagacgagcccgatgcgggcgcacgtcagctggatcgcggccatcagcggcagggtgacgacggccgtccacagcatccccgtcccgaacgtcgcgcccgccaccgcgtaggtcgtgacgccgctcgggtcgtcgtcggaggcgccggtgacgagacccggcccgagcgtccggaagtagcggacgagggggttgtgactatgccgctcgtcgggcccgctcatagagcacgagggcggcggctccgcgcatggtgagccgcttgtcgcccggcacgatcgtgatccgcgtcgccgccagcgcgcgcgcgaacgcgtgctcggccgccgcggcgaggatccgcttctccagcgcggcgagcgagccggccacgccgccggtgacgacgacgacctcggggttgagcccgttcacgatcgtcgcgagcatggcgccgagcgcgcggcatgcctcgtccaccaccgccgccgcgacgggctcgccgtccgtggccatccggaaaacgagctcggccgtgatccgctgcgcgtcgccgccggccgcctgcagcagcgccgcgcccgcctcgcgggcgacgcgcgcgcgcgccgcctcggtgatgccccgcccgctcgcgtagacggcgagacagccgcggccgccgcaccagcagggcgggccgtcgaacttcacgggcgcgtggccgaactcgccgccgaagccggcgacgccgcgcaccaggcggccgtcgaggatcacacccccgccgaacccggtgcccgccgccagcaccacgagcgagcgcgcgccccgcccggcgccgaagcgccactcgcccagcgccagcgcattgacgtcgttgtcgacgaaggcggggatgccgaagcgcgcggcgaggcgctgcgccaggggcacgtcgacgagatcgggcgcgtgcggcgcggggtcgccgacgacgccggcctccgcgtccaccgggcccggcacgccgacgccgatgcccgcgaccgtcagcccgcgcgcggcgaccgcggcacgcacgcgctcgacgagcgcctcgatcgcggccggcgtgccgacggccttggcgtcgcgcgtcgccacccgctcgtcgagcaggacttcgccgtcgggcgtgaccgcgccggcggcgatcgtcgtcccccctacgtcaaggcctatcaggatggggggccccgaaatggccccccatacccccccgcgctcggggcgccccggggaacccgtggcgcccctcgacatccccactagatctccgcgaaactacacagcgtgatcccgagtgccgcgacggcggtgcgggccgagggcgtgccgagaccgatcatctccgtctcgcgctggcgcccatagcggctgtacgcgaggtccgcgtcgaaccagccgggatgcgtcatgaattccgagaggccctcgggcagcgcgcgcagattggcgagcgtggtggccggcgaccagtaggcgcccggccccgactcgccgaagaagtgatccggcgtgcggagcccagccgagcgcgcgcggccgcgcgcggcggcgtcctggctgcgcaccggcacgcccagcccgcgcgcgacgtccagcacgacctcgcgcaccggcggatgcaggccgacgtgatggtgcgtgtccaggtgcgtgggcgcgcggcgaaagacccggcggaacttcgcgacctgcgcctcgatctcggcccgcacgtcgccggcgcgggcccgcgccgccgcatggcgcgcgtcccgcacgaagcggccgccgccggccacgagcgacttccctcgcgtcagcggcgagccgagcgtgaggttgacgtggagcccgacgccgagcccgctgtcgaggaggcgggccacgaggccccgctcgaggtcggcggtcacgagcaccgtcgtgctcgtgacgatgccgtggcgatgcgcggccaggatgccctcgctcacgccgcgcgtgaggccccagtcgtcggcgttgacgatgaggcggcggctcaccgcgcgcgtccctcgatcatcaggcgctcgacggtcgccggccgcccgggcggcagcgccgcctcgcggtccatcgcgcgcaggtgcgcgatgcgctcgtggccgatccgcgggaacgactgcgtctcgcgcgcgagcaccgagggcacgagcccggccgcctccaccttcgccagggcggtcttgatgccgaggaagtcgaagatcgtgaacacgagccggccgcgcggcgccaggtgcgcgggcgcgcccgcgatgatgcggtcgagcagcgcccagccgtcggagccgccgttgtcggccgccgcctgcgcgtcctcgcggtcggcgcccggcggcgtcggcatctgcggcgggttgctgcacacgaggtcgaagcgctcgcccgccaccggcgcgtagcagtcgcccagccgcgcgtcgacctcgacgccgttcagcgcggcgttcacgcgcacggccgtcaccgccgccggcacgacgtcggtggcgacgacggccgcgcccgccctggccgcgagcacggcggccaggccgagaccggcgccgatctcgagcacgcgctcgcccgcgcggacgctcaggtgatggcagaagaacctcgagccggctttcggcggctgcacgatgtcggggacgcggaagaggcagtcgcgccaggcgtagaagaggacgccgtcgtccactacgtgccttgcacgcgccggaagtagaggcggatcgcctccttcagctgcgcgcgcgcgccggccgaggactgtgcgtcctccagctggtcgatctcgatctggagcggcacgccctcgcgcttgacgccgtccagctcggcggtcagcgcgcagcgctcgtcggactcggtgaacacgagcttcgcgcgcttgaagctggcctcctcgcgcgcgagctgctcgacggtctcgacgatcacgcgcttgaacgcctcctgctcgccggccggcaccgtcgagaaggcggcggtcaggttcacctcactcattccagaccttgaggatgtccgcgtgggtcttcgccgcgttggcgcggatggcgaaggagatcgcctcgcgcagctcgtcctcggtcgcgccgctctgcctggcgcccgccaggtcgcgcttcgctcagtgggtgttgccggcggcgaggttggcggcgagataacagaggtaggcggttttgggatcgagcacgcccttcttgaacttccacgacgcgatcacccgctcttccatnacgcacctcccacggttttccgcccgaccgt

SEQ ID NO: 403 - DNA, 4000 bp, Escherichia coli
  misc_feature (383)..(383): n is a, c, g, or t
  misc_feature (385)..(385): n is a, c, g, or t
  misc_feature (1953)..(1953): n is a, c, g, or t
  misc_feature (2021)..(2021): n is a, c, g, or t
  misc_feature (2029)..(2029): n is a, c, g, or t
  misc_feature (2301)..(2301): n is a, c, g, or t
  misc_feature (2304)..(2304): n is a, c, g, or t
  misc_feature (2307)..(2308): n is a, c, g, or t
  misc_feature (2313)..(2313): n is a, c, g, or t
  misc_feature (2315)..(2315): n is a, c, g, or t
  misc_feature (2322)..(2322): n is a, c, g, or t
  misc_feature (2325)..(2326): n is a, c, g, or t
  misc_feature (2333)..(2333): n is a, c, g, or t
  misc_feature (2337)..(2338): n is a, c, g, or t
  misc_feature (2346)..(2346): n is a, c, g, or t
  misc_feature (2349)..(2349): n is a, c, g, or t
  misc_feature (2355)..(2355): n is a, c, g, or t
  misc_feature (2361)..(2361): n is a, c, g, or t
  misc_feature (2364)..(2364): n is a, c, g, or t
  misc_feature (2367)..(2367): n is a, c, g, or t
  misc_feature (2369)..(2370): n is a, c, g, or t
  misc_feature (2373)..(2373): n is a, c, g, or t
  misc_feature (2376)..(2376): n is a, c, g, or t
  misc_feature (2378)..(2378): n is a, c, g, or t
  misc_feature (2380)..(2381): n is a, c, g, or t
  misc_feature (2384)..(2384): n is a, c, g, or t
  misc_feature (2388)..(2388): n is a, c, g, or t
  misc_feature (2400)..(2400): n is a, c, g, or t
  misc_feature (2403)..(2403): n is a, c, g, or t
  misc_feature (2406)..(2406): n is a, c, g, or t
  misc_feature (2421)..(2421): n is a, c, g, or t
  misc_feature (2447)..(2447): n is a, c, g, or t
  misc_feature (2449)..(2449): n is a, c, g, or t
  misc_feature (2454)..(2454): n is a, c, g, or t
  misc_feature (2463)..(2463): n is a, c, g, or t
  misc_feature (2478)..(2478): n is a, c, g, or t
  misc_feature (2508)..(2508): n is a, c, g, or t
  misc_feature (2511)..(2511): n is a, c, g, or t
  misc_feature (2522)..(2522): n is a, c, g, or t
  misc_feature (2524)..(2524): n is a, c, g, or t
  misc_feature (2526)..(2526): n is a, c, g, or t
  misc_feature (2532)..(2532): n is a, c, g, or t
  misc_feature (2534)..(2534): n is a, c, g, or t
  misc_feature (2546)..(2547): n is a, c, g, or t
  misc_feature (2557)..(2557): n is a, c, g, or t
  misc_feature (2559)..(2559): n is a, c, g, or t
  misc_feature (2564)..(2564): n is a, c, g, or t
  misc_feature (2571)..(2571): n is a, c, g, or t
  misc_feature (2574)..(2574): n is a, c, g, or t
  misc_feature (2580)..(2583): n is a, c, g, or t
  misc_feature (2586)..(2586): n is a, c, g, or t
  misc_feature (2589)..(2589): n is a, c, g, or t
  misc_feature (2592)..(2592): n is a, c, g, or t
  misc_feature (2595)..(2595): n is a, c, g, or t
  misc_feature (2598)..(2598): n is a, c, g, or t
  misc_feature (2600)..(2601): n is a, c, g, or t
  misc_feature (2631)..(2631): n is a, c, g, or t
  misc_feature (2634)..(2634): n is a, c, g, or t
  misc_feature (2636)..(2636): n is a, c, g, or t
  misc_feature (3068)..(3068): n is a, c, g, or t
  misc_feature (3265)..(3265): n is a, c, g, or t
  misc_feature (3300)..(3300): n is a, c, g, or t
  misc_feature (3324)..(3324): n is a, c, g, or t
  misc_feature (3402)..(3402): n is a, c, g, or t
  misc_feature (3418)..(3418): n is a, c, g, or t
  misc_feature (3424)..(3424): n is a, c, g, or t
  misc_feature (3471)..(3471): n is a, c, g, or t
  misc_feature (3478)..(3478): n is a, c, g, or t
  misc_feature (3503)..(3504): n is a, c, g, or t
  misc_feature (3515)..(3515): n is a, c, g, or t
  misc_feature (3547)..(3547): n is a, c, g, or t
  misc_feature (3577)..(3577): n is a, c, g, or t
  misc_feature (3614)..(3614): n is a, c, g, or t
  misc_feature (3624)..(3624): n is a, c, g, or t
  misc_feature (3652)..(3652): n is a, c, g, or t
  misc_feature (3672)..(3672): n is a, c, g, or t
  misc_feature (3807)..(3807): n is a, c, g, or t
ggaataaattgagcagccctcatgcaatccgcgcggggcaaaggttagtggttggataccgtaaagcttcaaacagtaatctaccccgcgaagcaagtgtgattcgtgttccgcgaaatactacactgtctcacttagctattcgctacaaaacatctgcgagaaaactgatgacctggaacggtttaactaattccaggcaacttcggacgggaatgaggctttatgtaaaagcacctgaaaaaattaaacgaaaacagcaaaaaagaattgttgcaaaaaagaattcaagaagattaattaaagtccggcacaagattattcgtgtacgtaatggcgacactctgtggggaattgccagaatttaccgaaccacagttaangngttggttgcacttaacgagctgaagtctgaaagccacctgagactcaatcaaaaattgattgttccttacccctcataaatcattcgtccccttgtttttgcagacatttttgcattttaatcaaaatccaacattatctttatttcagaaatataaattcaaaacggctttttaatggcagtctttaccgaggaaaagaaaaaattacttatcgaagctctttcttacataaagagcttcaatggtaaaatagtggtcatcaaatatggaggtgctgccatgattgaggagcatctcaaacatgactttgcccaggatattgttttgctccagtcattgggaatgctgcctgtaattgttcatggaggaggtccggaagtttcaaaggcaatggaacgattaggccagaaagtctcctttattgatggtctgagagttacaagttcggaaaatatgaaagttgcagaaatggtactctctggaactataaacaaagaaataattacacacctgaatacttttggcggtaaggctgtaggagtcagcggtaaagatgggcacttgattgaggctataaaaaagcctcaaaaaagcggcattgatttgggctttgttggtgaaattaaaaacgttaatccggaactgctgctggtcttgctaaagcagggttttttacccgttgtctcaccgattggtcttggaaaagatggtattacatacaatataaatgcagatacaactgcatcccgcatagctgtttctttggcggcacacaaaataatcttcatgactgacgtagacggtgtccttaaaaaaggaaagttaattgctcaactcaccgcaagcgaagccgaaaaattgatccagcaaaaggtgatcagcggcggaatggcaccaaaaattgaagccgggcttttctgcgtaaataatggggtggaatctgctcaaataatcaacggtacagattctcactctgtcattgcagaattatttaccgacaaaggtattggtacaaagattgtcctttaataattttaaaaagaattattgttgctctgcaaagtaaaacaatttcacagaaagactttaatcaggtacaacggttttatttttaaaatctatccaagaaataatcccatctgtcgcatgaaaaacagttgtataatgttctttttggtctagaaagttagcaacaatcctacttcttctgccacttctacaaattataattacagggtctttattacttgctattttcttcagttttgacatccattctttaacattgtaatttccatctttatcaaaaaatgttagaagattactttttttaatcactcccgtttcgtaccactcccttttagttcgtatgtctattaatggaaccccactttccattagaattattattttattattattaacctcatatatatcagcaaacagctgtggattgaataaaaagacaacaagagttatagagagaatttttatttttattttcattatttaacaaatttatacatttagtttgatgtgctcagattgttttatttctgactcgttnccatagtaaaaaccttttggtctgtccatgcaccaaccagcaggaaaaggaaaatttccaggaccgcnatcagggncagtgcaatcattggatccagagtatttgtaaaaaaattcattgtgtttttattagaataattcaacccgtttaatgaacgcctttgagtgacgtccatttactttctcagtagtttgcacatcaacctctatcccaagagccgttacaggcaactgtttcttaccaaataattcaaagaattttgctgagagatcaatttctgtgatatatgtttttccaatactcccgtcacagggtatgcagagataacgacctccctcttgccagtanttnccnnaatananttgatcnggnntttcatntttnncaagaaanaanctgatnaaatanggnagntnnggngcnanannaantccnctgtccagtttngtntcnccaaaaaagaccatnaaggaaattgcttcacgtgtgtttcnantcttntctttgggnccgctccagtctgcnccaagcggatattgatctactccccattcnatncgtatttttgntncnccatgnanatagtccttttnntcaaactccngnatcancacaccnaantcatcnnnngtnggntcnatnacnanntttccgtcttcaaaacggaggttcatatcngtnanatcttcccggaactcccatttgattttttcaaaccagttttgaacattgccggatgcagttgaaaaatccaattcgtaaatcgtttctgccccggcagaaaatgtgagcaataaaaatccgcacagggtaattatttttttataatgtccacggaactttttttctatccccatttattcctgtttaagctgaaaaaggttcgctgaataactgagagtttcttgattaaaaagcagccggaggagcaattgcagtacgtattgctcccaattgcggtatcatataaaaaactatgggctacatcagtagggctcactgaaaaagttttttttgtcatcacggacttgatccgggatcaagatcaccgtccagcttgagtacaaggtttgaaacatttccccttgattcaggttctgcgcttcgctatgccnggaatgacaaagaagaatcgaaagaagtacgactatttttcacgtgggtaaaccttgttgaaacagggactcaaacgacagaagtgcaaagcttttagttttttcaggaaacaccttgcagttatcttcactaattgaataattacttattgatattattgaataatattatttttcagcaagccctaagtaagtgnaagaaaaattagtgataaagttgctgagtacatgngatctgaaaattctagcatcaccntaaacatttgaaatggatgtttcaagatttttttaattacaaaataataatgtttgataaaccagtttataatcaaanttgcatagggctcacngaaaangtttttcttttgtcgtgccggacttgatccgggatcaagatcaccgnccagctngagtacaagatttgaaacatttccnntggattacggntctatgctgcacttcgccgaatgacaaatganaataatctaaagtagcacaactattatttncgtggggctgccttgttgggaaaagagactcaaacgncagaagtgcngggccttcgcgcttttcaggaaacaccntgaagttgtcgtaatcaatngaataattacttatttatattattgagaagtggactgttccacagattcgctagaaatatcttaagagttgtctgaagaaacttcatcttcctcctccattggatttggattgatgaaaaccagctgattaccanctaaagattttgtggcaacctctatttcctggacaagcaagtcactggttattcttctgcggagagtacttttatgcattaaagtattcaattcaatctccagaaaaccaaaagtgtttttcaattcagaaacttttctgaaagcagttgtattttccaggtattccacaatcattatttgactccgtggaga

SEQ ID NO: 404 - DNA, 4000 bp, Escherichia coli
  misc_feature (1)..(9): n is a, c, g, or t
  misc_feature (12)..(14): n is a, c, g, or t
  misc_feature (16)..(20): n is a, c, g, or t
  misc_feature (22)..(25): n is a, c, g, or t
  misc_feature (28)..(32): n is a, c, g, or t
  misc_feature (34)..(42): n is a, c, g, or t
  misc_feature (45)..(51): n is a, c, g, or t
  misc_feature (53)..(56): n is a, c, g, or t
  misc_feature (58)..(60): n is a, c, g, or t
  misc_feature (63)..(67): n is a, c, g, or t
  misc_feature (69)..(70): n is a, c, g, or t
  misc_feature (72)..(73): n is a, c, g, or t
  misc_feature (75)..(83): n is a, c, g, or t
  misc_feature (90)..(90): n is a, c, g, or t
  misc_feature (92)..(93): n is a, c, g, or t
  misc_feature (95)..(98): n is a, c, g, or t
  misc_feature (101)..(103): n is a, c, g, or t
  misc_feature (106)..(108): n is a, c, g, or t
  misc_feature (110)..(110): n is a, c, g, or t
  misc_feature (112)..(118): n is a, c, g, or t
  misc_feature (121)..(121): n is a, c, g, or t
  misc_feature (123)..(135): n is a, c, g, or t
  misc_feature (137)..(143): n is a, c, g, or t
  misc_feature (145)..(147): n is a, c, g, or t
  misc_feature (151)..(151): n is a, c, g, or t
  misc_feature (153)..(156): n is a, c, g, or t
  misc_feature (158)..(166): n is a, c, g, or t
  misc_feature (171)..(172): n is a, c, g, or t
  misc_feature (174)..(178): n is a, c, g, or t
  misc_feature (180)..(180): n is a, c, g, or t
  misc_feature (182)..(190): n is a, c, g, or t
  misc_feature (192)..(202): n is a, c, g, or t
  misc_feature (204)..(209): n is a, c, g, or t
  misc_feature (212)..(219): n is a, c, g, or t
  misc_feature (221)..(234): n is a, c, g, or t
  misc_feature (236)..(239): n is a, c, g, or t
  misc_feature (242)..(244): n is a, c, g, or t
  misc_feature (246)..(252): n is a, c, g, or t
  misc_feature (256)..(257): n is a, c, g, or t
  misc_feature (260)..(266): n is a, c, g, or t
  misc_feature (268)..(271): n is a, c, g, or t
  misc_feature (274)..(274): n is a, c, g, or t
  misc_feature (279)..(284): n is a, c, g, or t
  misc_feature (286)..(294): n is a, c, g, or t
  misc_feature (296)..(296): n is a, c, g, or t
  misc_feature (298)..(299): n is a, c, g, or t
  misc_feature (301)..(302): n is a, c, g, or t
  misc_feature (305)..(308): n is a, c, g, or t
  misc_feature (310)..(313): n is a, c, g, or t
  misc_feature (315)..(319): n is a, c, g, or t
  misc_feature (325)..(334): n is a, c, g, or t
  misc_feature (336)..(338): n is a, c, g, or t
  misc_feature (340)..(340): n is a, c, g, or t
  misc_feature (343)..(355): n is a, c, g, or t
  misc_feature (357)..(357): n is a, c, g, or t
  misc_feature (359)..(362): n is a, c, g, or t
  misc_feature (364)..(364): n is a, c, g, or t
  misc_feature (366)..(369): n is a, c, g, or t
  misc_feature (371)..(371): n is a, c, g, or t
  misc_feature (374)..(374): n is a, c, g, or t
  misc_feature (376)..(377): n is a, c, g, or t
  misc_feature (379)..(379): n is a, c, g, or t
  misc_feature (381)..(382): n is a, c, g, or t
  misc_feature (384)..(392): n is a, c, g, or t
  misc_feature (394)..(402): n is a, c, g, or t
  misc_feature (404)..(407): n is a, c, g, or t
  misc_feature (409)..(410): n is a, c, g, or t
  misc_feature (413)..(415): n is a, c, g, or t
  misc_feature (419)..(421): n is a, c, g, or t
  misc_feature (423)..(425): n is a, c, g, or t
  misc_feature (427)..(427): n is a, c, g, or t
  misc_feature (429)..(429): n is a, c, g, or t
  misc_feature (433)..(445): n is a, c, g, or t
  misc_feature (448)..(450): n is a, c, g, or t
  misc_feature (452)..(453): n is a, c, g, or t
  misc_feature (455)..(455): n is a, c, g, or t
  misc_feature (457)..(459): n is a, c, g, or t
  misc_feature (461)..(464): n is a, c, g, or t
  misc_feature (467)..(470): n is a, c, g, or t
  misc_feature (472)..(482): n is a, c, g, or t
  misc_feature (488)..(489): n is a, c, g, or t
  misc_feature (492)..(501): n is a, c, g, or t
  misc_feature (505)..(513): n is a, c, g, or t
  misc_feature (515)..(515): n is a, c, g, or t
  misc_feature (518)..(527): n is a, c, g, or t
  misc_feature (529)..(530): n is a, c, g, or t
  misc_feature (532)..(539): n is a, c, g, or t
  misc_feature (541)..(542): n is a, c, g, or t
  misc_feature (544)..(544): n is a, c, g, or t
  misc_feature (546)..(550): n is a, c, g, or t
  misc_feature (557)..(562): n is a, c, g, or t
  misc_feature (564)..(570): n is a, c, g, or t
  misc_feature (572)..(578): n is a, c, g, or t
  misc_feature (581)..(588): n is a, c, g, or t
  misc_feature (591)..(592): n is a, c, g, or t
  misc_feature (595)..(597): n is a, c, g, or t
  misc_feature (600)..(600): n is a, c, g, or t
  misc_feature (603)..(605): n is a, c, g, or t
  misc_feature (607)..(607): n is a, c, g, or t
  misc_feature (609)..(619): n is a, c, g, or t
  misc_feature (621)..(624): n is a, c, g, or t
  misc_feature (627)..(638): n is a, c, g, or t
  misc_feature (640)..(641): n is a, c, g, or t
  misc_feature (643)..(646): n is a, c, g, or t
  misc_feature (649)..(650): n is a, c, g, or t
  misc_feature (652)..(655): n is a, c, g, or t
  misc_feature (657)..(657): n is a, c, g, or t
  misc_feature (661)..(664): n is a, c, g, or t
  misc_feature (666)..(671): n is a, c, g, or t
  misc_feature (673)..(674): n is a, c, g, or t
  misc_feature (676)..(679): n is a, c, g, or t
  misc_feature (681)..(684): n is a, c, g, or t
  misc_feature (686)..(688): n is a, c, g, or t
  misc_feature (690)..(692): n is a, c, g, or t
  misc_feature (696)..(699): n is a, c, g, or t
  misc_feature (701)..(710): n is a, c, g, or t
  misc_feature (712)..(713): n is a, c, g, or t
  misc_feature (715)..(715): n is a, c, g, or t
  misc_feature (717)..(719): n is a, c, g, or t
  misc_feature (722)..(724): n is a, c, g, or t
  misc_feature (726)..(728): n is a, c, g, or t
  misc_feature (730)..(731): n is a, c, g, or t
  misc_feature (734)..(735): n is a, c, g, or t
  misc_feature (738)..(739): n is a, c, g, or t
  misc_feature (741)..(744): n is a, c, g, or t
  misc_feature (748)..(763): n is a, c, g, or t
  misc_feature (765)..(766): n is a, c, g, or t
  misc_feature (768)..(768): n is a, c, g, or t
  misc_feature (770)..(773): n is a, c, g, or t
  misc_feature (775)..(778): n is a, c, g, or t
  misc_feature (782)..(783): n is a, c, g, or t
  misc_feature (785)..(792): n is a, c, g, or t
  misc_feature (794)..(802): n is a, c, g, or t
  misc_feature (808)..(808): n is a, c, g, or t
  misc_feature (810)..(814): n is a, c, g, or t
  misc_feature (820)..(833): n is a, c, g, or t
  misc_feature (835)..(838): n is a, c, g, or t
  misc_feature (840)..(840): n is a, c, g, or t
  misc_feature (843)..(851): n is a, c, g, or t
  misc_feature (853)..(862): n is a, c, g, or t
  misc_feature (865)..(865): n is a, c, g, or t
  misc_feature (867)..(871): n is a, c, g, or t
  misc_feature (874)..(893): n is a, c, g, or t
  misc_feature (895)..(896): n is a, c, g, or t
  misc_feature (901)..(903): n is a, c, g, or t
  misc_feature (905)..(913): n is a, c, g, or t
  misc_feature (915)..(920): n is a, c, g, or t
  misc_feature (922)..(924): n is a, c, g, or t
  misc_feature (926)..(928): n is a, c, g, or t
  misc_feature (930)..(937): n is a, c, g, or t
  misc_feature (939)..(940): n is a, c, g, or t
  misc_feature (943)..(944): n is a, c, g, or t
  misc_feature (946)..(957): n is a, c, g, or t
  misc_feature (961)..(961): n is a, c, g, or t
  misc_feature (963)..(963): n is a, c, g, or t
  misc_feature (965)..(967): n is a, c, g, or t
  misc_feature (969)..(972): n is a, c, g, or t
  misc_feature (974)..(978): n is a, c, g, or t
  misc_feature (980)..(986): n is a, c, g, or t
  misc_feature (989)..(990): n is a, c, g, or t
  misc_feature (993)..(994): n is a, c, g, or t
  misc_feature (997)..(998): n is a, c, g, or t
  misc_feature (1000)..(1001): n is a, c, g, or t
  misc_feature (1004)..(1005): n is a, c, g, or t
  misc_feature (1008)..(1014): n is a, c, g, or t
  misc_feature (1016)..(1018): n is a, c, g, or t
  misc_feature (1020)..(1023): n is a, c, g, or t
  misc_feature (1028)..(1029): n is a, c, g, or t
  misc_feature (1031)..(1031): n is a, c, g, or t
  misc_feature (1034)..(1035): n is a, c, g, or t
  misc_feature (1037)..(1038): n is a, c, g, or t
  misc_feature (1041)..(1041): n is a, c, g, or t
  misc_feature (1043)..(1043): n is a, c, g, or t
  misc_feature (1047)..(1050): n is a, c, g, or t
  misc_feature (1053)..(1053): n is a, c, g, or t
  misc_feature (1565)..(1565): n is a, c, g, or t
  misc_feature (3284)..(3284): n is a, c, g, or t
nnnnnnnnnccnnncnnnnnannnnttnnnnnannnnnnnnngannnnnnngnnnnannnaannnnntnnannannnnnnnnnttttttntnngnnnnttnnnctnnncngnnnnnnnaangnnnnnnnnnnnnntnnnnnnnannnaaangnnnncnnnnnnnnnaaaanngnnnnnancnnnnnnnnngnnnnnnnnnnngnnnnnnttnnnnnnnntnnnnnnnnnnnnnntnnnnaannncnnnnnnntttnnagnnnnnnnannnnaanaaaannnnnntnnnnnnnnngnannannccnnnngnnnnannnnnaaaaannnnnnnnnngnnncnggnnnnnnnnnnnnncntnnnntncnnnngnaancnnancnngnnnnnnnnngnnnnnnnnngnnnntnnttnnnaaannngnnngngntttnnnnnnnnnnnnnaannngnncngnnncnnnnggnnnntnnnnnnnnnnnaaaaannaannnnnnnnnnaaannnnnnnnncnaannnnnnnnnncnncnnnnnnnnannantnnnnnaaaaaannnnnncnnnnnnnannnnnnnccnnnnnnnnttnnaannnttnaannnantnnnnnnnnnnngnnnnccnnnnnnnnnnnngnntnnnnccnntnnnncntttnnnnannnnnncnnannnnannnncnnngnnntttnnnntnnnnnnnnnnanncngnnnttnnngnnntnnttnnttnngnnnngggnnnnnnnnnnnnnnnngnnancnnnnannnntttnncnnnnnnnngnnnnnnnnnttcccngnnnnnaaaaannnnnnnnnnnnnncnnnngnaannnnnnnnntnnnnnnnnnnccnannnnnaannnnnnnnnnnnnnnnnnnngnnaaaannncnnnnnnnnngnnnnnntnnngnnnannnnnnnntnnttnncnnnnnnnnnnnntttncnannnannnngnnnnncnnnnnnnaannttnnttnnannaannttnnnnnnngnnngnnnnaaaannanttnnannaangntttnnnnttntatgaaatcatcttactataaatactttgctgcgcttttgttatttggttccaacggcatcgttgccagtaatatcaatctgcccagctacgaaatcgttctgctgcgtctattgcttggcagcctttttcttataactgtttttacggtttccagacaaaggtttactttttaccggaataagcacacttgcctttatcttttcatttcggcgtcagctatgggagcaagctggatgctgctttacgaagcctatcagcaggtcgggatcagcatagcatctttagcctattactgcggtccggtaatcgttatgattctttcaccttttctttttcgtgaaactctgacctggcctaaaatagctggttttttaactgttctggccgggatgtgcctagtgaacttacaggcgctggacgaaggtaaaactatttggggtcttttctgcggcttaatgtctgcgtttatgtatgcactgatggtaacagcaaataaaaaagccaaacctnaatccggtttggaaaattctttgctgcaacttgtcatcggctcttttatcgtcgtcgcatttgtcagtatgcagaaaaactttgttctgtcactgacaacgattgactggataccggttttactgctcggcttgcttaatacaggaatcggctgttatttatatttttcttctattacagacttgccagtccagaccgttgccatatgcggttatctggaaccactgtctgcagttgttttttctgtactctttttacatgaagtcctgttgcctttacaaatgctcggagccgtacttatacttggcggcgccatatttggagaatgcttcaatcctgaaaaacagcagtggctgcagtcaaaataaagctcaaaagcataataaaaaagcaagccgctagcggcttgcttttttattatcactatttaaatcaaatgctttactaaactaaaaatcactatttacatcttatacttaaaatcgcagtgcaccataacggctttccagcttatgcaggtgttcggtaagaactcccggctcaatataagcatattccaatatctgcagtgcattcggtgcataatccctgatagaagcaaaataaggttcccattcgatcgttcccagtcctacaggctgatggctgtctccgctgccatcgttatcatgcacatgtacagccaacagctttttctgcagccgtttcacggtttcaggaagattccagccattaacgtgggcatgtcccgtatccaaaagtgccagagcctgcggataacgttcaaacagtgccagatattcttcaaaatcaaaaagcagtgatccacagggacgcagacccacattttctataacaacttgaacgccgtagctttgtgccaggctgatcacttcagccaagcgctgatagaccagttctttaactgcggcaacctcaccatggtaaatttcattggtatgcacaactacaaattctgctttgatcttttgggcataggtaaaggtttgagcgtaggcttttaaataatattcatcactgctgtctgccagatttacagcaacacagggaccatggatagaaaatgttcttttttccttattattctgcgccagcggcagcaataccgtatcccaataatggtcggtcccgaattcataaaaaaattcgatattataggtcaacggcaaaccgctgagatattttttattgaaaccgccaaaagccagatcactaactgcccattgcatcagtaaaaacctcccctttttctatatagccaatattcctgccgcttgtcacatcaaacagactcacatcgtcccagctgaaacagatcccgctggaattttgtacatccgcattgcggtcacttactgtaacgctgatattctcaccactctcaagctgtaattcaacagtacgctgattacctgtattttctacataagttatacttccctgcacagcagcgtcctcgcttaaacggcaatgctcaggcctgatacccagcagcaggtctctgcgctgtccgatcacctgacgccacagctccggtaccggcagtacggccttgccgatacaaatacaatcacggttaaaacgtgctttgaggatattcattgacggggcgccaataaaaccggcaacaaatgtattagccgggtgacggtagatcgtatccggagcggctatctgctgcagttcgccatctttcancacaacgatacgatcggcgacagtcattgcctctacctgatcatgcgttacataaatcattgtcggtttatagatctcatgaatacgtaccagttctgtcctggcctgctgccgcagctgagcgtccaaattggacagcggttcatccagtaaaaagtagggtgattgctttacaagggcacggcataaggccactctctgtttctgcccgcctgaaagctgtttgggcttatagttttcatagcctcttaaattaagtatttctaaggcttcatcggctctttttttgatttccgcttccggaagcttttggatatgcaggccaaaggtgatattatcccagacagaaagatgcggaaacagcgcatagctttgaaaaaccatggcaatattacgttcaccgggagcaatatcattaactactctgcctcccattttcagctgaccgctggtaatatcttccaaaccagcgatcattcgcagcgtagtagttttgccgcagccggaaggccccagcaaaatcaggcgctcgccttcttttatttccagattcaaagacttgacgattttagcatcgccgtaagatttacagacgttttcaaatacaatactgttcatatattatcctttgacccccgattgcataaaggtattgagtataaatttttggcagacgagatataatgccagcggcggcagactggtcagagtagcga

SEQ ID NO: 405 - DNA, 4000 bp, Escherichia coli
  misc_feature (1)..(1): n is a, c, g, or t
  misc_feature (3)..(6): n is a, c, g, or t
  misc_feature (10)..(22): n is a, c, g, or t
  misc_feature (26)..(30): n is a, c, g, or t
  misc_feature (32)..(34): n is a, c, g, or t
  misc_feature (39)..(40): n is a, c, g, or t
  misc_feature (44)..(44): n is a, c, g, or t
  misc_feature (46)..(46): n is a, c, g, or t
  misc_feature (49)..(50): n is a, c, g, or t
  misc_feature (54)..(54): n is a, c, g, or t
  misc_feature (59)..(59): n is a, c, g, or t
  misc_feature (62)..(63): n is a, c, g, or t
  misc_feature (67)..(67): n is a, c, g, or t
  misc_feature (70)..(70): n is a, c, g, or t
  misc_feature (72)..(72): n is a, c, g, or t
  misc_feature (76)..(79): n is a, c, g, or t
  misc_feature (81)..(81): n is a, c, g, or t
  misc_feature (83)..(83): n is a, c, g, or t
  misc_feature (85)..(86): n is a, c, g, or t
  misc_feature (90)..(90): n is a, c, g, or t
  misc_feature (92)..(95): n is a, c, g, or t
  misc_feature (100)..(100): n is a, c, g, or t
  misc_feature (102)..(102): n is a, c, g, or t
  misc_feature (107)..(109): n is a, c, g, or t
  misc_feature (111)..(116): n is a, c, g, or t
  misc_feature (118)..(120): n is a, c, g, or t
  misc_feature (122)..(125): n is a, c, g, or t
  misc_feature (127)..(128): n is a, c, g, or t
  misc_feature (130)..(130): n is a, c, g, or t
  misc_feature (136)..(136): n is a, c, g, or t
  misc_feature (141)..(141): n is a, c, g, or t
  misc_feature (143)..(148): n is a, c, g, or t
  misc_feature (153)..(155): n is a, c, g, or t
  misc_feature (157)..(158): n is a, c, g, or t
  misc_feature (163)..(163): n is a, c, g, or t
  misc_feature (165)..(165): n is a, c, g, or t
  misc_feature (169)..(169): n is a, c, g, or t
  misc_feature (172)..(173): n is a, c, g, or t
  misc_feature (177)..(179): n is a, c, g, or t
  misc_feature (181)..(181): n is a, c, g, or t
  misc_feature (184)..(187): n is a, c, g, or t
  misc_feature (189)..(189): n is a, c, g, or t
  misc_feature (192)..(193): n is a, c, g, or t
  misc_feature (195)..(196): n is a, c, g, or t
  misc_feature (201)..(203): n is a, c, g, or t
  misc_feature (206)..(206): n is a, c, g, or t
  misc_feature (211)..(212): n is a, c, g, or t
  misc_feature (214)..(218): n is a, c, g, or t
  misc_feature (220)..(220): n is a, c, g, or t
  misc_feature (222)..(225): n is a, c, g, or t
  misc_feature (228)..(228): n is a, c, g, or t
  misc_feature (232)..(232): n is a, c, g, or t
  misc_feature (234)..(234): n is a, c, g, or t
  misc_feature (236)..(236): n is a, c, g, or t
  misc_feature (238)..(238): n is a, c, g, or t
  misc_feature (240)..(240): n is a, c, g, or t
  misc_feature (247)..(247): n is a, c, g, or t
  misc_feature (249)..(249): n is a, c, g, or t
  misc_feature (251)..(254): n is a, c, g, or t
  misc_feature (256)..(261): n is a, c, g, or t
  misc_feature (264)..(265): n is a, c, g, or t
  misc_feature (267)..(269): n is a, c, g, or t
  misc_feature (271)..(272): n is a, c, g, or t
  misc_feature (274)..(276): n is a, c, g, or t
  misc_feature (279)..(279): n is a, c, g, or t
  misc_feature (281)..(281): n is a, c, g, or t
  misc_feature (283)..(284): n is a, c, g, or t
  misc_feature (286)..(286): n is a, c, g, or t
  misc_feature (288)..(289): n is a, c, g, or t
  misc_feature (291)..(291): n is a, c, g, or t
  misc_feature (293)..(293): n is a, c, g, or t
  misc_feature (296)..(296): n is a, c, g, or t
  misc_feature (298)..(299): n is a, c, g, or t
  misc_feature (304)..(304): n is a, c, g, or t
  misc_feature (306)..(308): n is a, c, g, or t
  misc_feature (311)..(311): n is a, c, g, or t
  misc_feature (313)..(316): n is a, c, g, or t
  misc_feature (318)..(319): n is a, c, g, or t
  misc_feature (327)..(328): n is a, c, g, or t
  misc_feature (332)..(339): n is a, c, g, or t
  misc_feature (342)..(345): n is a, c, g, or t
  misc_feature (347)..(351): n is a, c, g, or t
  misc_feature (353)..(354): n is a, c, g, or t
  misc_feature (356)..(356): n is a, c, g, or t
  misc_feature (359)..(360): n is a, c, g, or t
  misc_feature (363)..(363): n is a, c, g, or t
  misc_feature (370)..(373): n is a, c, g, or t
  misc_feature (376)..(376): n is a, c, g, or t
  misc_feature (380)..(381): n is a, c, g, or t
  misc_feature (385)..(386): n is a, c, g, or t
  misc_feature (388)..(388): n is a, c, g, or t
  misc_feature (392)..(393): n is a, c, g, or t
  misc_feature (395)..(395): n is a, c, g, or t
  misc_feature (397)..(397): n is a, c, g, or t
  misc_feature (400)..(400): n is a, c, g, or t
  misc_feature (402)..(405): n is a, c, g, or t
  misc_feature (409)..(409): n is a, c, g, or t
  misc_feature (412)..(412): n is a, c, g, or t
  misc_feature (414)..(418): n is a, c, g, or t
  misc_feature (421)..(426): n is a, c, g, or t
  misc_feature (428)..(428): n is a, c, g, or t
  misc_feature (430)..(432): n is a, c, g, or t
  misc_feature (434)..(434): n is a, c, g, or t
  misc_feature (438)..(438): n is a, c, g, or t
  misc_feature (440)..(443): n is a, c, g, or t
  misc_feature (446)..(447): n is a, c, g, or t
  misc_feature (449)..(450): n is a, c, g, or t
  misc_feature (452)..(452): n is a, c, g, or t
  misc_feature (455)..(456): n is a, c, g, or t
  misc_feature (459)..(460): n is a, c, g, or t
  misc_feature (464)..(464): n is a, c, g, or t
  misc_feature (466)..(466): n is a, c, g, or t
  misc_feature (469)..(470): n is a, c, g, or t
  misc_feature (472)..(474): n is a, c, g, or t
  misc_feature (476)..(477): n is a, c, g, or t
  misc_feature (480)..(481): n is a, c, g, or t
  misc_feature (485)..(489): n is a, c, g, or t
  misc_feature (491)..(491): n is a, c, g, or t
  misc_feature (493)..(494): n is a, c, g, or t
  misc_feature (496)..(496): n is a, c, g, or t
  misc_feature (500)..(500): n is a, c, g, or t
  misc_feature (503)..(504): n is a, c, g, or t
  misc_feature (507)..(509): n is a, c, g, or t
  misc_feature (511)..(511): n is a, c, g, or t
  misc_feature (515)..(515): n is a, c, g, or t
  misc_feature (517)..(517): n is a, c, g, or t
  misc_feature (521)..(523): n is a, c, g, or t
  misc_feature (525)..(526): n is a, c, g, or t
  misc_feature (529)..(533): n is a, c, g, or t
  misc_feature (544)..(544): n is a, c, g, or t
  misc_feature (547)..(547): n is a, c, g, or t
  misc_feature (550)..(550): n is a, c, g, or t
  misc_feature (552)..(552): n is a, c, g, or t
  misc_feature (560)..(561): n is a, c, g, or t
  misc_feature (563)..(563): n is a, c, g, or t
  misc_feature (568)..(570): n is a, c, g, or t
  misc_feature (572)..(579): n is a, c, g, or t
  misc_feature (581)..(584): n is a, c, g, or t
  misc_feature (587)..(594): n is a, c, g, or t
  misc_feature (598)..(602): n is a, c, g, or t
  misc_feature (605)..(607): n is a, c, g, or t
  misc_feature (609)..(609): n is a, c, g, or t
  misc_feature (612)..(613): n is a, c, g, or t
  misc_feature (617)..(621): n is a, c, g, or t
  misc_feature (623)..(623): n is a, c, g, or t
  misc_feature (626)..(629): n is a, c, g, or t
  misc_feature (631)..(631): n is a, c, g, or t
  misc_feature (633)..(635): n is a, c, g, or t
  misc_feature (639)..(641): n is a, c, g, or t
  misc_feature (643)..(643): n is a, c, g, or t
  misc_feature (645)..(648): n is a, c, g, or t
  misc_feature (654)..(655): n is a, c, g, or t
  misc_feature (657)..(657): n is a, c, g, or t
  misc_feature (661)..(661): n is a, c, g, or t
  misc_feature (664)..(664): n is a, c, g, or t
  misc_feature (667)..(671): n is a, c, g, or t
  misc_feature (675)..(679): n is a, c, g, or t
  misc_feature (682)..(685): n is a, c, g, or t
  misc_feature (688)..(688): n is a, c, g, or t
  misc_feature (692)..(696): n is a, c, g, or t
  misc_feature (698)..(698): n is a, c, g, or t
  misc_feature (701)..(702): n is a, c, g, or t
  misc_feature (705)..(705): n is a, c, g, or t
  misc_feature (707)..(707): n is a, c, g, or t
  misc_feature (709)..(719): n is a, c, g, or t
  misc_feature (722)..(725): n is a, c, g, or t
  misc_feature (729)..(729): n is a, c, g, or t
  misc_feature (731)..(735): n is a, c, g, or t
  misc_feature (737)..(737): n is a, c, g, or t
  misc_feature (739)..(740): n is a, c, g, or t
  misc_feature (742)..(742): n is a, c, g, or t
  misc_feature (744)..(745): n is a, c, g, or t
  misc_feature (747)..(749): n is a, c, g, or t
  misc_feature (751)..(751): n is a, c, g, or t
  misc_feature (753)..(755): n is a, c, g, or t
  misc_feature (757)..(759): n is a, c, g, or t
  misc_feature (763)..(763): n is a, c, g, or t
  misc_feature (765)..(765): n is a, c, g, or t
  misc_feature (769)..(769): n is a, c, g, or t
  misc_feature (771)..(771): n is a, c, g, or t
  misc_feature (773)..(775): n is a, c, g, or t
  misc_feature (778)..(779): n is a, c, g, or t
  misc_feature (781)..(781): n is a, c, g, or t
  misc_feature (783)..(783): n is a, c, g, or t
  misc_feature (786)..(788): n is a, c, g, or t
  misc_feature (790)..(790): n is a, c, g, or t
  misc_feature (795)..(795): n is a, c, g, or t
  misc_feature (798)..(800): n is a, c, g, or t
  misc_feature (802)..(803): n is a, c, g, or t
  misc_feature (805)..(805): n is a, c, g, or t
  misc_feature (808)..(809): n is a, c, g, or t
  misc_feature (812)..(812): n is a, c, g, or t
  misc_feature (816)..(816): n is a, c, g, or t
  misc_feature (820)..(820): n is a, c, g, or t
  misc_feature (822)..(822): n is a, c, g, or t
  misc_feature (827)..(828): n is a, c, g, or t
  misc_feature (830)..(830): n is a, c, g, or t
  misc_feature (836)..(836): n is a, c, g, or t
  misc_feature (838)..(840): n is a, c, g, or t
  misc_feature (842)..(843): n is a, c, g, or t
  misc_feature (845)..(845): n is a, c, g, or t
  misc_feature (848)..(849): n is a, c, g, or t
  misc_feature (852)..(854): n is a, c, g, or t
  misc_feature (856)..(856): n is a, c, g, or t
  misc_feature (859)..(863): n is a, c, g, or t
  misc_feature (865)..(865): n is a, c, g, or t
  misc_feature (867)..(868): n is a, c, g, or t
  misc_feature (871)..(873): n is a, c, g, or t
  misc_feature (877)..(878): n is a, c, g, or t
  misc_feature (880)..(880): n is a, c, g, or t
  misc_feature (882)..(882): n is a, c, g, or t
  misc_feature (885)..(886): n is a, c, g, or t
  misc_feature (889)..(890): n is a, c, g, or t
  misc_feature (892)..(892): n is a, c, g, or t
  misc_feature (895)..(895): n is a, c, g, or t
  misc_feature (897)..(897): n is a, c, g, or t
  misc_feature (900)..(900): n is a, c, g, or t
  misc_feature (903)..(903): n is a, c, g, or t
  misc_feature (907)..(908): n is a, c, g, or t
  misc_feature (910)..(912): n is a, c, g, or t
  misc_feature (919)..(919): n is a, c, g, or t
  misc_feature (921)..(922): n is a, c, g, or t
  misc_feature (925)..(925): n is a, c, g, or t
  misc_feature (927)..(930): n is a, c, g, or t
  misc_feature (932)..(932): n is a, c, g, or t
  misc_feature (940)..(941): n is a, c, g, or t
  misc_feature (943)..(945): n is a, c, g, or t
  misc_feature (947)..(947): n is a, c, g, or t
  misc_feature (949)..(949): n is a, c, g, or t
  misc_feature (952)..(952): n is a, c, g, or t
  misc_feature (955)..(956): n is a, c, g, or t
  misc_feature (958)..(958): n is a, c, g, or t
  misc_feature (963)..(963): n is a, c, g, or t
  misc_feature (966)..(966): n is a, c, g, or t
  misc_feature (969)..(970): n is a, c, g, or t
  misc_feature (974)..(974): n is a, c, g, or t
  misc_feature (977)..(980): n is a, c, g, or t
  misc_feature (982)..(982): n is a, c, g, or t
  misc_feature (984)..(984): n is a, c, g, or t
  misc_feature (987)..(989): n is a, c, g, or t
  misc_feature (992)..(992): n is a, c, g, or t
  misc_feature (995)..(997): n is a, c, g, or t
  misc_feature (1002)..(1002): n is a, c, g, or t
  misc_feature (1007)..(1011): n is a, c, g, or t
  misc_feature (1013)..(1015): n is a, c, g, or t
  misc_feature (1021)..(1023): n is a, c, g, or t
  misc_feature (1026)..(1026): n is a, c, g, or t
  misc_feature (1028)..(1029): n is a, c, g, or t
  misc_feature (1034)..(1034): n is a, c, g, or t
  misc_feature (1036)..(1036): n is a, c, g, or t
  misc_feature (1038)..(1038): n is a, c, g, or t
  misc_feature (1041)..(1041): n is a, c, g, or t
  misc_feature (1048)..(1048): n is a, c, g, or t
  misc_feature (1058)..(1059): n is a, c, g, or t
  misc_feature (1063)..(1068): n is a, c, g, or t
  misc_feature (1071)..(1071): n is a, c, g, or t
  misc_feature (1073)..(1074): n is a, c, g, or t
  misc_feature (1076)..(1077): n is a, c, g, or t
  misc_feature (1080)..(1083): n is a, c, g, or t
  misc_feature (1085)..(1085): n is a, c, g, or t
  misc_feature (1088)..(1090): n is a, c, g, or t
  misc_feature (1092)..(1098): n is a, c, g, or t
  misc_feature (1100)..(1103): n is a, c, g, or t
  misc_feature (1112)..(1112): n is a, c, g, or t
  misc_feature (1379)..(1379): n is a, c, g, or t
  misc_feature (1922)..(1922): n is a, c, g, or t
  misc_feature (1936)..(1936): n is a, c, g, or t
  misc_feature (3103)..(3103): n is a, c, g, or t
  misc_feature (3222)..(3222): n is a, c, g, or t
  misc_feature (3390)..(3390): n is a, c, g, or t
  misc_feature (3402)..(3402): n is a, c, g, or t
  misc_feature (3567)..(3567): n is a, c, g, or t
  misc_feature (3570)..(3570): n is a, c, g, or t
  misc_feature (3609)..(3609): n is a, c, g, or t
  misc_feature (3777)..(3777): n is a, c, g, or t
ngnnnntcannnnnnnnnnnnntatnnnnntnnnaattnnaatntngannacancattnaannatanagnantaannnntnangnngagngnnnnaagcngnagcgnnnannnnnngnnngnnnncnntnaatccnttatncnnnnnnggaannncnnaagtngnaaangcnnaacnnncnaannnnanagnnannaaaannnaanaaagnnannnnnanannnnagnattntncntntnggtacantntnnnnannnnnnatnnannnanncnnnacncnannanannantnatnannttatnannnatnannnnannattgatgnnttannnnnnnntgnnnntnnnnngnntnccnnagncaccaannnncanatcnnctanntncaanncntnaancnnnnacancanannnnnaannnnnncntnnnancttnannnngtnntnntntanngtnncgangnatnncnnntnnccnnttgnnnnngntnnangggngtnnagnnncnaagntngaannncnnacnnnnnaactacgcaanaanatncnacgcaacnngntacannncnnnnnnnnannnntcnnnnnnnnagtnnnnnatnnnantgnngaannnnngnatnnnngngnnngcgnnntngnnnntatcgnncntgcnacnatnnnnnattnnnnnatnnnnaanaaannnnnanatnncantntnnnnnnnnnnnttnnnnatgnannnnnanannanannannnangnnntnnncaangntganancnnnaanntngnatnnnanccttntgnnntnnanccnncanccanaaanangaaanncngaaaangnnnanncnttnnagnnngncannnnncnanntannnagcnnananacnntcnnanttntnaanttntaanntnnntaagtancnnggnannnnanaccatgcnncnnnantncanaanngnaaaanggnaanngganaannnnananggnnnaangcnnnagtanagaannnnnannnataaannnaananngaaanananatnaagtatnaagtattaannattnnnnnngtncnnannctnnnnantannncnnnnnnnannnntaatacttnatacttaatacttgaaaaatacttaatacttatttcaagaatccttgctggcgaagtactttcaatagattttcggacataaattcgttatctttctttgtgtaacgcacgtccgtaaagacttgagccaatgtttcttttttattttcttcgataaactgcttgttttccggcaatgattctttgtaggcatagagtttatctatttcttccggtgtatagtcgtgatatttttcatcgtgcacggcagcttccaaaggcaaacgntctacttgtgcgggaataccatccggatagcctaccgttattgtggtgagagggaataccagttcggggagttggagggtatcaataatcatttgaggattataagtggtagttcccaaataacaaatgccgagtcctgcttcttccgccagcgtacaaaaagtctgcgcaacaagcaaagtatccatagacgcattcataaaagacattaaattatcgtagcccggcactgctttccgctgttcacaccatttgctgaaacgacggaaatcagcacaaaaagtcaatacgaccggagcattttttaccatcggctgattgaaatgagcaggcgaaagtttctccttcatttccgcatcgcgagtcacaatcacactataaagttgcatcccacccatcgtagaagcacggaaagaggtttcaagcaaatcatttaacaaactcggatttatatctttaggcagatatttccggatagttcttctgttctttacggtttcaaacatatcttttttttgcaaagatataaaaagaaaaaaatantccaccacactagnggaatagaatagttttctttttggagaactttaacctttgaacaaaattcaattctaactgtttatcaaatacttagcataaacaaatggaaaacttgcaacctgttaataaattaattcatttttattttgatagatgaaaaaacattcttagctttgcgcctacatttgttaacgataagtaaacttctacatattacttattaaaaacgagatttaacacaaattgaatcgtggaaaaacagatttattcttacgacgaagcctatgaagaatctttacgatattttcaaggcgacgagcttgctgcaagggtttgggtaaacaaatacgcagtaaaggattctttcggtaatatctatgaaaaatccccggaagacatgcattggagaattgcaaatgaagtggcacgcgtagaatcgaagtatccgaatgcgttgacagcaaaagaactgtatgatttactggatcacttcaagtacatcgtcccccaaggtagcccgatgacaggaatcggtaacgactaccaggttgcttcactatccaactgcttcgttatcggagtggacggtgcagccgactcttatggcgctatcatcaaaatcgacgaagaacaggtacaactaatgaaaagacgcggtggtgtaggtcatgacttatcacacatccgtccgaaaggttctcccgttaaaaactcggcgttgacttctaccggtcttgttccgttcatggaacgatattcgaattccactcgtgaagtagctcaagacggacgtcgcggtgcattgatgttgagcgtgtctatcaagcatccggattcggaagcattcattgatgccaagatgaccgaaggtaaagtgaccggagcaaacgtttctgtcaagttggacgacgctttcatgcaggctgccgtagacgaaaagccgtatgtacagcaatatcctatcgactctgcccaacctacattcaccaaggaaatcgacgcttctaccttgtggaagaaaatcgttcacaatgcatggaaatcggcagaaccgggcgttttgttctgggatacgattatccgtgaatctgtgcctgattgttatgcagacctgggttacagaacggtatctaccaacccatgcggagaaattcctctatgtccttacgattcttgccgcttantggctatcaatctatattcttatgtggtaaatccgttcaaaccggatgcttattttgatttcgacctgttccaaaaacacgtggctctcgctcaacggatcatggacgatattatcganctcgaactagagaagatcgaacgtatcatgaccaagattgacgaagatccggaaaacgaagaagtgaaacatgcggaacgtgcactttgggagaaaatctacaagaagagcggacaaggtcgtcgtaccggcgtaggtatcactgcagaaggtgatatgcttgctgcnttaggattgcgntacggaacggaagaagcaacggaattctctgaaaaagtacacaagacagtagctctcggtgcctatcgttcttcagtggaaatggccaaagaacgcggtgccttcgaaatatacaatagcgaacgtgaacagaacaatccgttcatccaacgcctggcagcagcnganccgaaactgtatgaggacatgaagaaatatggtcgccgnaacattgcctgcctgacgattgctccaaccggaacgaccagtttgatgacgcagaccacttcgggtatcgagcctgtattcctgcctgtttacaaacgtagaagaaaggtgaacccgaacgatacgaatgtgcatgtagactttgtagacgaaacaggggacgcattngaagaatacatcgtattccatcataaatttgttacctggatggaagctaacggatacgatccggccagacgttacacccaggaagagattgacgaactggttgccaaatctccttattacaaagcgacttctaacgatgtcgactggttgatgaaggtgaagatgcagggaagaatccagaaatgggtagaccactctatcagcgtaaccatcaatctgccga

SEQ ID NO: 406 - DNA, 4000 bp, Escherichia coli
  misc_feature (38)..(38): n is a, c, g, or t
  misc_feature (59)..(59): n is a, c, g, or t
  misc_feature (891)..(891): n is a, c, g, or t
  misc_feature (1137)..(1137): n is a, c, g, or t
  misc_feature (1304)..(1304): n is a, c, g, or t
  misc_feature (2323)..(2323): n is a, c, g, or t
  misc_feature (2408)..(2408): n is a, c, g, or t
  misc_feature (2568)..(2568): n is a, c, g, or t
  misc_feature (2776)..(2776): n is a, c, g, or t
ttcccggcgcgccgggcgccacgcgcacgctgatgcanctcctgccgcgcacgctctcngcgctgctgatcctcgtcgtcggctggctcgcggcgaacttcctcgggcagggcgtgctgatcgcggcggtcaacgcgggcctgccggaggcgcgcgtcctggcccgcgcggcccggtggctcgtcctgctgttcgcgttcgcgacggcgctcaccgagatcgggatcggccgcgacatggtcgtggtcgccttcggcatcctcttcggcgggctcgtgctcgccctggcggtcgcgttcggcctcggcggccgccacctcgcgcgccatatcctggagcgcgggcggcgccgcgagcgcgaaacccgcgaccgcgagaccatcagccacatctgagacccgtgccgatcccgccgggtcacgtgcgaagattttcgtatggacgagggtctggcgtgagccgctgcgggttggcggtcctcgggctggtgctcgccctctggccccgagccgccgcgggagagaccgccgacgcgcccgtcgagctgatcgacgtgaccgtccagtcccggagtgacggcgtcagggtcgacgtcaagacgtcgggcccgccacggtaccggagcgagctgatggacgggccgtaccgtctcgtcctcgatttcgaggacaccctgtatcactggacggtgggacccctggcgatcgacatcgatccggtcaaaacgatccgcggtgggcagttccgcgcgaacgtcgcccggctggtgatcgagctgacgcgcgaggttccctacagggtcgaggcccatccgcggggggtgcgtgtcctcctgggcgccgggagggcgtcggccccgcctggcgaggcgcgggtcccgcccgccgaggngccgaagccggcgcccccgtggcgtctcgccgggaccgtgttgcgcgccgagggctcgaccgcctacatcgccgacgccgcgacgagccaggtcaagagctaccgtgtcggtgacgcgatcggtgacggcgtcgtcgagacgatcgaggagcgccacgtcgtgctagggaccccgcgcggcccggtcgagctgcgcatggaggagctgcccccggcgcgcgtgccgcgacgataggagcggggccncgcgcgagcgtggcatactgcagtacgcggaggatctggatgtgagcggagtgctcatcacgttcgagggagtcgaggggtcgggcaagacgacccagatgcgacgcctcggacgctggctgcgcgccgaggggcaccgggtcgagtgcacccgcgagcccgacggnacgcgcctcgggctcgccgtgcgccgcctgttcgagcgccccggcgtccggcccgagccgctcgtcgaggtcttcctgttcatggccgcgcgccaccagcacgtcgccgagaaggtccgcccgtggctcgcgcgcggccgcgtcgtgctctccgaccgctacgccgacgcgaccgtggcgtaccagggctacgggcgcgggatcgaccccgacctgatccgtgagctgaacgtccgggcgaccggcggcgtcctgcccgacctcacgctgctcttcgacgtggatcccgccgaggggttccggcggattggcgcccggcggcgcgaccacttcgagcgcgaggcgctcgccttccaccggcgcgtgcgccggggctacctggagatcctgcgcgcggagcccaagcgcgtgcggcttgtgcgcgcggccgagcccccggccgtggtcgccgcggaggtacgcgcgctcgtcgaggacttcctgcgtggcgcttgacgcgatccgcgaccagccgcgtgccgtggccctgctccggcgggcgctcgcgaccgaccgcgtcgcgcacgcgtacgcgttcgtcgggcccacgggcgcgggacggatgacgacggcgctcgcgttcgcccaggcgttgctttgtaccgggggccgcgaggccggtgcagtcggtgggtggcctgagccgaggcgcgaggccggcgttccgccctgcgggcggtgccagggctgccggctcgccgccgcccgcgtgcatcccgatctccacctgatcgcgccgacgccgcccgagacgaacccgaagggcgcccgcgcgatccgcatcgacgcgatccgcgggctggagcgtcaggcggcgctccgacccgtgatggcgccccggaagctgttcgtcctcgacgaggccgagcgcatgacgggcgaggcgccccaggcgtttctcaagaccctcgaggagccgcccgccgcgacggtgctgatcctcgtcctgccgcgggcgcgggcgctgcccgccaccgtcntctcgcgctgtcaggtcgtgcgcttcgagccgcgcagcgcggaggccgccgtggtggcgcgcgctcgggcgcgcacgctcctcgncgaggtgagggccgagggcgccgacctcatgttcagccgaaccgagcgactcgaccgcgagacggcggaggggctcgtcgacgcctactggctcctctgccgtgacctcgtcctggcgaaggcgggagctcccgcctcgctgctggccgacgccgcgcgngccgtggagctcgcccgcgaggccgaggcgtggacgctcgacgagctgctccagtcgatcgacctctgccggcaggcgcggcaggcgctcgcgcgcaacgtggcgccccggctgaccctcgaggtgatcctgagccgcctcgccctgcgggcggcatgaggcgagacccatggaatccgagccagagtacctgatcggggttcggctncacgagagcgcgcaggccgacgactacaagctggtcggcctggacgcccacgtgggcgacctcgtggtcgtcgagacggggcaggacaccgcggtcggcgaggtccggcggcccagacgtgcgctcccggaggccaagcgcgaccgcctgtaccgccgcgtggtgcgcctcgcgatgccggcggaggcccgcgagtaccgcgagcgccgcgagcgcgagcagcgggcgatcgtcacctgccagcagctggcgcgcggacgagggctctcgatgaaggtggtggacgtcgagatgcaaccggcggcgcgccgtgtcaccgtctacttcaacgccgaggaccgcgtcgacttccgcgagctggtccgcgacatcgcgcgcgagttccactcgcggatcgagatgcgccaggtcggcgcgcgcgacacgaccaagctcatggacggcatcgggccgtgcggccgccagctctgctgctcgtcctacctccggcgcttcgagccgatctccgtgaggatggcgaaggcccaggacatgccgctcaccgacaaccggctgctgggcaactgcggacggctgaagtgctgtctcctctacgagttctcgacctaccaggagctccggtcgcgcctgccacgggtcaacacgccgtgccaggcctcgtgcggcggcgggggctgcatggcgggcaaggtgacgtcgatccgcgtgctcaagcagacggtggtggtcggcttccccgatgggacggaggcggaagtgccgctcgaccagctcacctgggaggggcggccccacatccaggcccagctcgaggactcgtgaccgaccgcgcccgcgtcttctacctcacgacgccgatctactacgtcaacgaccgcccccacctcggccacgcctacacgacgatcgcggccgacacgatggcgcgctaccaccggctcgcgggcgacgacgtctggctcctcaccggcaccgacgagcacggcgacaagatcgcgcaagccgcggccaaggcgggcgtgacgccgcaggcgctggccgatcgcaactccgccgcgttccgcgagacctggaacgcgcttggcatcgcgaacgacgatttcatccgcacgacggagccgcgccacacgaaggtcgtccaggcgatcctccagacgctctgggaggcgggcgagatctatctgggcaactacggcggccagtactgcttcgggtgcgagcgct

SEQ ID NO: 407 - DNA, 4000 bp, Escherichia coli
ccggaattcgctgacagcctgtaaaatgtattggtattttcccagcagcagcaggatgaaggcgcctgaaattcccggaagaatcatcgcgcagatggcaacagctcccgaaagcatgataaaccaccagtcgttgggcgtttgcgtcggggaggcgatcgtgatccagaatgccagcgcggtgccgacaagcagtcccagcagcgaagtgaggttccacttccgaatatcccgggcgacgaaagccgccgaagcgacgatcagtccgaaaaagaaggaccagatttcgatcgggtgatgcgccagcaggtaagtcatcaaccgtgccagcgaaaagatggcgataccgatacccagcagtacggagaagagaaagctgccgttgatgtggcgccagaatttcctgaattcgaaccggccgagcaatttcaacgcagtcggattgaaacttttgatcgactcgatcagttcgctgtaaattcccgaaataaaggcgatcgtcccgcccgatactcccgggacaacatccgccattcccattgcgcagcctttcagcgccaacagcacgtatctgaacataatccgctctaataaaaagttaggcaattcatctttcaatgtaccttttgacaattccgagaggtgtctattcgctgttcccggttgtatcggtaatgctcctgcccataaattccttcccggaagggacttaaggcgctttactcccaaagaggtacactaaagtatataatcacgaaaagttatctcgttcgtcgaaaacacgacgtttcgcaaaaacggcattataataacatcgcatgggtattgccgtttccggcgatgttttgcttgtgcaaagatagtatatgcgggaaacatcgcaagattttttcgggataaaaccctgaaaaaatccatcccgaacgaagatttaataattcgttaataataccgttcgaggattccgcctccgacgacccgttcccctcggtacaaaacgacgggctgcccggcggccggggcccacgcgggatcctccagttcgatccgaatccccgaagcggcagggaagaccgctgcgtatccctcggggttgcggccgatgccccggatcaccgcacggatatcgcgggcaccgaatacctcgtcgctctctaccaggcgacattccccgacttccagcgtacgatgcaacaacagcttctcttctccggctacgatccggtttgccgccgtgtcgatagcgaccaccgcccagcccggcggcaggtcgaggccctttttctggccgatggtgtagagggccgccccgtcgtgcgtgccgagccgatgtccggcagagtcgatgatggggccgggccggagcgcttccgttttatcccggcttcgcaggaagtcgcggcacgggcgtccctcgagaaaacagacgcccatactctcccgacggtcggcgagttcttcgacgatatttcgtttgatgaccgttcccatcggagtcagcacccgatcgaggacctcctgcggcaagtcccacaggtagtaggactggtccttgcggttgtcggccgcacgggtgacgtatcgtttgccgcctgcggaggtaatgcggaaatagtgtcccgtagcgatgtagcgaatccccagtgcgtcggcctctgccgcaagacagggccatttgatccgactgttgcagcgcgtgcacggagccggggtacgcccccggaagtaactgtcggtaaaatagtccaccacctcccgttcgaaccgctcccgcaccgaccgcattcgccagggaatcccgagtgccccggcacgcagacgcgccttttccaacaatgcggaatcgcctctcatgtcgagcgtcagagccgttacatgatatccggccgcctgcaacaatccgacggcggcgaagctgtctattccgccgctgaaacccaacaatacccaattatccttcataaaactcctgtcttcatgagaaccggctgccgaaatttcggcagccggttctgtcaagcatattcttccggcttcgggtgttcttcttcgaagaattccggtttttcccgtttgatgaacccgatcacctcttccaagccttcgaggaatttggaaaaatcctctttgtaaaggaatattttatgccggtcgtaactgaccgttccatccggcgccgttttcttccggctctccgtaatggtaagaaaataatcgttcgcacgcgtagcgcgcacgtccagaaaataggtccgccggccggcttttacgactttcgacaggatctgttcgccgaaatcttctccgtccgtgcggaaggtattcagagcagccatacaaggtaatattttgagggttattcgtttgttccatacgtaaatataaaacaaatttcgttttcctgcaaattcttgcccgtgattatatatctttgggcgtgcagcgactcaaacccctttcgggaacgggattcgggcaggccgaattataaactcaatattacgagtcgtgaatacgcgactctcggaaataacgtgatgcaactgcttattgccgctcatgctgcgcttccaggagtggcagcccctctgcctcccagtttttcagcaaattgagcgcccggatgaagtcggcatcatcccttgcgtgcaatatccgcagcagagcttcccggtcgaaaagccgctctgccagcaatgctttgagcaggcgcctggtccccgcttcgacatcggaatcttccgccggaggtgttacgccctgttccagtcccagtccgatcaactcctcatacatttcatcgggaacttcgaaccgctcctcgaacgatgcgaactccggataatcccgttccagggctgcccgggtgcggtccaggtagtgctgcataaattcaggaaagatatttttccgcagcagggcgttcagataagatgcctgcaccgtatcctgtattacgcacacgtcgggcgctatgcctccaccgccgtaaaccgtccggcccgtgcggagtgtccggtaggccggcgacggaatcgtgtcgggcagcgagtgagttcggtaagccgtgcgatccccgcctttgacgtaaggacgttgaatttcccggcccgaaggcgtatgatagcgggcgatgaccagacgcaaagccgacccgtccggaagcagatattgccgctgcaccaatccttttccgaagctgcggcgcccgacgattatcgcgcggtcccagtcctgcagcgctccgctcacgatttcgctggccgatgccgaccgttcgtcgatcagtacgacaagccgcccttcggccggaaataccggattccgacgggcggaatggacgacggacgggacgctgcggccttcggtcgaaacgatccgcgagcctttgggcagaaaaaagccggacaaagcgatcgcctgatccaacagtcctccgccattgccccgaagatcgagaatcagctccttcggacgatccagttcttcgtaggcccgctgcacttcccgcatggtggtctgaccgaaacggatcagtctgatgtatcctaccgcagaatcgacccggtaggccagttcgacggaggggaccggaatttcccgtcggacgatttcgtatagaattggcagacgaattcctcgtcgaatcactaggatttttactttcgatccggcatctccccgcatggcggagatgagctcggaggccggaatctctttcacggcacgtccgtccacccggacgatccggtcgtcgggacggatgcccgcttcttcggcggcccctcccgacaggagggaggttacgaccagcgaatcacggatccattgggtctgaatgcctattcctccgaacttaccccgatagaggctccagaattcagccatctccgcagccgaggcatattcggtatggggatcgagttgctgtaccatgctgcggatcgcctcctcgaccagcggcgccatatcgaccgaatcgacatacatcttacggata

SEQ ID NO: 408 - DNA, 4000 bp, Escherichia coli
  misc_feature (563)..(563): n is a, c, g, or t
  misc_feature (567)..(567): n is a, c, g, or t
  misc_feature (1010)..(1010): n is a, c, g, or t
  misc_feature (1870)..(1870): n is a, c, g, or t
  misc_feature (1987)..(1987): n is a, c, g, or t
  misc_feature (1990)..(1990): n is a, c, g, or t
  misc_feature (2504)..(2504): n is a, c, g, or t
  misc_feature (2761)..(2761): n is a, c, g, or t
  misc_feature (2930)..(2930): n is a, c, g, or t
  misc_feature (3034)..(3034): n is a, c, g, or t
  misc_feature (3211)..(3211): n is a, c, g, or t
  misc_feature (3276)..(3276): n is a, c, g, or t
  misc_feature (3295)..(3297): n is a, c, g, or t
  misc_feature (3300)..(3301): n is a, c, g, or t
  misc_feature (3305)..(3307): n is a, c, g, or t
  misc_feature (3310)..(3312): n is a, c, g, or t
  misc_feature (3314)..(3318): n is a, c, g, or t
  misc_feature (3320)..(3320): n is a, c, g, or t
  misc_feature (3322)..(3323): n is a, c, g, or t
  misc_feature (3327)..(3327): n is a, c, g, or t
  misc_feature (3329)..(3330): n is a, c, g, or t
  misc_feature (3332)..(3332): n is a, c, g, or t
  misc_feature (3335)..(3336): n is a, c, g, or t
  misc_feature (3339)..(3339): n is a, c, g, or t
  misc_feature (3342)..(3346): n is a, c, g, or t
  misc_feature (3348)..(3350): n is a, c, g, or t
  misc_feature (3356)..(3356): n is a, c, g, or t
  misc_feature (3359)..(3360): n is a, c, g, or t
  misc_feature (3366)..(3366): n is a, c, g, or t
  misc_feature (3368)..(3368): n is a, c, g, or t
  misc_feature (3370)..(3373): n is a, c, g, or t
  misc_feature (3375)..(3375): n is a, c, g, or t
  misc_feature (3377)..(3378): n is a, c, g, or t
  misc_feature (3380)..(3380): n is a, c, g, or t
  misc_feature (3384)..(3386): n is a, c, g, or t
  misc_feature (3388)..(3390): n is a, c, g, or t
  misc_feature (3392)..(3392): n is a, c, g, or t
  misc_feature (3394)..(3394): n is a, c, g, or t
  misc_feature (3396)..(3396): n is a, c, g, or t
  misc_feature (3399)..(3400): n is a, c, g, or t
  misc_feature (3402)..(3402): n is a, c, g, or t
  misc_feature (3404)..(3404): n is a, c, g, or t
  misc_feature (3407)..(3407): n is a, c, g, or t
  misc_feature (3409)..(3409): n is a, c, g, or t
  misc_feature (3411)..(3411): n is a, c, g, or t
  misc_feature (3417)..(3420): n is a, c, g, or t
  misc_feature (3424)..(3424): n is a, c, g, or t
  misc_feature (3427)..(3429): n is a, c, g, or t
  misc_feature (3431)..(3431): n is a, c, g, or t
  misc_feature (3433)..(3435): n is a, c, g, or t
  misc_feature (3437)..(3438): n is a, c, g, or t
  misc_feature (3440)..(3440): n is a, c, g, or t
  misc_feature (3442)..(3442): n is a, c, g, or t
  misc_feature (3444)..(3444): n is a, c, g, or t
  misc_feature (3447)..(3451): n is a, c, g, or t
  misc_feature (3453)..(3454): n is a, c, g, or t
  misc_feature (3457)..(3457): n is a, c, g, or t
  misc_feature (3459)..(3459): n is a, c, g, or t
  misc_feature (3462)..(3462): n is a, c, g, or t
  misc_feature (3468)..(3469): n is a, c, g, or t
  misc_feature (3472)..(3473): n is a, c, g, or t
  misc_feature (3476)..(3476): n is a, c, g, or t
  misc_feature (3479)..(3479): n is a, c, g, or t
  misc_feature (3483)..(3483): n is a, c, g, or t
  misc_feature (3485)..(3485): n is a, c, g, or t
  misc_feature (3487)..(3487): n is a, c, g, or t
  misc_feature (3489)..(3489): n is a, c, g, or t
  misc_feature (3491)..(3491): n is a, c, g, or t
  misc_feature (3493)..(3493): n is a, c, g, or t
  misc_feature (3495)..(3495): n is a, c, g, or t
  misc_feature (3501)..(3502): n is a, c, g, or t
  misc_feature (3504)..(3505): n is a, c, g, or t
  misc_feature (3508)..(3508): n is a, c, g, or t
  misc_feature (3511)..(3511): n is a, c, g, or t
  misc_feature (3515)..(3515): n is a, c, g, or t
  misc_feature (3517)..(3518): n is a, c, g, or t
  misc_feature (3520)..(3521): n is a, c, g, or t
  misc_feature (3523)..(3523): n is a, c, g, or t
  misc_feature (3525)..(3527): n is a, c, g, or t
  misc_feature (3530)..(3530): n is a, c, g, or t
  misc_feature (3532)..(3533): n is a, c, g, or t
  misc_feature (3536)..(3536): n is a, c, g, or t
  misc_feature (3538)..(3538): n is a, c, g, or t
  misc_feature (3540)..(3543): n is a, c, g, or t
  misc_feature (3547)..(3547): n is a, c, g, or t
  misc_feature (3549)..(3551): n is a, c, g, or t
  misc_feature (3556)..(3557): n is a, c, g, or t
  misc_feature (3559)..(3560): n is a, c, g, or t
  misc_feature (3562)..(3562): n is a, c, g, or t
  misc_feature (3564)..(3566): n is a, c, g, or t
  misc_feature (3569)..(3569): n is a, c, g, or t
  misc_feature (3571)..(3575): n is a, c, g, or t
  misc_feature (3577)..(3577): n is a, c, g, or t
  misc_feature (3584)..(3584): n is a, c, g, or t
  misc_feature (3586)..(3586): n is a, c, g, or t
  misc_feature (3588)..(3588): n is a, c, g, or t
  misc_feature (3592)..(3592): n is a, c, g, or t
  misc_feature (3594)..(3594): n is a, c, g, or t
  misc_feature (3596)..(3599): n is a, c, g, or t
  misc_feature (3601)..(3602): n is a, c, g, or t
  misc_feature (3604)..(3604): n is a, c, g, or t
  misc_feature (3606)..(3606): n is a, c, g, or t
  misc_feature (3608)..(3610): n is a, c, g, or t
  misc_feature (3613)..(3614): n is a, c, g, or t
  misc_feature (3618)..(3627): n is a, c, g, or t
  misc_feature (3632)..(3634): n is a, c, g, or t
  misc_feature (3637)..(3640): n is a, c, g, or t
  misc_feature (3645)..(3645): n is a, c, g, or t
  misc_feature (3647)..(3647): n is a, c, g, or t
  misc_feature (3649)..(3652): n is a, c, g, or t
  misc_feature (3655)..(3655): n is a, c, g, or t
  misc_feature (3658)..(3660): n is a, c, g, or t
  misc_feature (3664)..(3664): n is a, c, g, or t
  misc_feature (3670)..(3673): n is a, c, g, or t
  misc_feature (3675)..(3676): n is a, c, g, or t
  misc_feature (3678)..(3679): n is a, c, g, or t
  misc_feature (3683)..(3685): n is a, c, g, or t
  misc_feature (3687)..(3687): n is a, c, g, or t
  misc_feature (3691)..(3692): n is a, c, g, or t
  misc_feature (3694)..(3696): n is a, c, g, or t
  misc_feature (3698)..(3700): n is a, c, g, or t
  misc_feature (3703)..(3703): n is a, c, g, or t
  misc_feature (3706)..(3707): n is a, c, g, or t
  misc_feature (3709)..(3709): n is a, c, g, or t
  misc_feature (3711)..(3714): n is a, c, g, or t
  misc_feature (3718)..(3718): n is a, c, g, or t
  misc_feature (3722)..(3722): n is a, c, g, or t
  misc_feature (3724)..(3724): n is a, c, g, or t
  misc_feature (3726)..(3728): n is a, c, g, or t
  misc_feature (3731)..(3732): n is a, c, g, or t
  misc_feature (3734)..(3735): n is a, c, g, or t
  misc_feature (3738)..(3740): n is a, c, g, or t
  misc_feature (3742)..(3743): n is a, c, g, or t
  misc_feature (3745)..(3745): n is a, c, g, or t
  misc_feature (3747)..(3749): n is a, c, g, or t
  misc_feature (3752)..(3752): n is a, c, g, or t
  misc_feature (3754)..(3754): n is a, c, g, or t
  misc_feature (3756)..(3756): n is a, c, g, or t
  misc_feature (3758)..(3758): n is a, c, g, or t
  misc_feature (3760)..(3760): n is a, c, g, or t
  misc_feature (3762)..(3762): n is a, c, g, or t
  misc_feature (3766)..(3767): n is a, c, g, or t
  misc_feature (3770)..(3770): n is a, c, g, or t
  misc_feature (3772)..(3773): n is a, c, g, or t
  misc_feature (3776)..(3777): n is a, c, g, or t
  misc_feature (3780)..(3784): n is a, c, g, or t
  misc_feature (3787)..(3790): n is a, c, g, or t
  misc_feature (3792)..(3794): n is a, c, g, or t
  misc_feature (3796)..(3797): n is a, c, g, or t
  misc_feature (3800)..(3800): n is a, c, g, or t
  misc_feature (3803)..(3803): n is a, c, g, or t
  misc_feature (3806)..(3806): n is a, c, g, or t
  misc_feature (3809)..(3809): n is a, c, g, or t
  misc_feature (3812)..(3815): n is a, c, g, or t
  misc_feature (3817)..(3817): n is a, c, g, or t
  misc_feature (3819)..(3820): n is a, c, g, or t
  misc_feature (3824)..(3824): n is a, c, g, or t
  misc_feature (3826)..(3827): n is a, c, g, or t
  misc_feature (3830)..(3830): n is a, c, g, or t
  misc_feature (3832)..(3832): n is a, c, g, or t
  misc_feature (3835)..(3835): n is a, c, g, or t
  misc_feature (3839)..(3839): n is a, c, g, or t
  misc_feature (3841)..(3842): n is a, c, g, or t
  misc_feature (3844)..(3844): n is a, c, g, or t
  misc_feature (3848)..(3849): n is a, c, g, or t
  misc_feature (3854)..(3854): n is a, c, g, or t
  misc_feature (3856)..(3856): n is a, c, g, or t
  misc_feature (3859)..(3861): n is a, c, g, or t
  misc_feature (3865)..(3866): n is a, c, g, or t
  misc_feature (3868)..(3868): n is a, c, g, or t
  misc_feature (3874)..(3875): n is a, c, g, or t
  misc_feature (3877)..(3877): n is a, c, g, or t
  misc_feature (3881)..(3885): n is a, c, g, or t
  misc_feature (3887)..(3889): n is a, c, g, or t
  misc_feature (3891)..(3891): n is a, c, g, or t
  misc_feature (3893)..(3893): n is a, c, g, or t
  misc_feature (3895)..(3896): n is a, c, g, or t
  misc_feature (3898)..(3899): n is a, c, g, or t
  misc_feature (3902)..(3905): n is a, c, g, or t
  misc_feature (3907)..(3909): n is a, c, g, or t
  misc_feature (3914)..(3914): n is a, c, g, or t
  misc_feature (3916)..(3916): n is a, c, g, or t
  misc_feature (3918)..(3921): n is a, c, g, or t
  misc_feature (3924)..(3924): n is a, c, g, or t
  misc_feature (3927)..(3934): n is a, c, g, or t
  misc_feature (3937)..(3938): n is a, c, g, or t
  misc_feature (3940)..(3942): n is a, c, g, or t
  misc_feature (3945)..(3945): n is a, c, g, or t
  misc_feature (3951)..(3951): n is a, c, g, or t
  misc_feature (3953)..(3954): n is a, c, g, or t
  misc_feature (3956)..(3959): n is a, c, g, or t
  misc_feature (3961)..(3961): n is a, c, g, or t
  misc_feature (3964)..(3965): n is a, c, g, or t
  misc_feature (3967)..(3967): n is a, c, g, or t
  misc_feature (3970)..(3970): n is a, c, g, or t
  misc_feature (3975)..(3975): n is a, c, g, or t
  misc_feature (3977)..(3979): n is a, c, g, or t
  misc_feature (3982)..(3988): n is a, c, g, or t
  misc_feature (3993)..(3996): n is a, c, g, or t
  misc_feature (4000)..(4000): n is a, c, g, or t
ttcaattcccttttcatcgagctctttctttatttcttctattttgtcgtcaataatagcaaaggcaaaccaggatgattttcctgttccaggctctttctgagaccaccaaccccggttttgacatacttccttccatcgttcggcgttttcacgtcttgcggagataaatccgtcaatcttccttaactgttcaatcccaaccgccgcttgcatttccatcggcctgacgttgtatccagggaaaagaaattcatacgcagatggctttacattaaagacattcttttccggtaagtgccttgtccatccgtgagaacgaagacataaaagcatctggtaataatattcgtcattcgtggtaattatcccgccctccattgtctggatatggtgagaaaaaaacatcgaatgtgaagacatcaacccgaaattaccggttctgaaattactataaaccgcgcccatggactcgcaattgtcttccagaatattcgtggaagggaaccagcgataatcattggggtttcccagcagatttaccgccaggatcaaatccccgncttnataagcttctttcagcgattcaatgtcatagttcagcgtgtctttgtctatgtcaacgaacttcaacgtccatccgtattgctgaaacggagaataggacgtagaccaggaaaccgccggtacaatgaccgtgccggctttattcctgaacgtataggccgcaaccatgagaaggtttgcagaggaaccggaattgaccatgacggcatacttggtccccacccacgccgcgtacgcctcctcgaattcctttaccttcggtcccatcgtgaacatccccgaatccaggacgttcaagatggcttctctttcttccaacccccaggtactaatcgccaatggatgcttctttacaggcttttgcaatttcagactccatcatctctttgattaaagattcaaaggaatactcgggtttccaccccaatgctctgatcctggangaatctccaatcaggctgcctacatcggcggggcggatataatctttatcttgttttacaaaaccagaccaatcttcaataccgatatatctgaatgcctccgtcagaagttctctgactgatctggattctccggtagcaacgatataatcatccggtccaggttgctgcatcatgagccacatggcttctacaaaatctttcgcatgcccccaatctctcctggcatccagattcccgagaaaaatatatctctgtagcccgaattttattctggctactgcctgacagactttcctggttacgaaatccactcctcgaatcggagattcatgattgaataaaattccattacaggcatacagtccataagcctcacggtaattaaccgtcagccaatatgctgcaagcttcgatattccataaggacttcgtggatgaaatggagatttttcattctgcggcggcggtgtcgatccgaataattcggatgttgacgcctgatagaatcgggatccggtggatttcgcaccttccagtacgttcaatgtaccgatagcgtttatctcgaacgtcgttttcgggattttgaacgactctccaacatgcgacattgccgccagatggtaaacttcatccggttgaatatcttgaatcagatcttttatagttggatcggtgacatcgccttcatgtacgataacaccggatggaatgactttggattgcgcggttcttctcgttaaaccatgaaccctataacctttattcaaaagtaattcagataaatatctgccatcctggccggtcagtccggtaataaatgccttcaaacggcctccttacgctggcgcacgccnaggggctttaaatgaacctcaagctcgacggatattgccaacttcctctcgtcggcgcgaaaagaagacttttcgataacgaagaattccgataatttatttatccaccattccggnggntggaccgtaaggtgtgcatttctcccgtccggcaacttcttcgcggccggagaacaactaatagtgaaaaacccggctttaatcatcttggacttgatatgtctcaacacatcatccagacaatccggctctatatgctcaagaacatccgtacacaccaccaaatcagcaggttccggttcgttggaaaactcagtaatagcggggtcgtatttcttgtttacgagaagttttcctttaccgcatccataatcgaggacatcttcatatccgagtgctttgataacggcattcctgaattttgagccggatccgaaggatctatatttttcgtgcatcctgataagttgttttttatacttatcgctaagcagcatgaggcataactcttggtttcgcgcccttctttttagcgcccttggcgtgaaagaaatattcccccaacacagacctttcaacgacatccaggtccgccaatgacattacccggtcttttggaatcttgaaaaacggngatagattgttgccagatatgccggatttctctctggcaaagtcgaatgcttcacaatcatgccaccgtttatgatccttgaaccatccatgccggataaacccgatgtaatatttcaggaattccctgaatttctcattctcggtgtcgaaaccgataaacccggtctcagtatgaaatccttccctccccaaatacgaaagacccttaccgtcgaacagttttatcaaccaatcgtcggtaacgggttttctganaatactgtctgcatcgagccaaataactttgccattataatctttcagcacatcccattgtgccaacatctttcgtgagaatctccatacatcgtagttataattatatttaccgtttaccattccatgacatacgggcgtattcttgatgttttgatagaaattcatngccccttcgatgtcgaagaagtttctaacttctatttttccattgtctgtgtctatgtctatcggtttctcgacatagacaataattttactcggccaattttnaataaccgactccagcatcttcctggcgtaagtctcgtacccggtactggaaaatgtggtgattgctaatgtggtatttgctaacaaatattcaccttataaacatttgaaagaacgttcaacaaccgattttcattttcccagtcgtggttcgggtacggacccgctccggttctngggattgcaaaatttctgtcaaatggaatctttggattcaataatgaatcgaaccctaaaagacnaatctctttcggggaccannnctnnatcnnnatnnnannnnngncnntccngnngnaannatnagnnnnncnnncccccnttnncctgancntnnnntncnngnaatnnnannncncnancgnnancnttncngntttttnnnntttngtnnngncnnnannancngnttnnnnntnnaantnccntttttnnggnnaanccnaatntncntngncntngatttnnannaanttncccntnncnncngnnnaancnnaancngnnnnggtncnnnaaccnnanncngnnnttncnnnnncngaaccgnancntttnancnnnncnncntnannnaannaatnnnnnnnnnntccannnccnnnnttttnangnnnnggnccnnncccnacgatnnnnanntnnatgnnntncttnntnnngnnncgntcnntntnnnnatcncatnantnnnttnntnnacnnnanngntnnnatnananancnantcanntantnntcnnatnnnnncannnntnnnannatntcnctnaantannnntncnnttcnannatntnttntatnanntnatgnnttgtntnatnnnaagnntngtttannantgcnnnnncnnncncnanngnnggnnnnannnttggngnannnnctngannnnnnnnttnnannncantcaacntnncnnnnanagnntncanttctnannnaannnnnnntatannnntcan

SEQ ID NO: 409 - DNA, 4000 bp, Escherichia coli
  misc_feature (4)..(6): n is a, c, g, or t
  misc_feature (9)..(12): n is a, c, g, or t
  misc_feature (14)..(14): n is a, c, g, or t
  misc_feature (17)..(18): n is a, c, g, or t
  misc_feature (21)..(24): n is a, c, g, or t
  misc_feature (26)..(27): n is a, c, g, or t
  misc_feature (30)..(30): n is a, c, g, or t
  misc_feature (33)..(33): n is a, c, g, or t
  misc_feature (35)..(35): n is a, c, g, or t
  misc_feature (38)..(47): n is a, c, g, or t
  misc_feature (49)..(52): n is a, c, g, or t
  misc_feature (54)..(54): n is a, c, g, or t
  misc_feature (56)..(56): n is a, c, g, or t
  misc_feature (58)..(77): n is a, c, g, or t
  misc_feature (79)..(79): n is a, c, g, or t
  misc_feature (81)..(82): n is a, c, g, or t
  misc_feature (86)..(86): n is a, c, g, or t
  misc_feature (91)..(92): n is a, c, g, or t
  misc_feature (94)..(99): n is a, c, g, or t
  misc_feature (101)..(106): n is a, c, g, or t
  misc_feature (108)..(108): n is a, c, g, or t
  misc_feature (110)..(112): n is a, c, g, or t
  misc_feature (114)..(120): n is a, c, g, or t
  misc_feature (122)..(122): n is a, c, g, or t
  misc_feature (124)..(126): n is a, c, g, or t
  misc_feature (128)..(130): n is a, c, g, or t
  misc_feature (134)..(142): n is a, c, g, or t
  misc_feature (145)..(146): n is a, c, g, or t
  misc_feature (152)..(152): n is a, c, g, or t
  misc_feature (155)..(155): n is a, c, g, or t
  misc_feature (159)..(162): n is a, c, g, or t
  misc_feature (168)..(168): n is a, c, g, or t
  misc_feature (170)..(170): n is a, c, g, or t
  misc_feature (177)..(178): n is a, c, g, or t
  misc_feature (180)..(180): n is a, c, g, or t
  misc_feature (186)..(186): n is a, c, g, or t
  misc_feature (188)..(188): n is a, c, g, or t
  misc_feature (190)..(190): n is a, c, g, or t
  misc_feature (192)..(193): n is a, c, g, or t
  misc_feature (195)..(198): n is a, c, g, or t
  misc_feature (200)..(200): n is a, c, g, or t
  misc_feature (203)..(205): n is a, c, g, or t
  misc_feature (208)..(209): n is a, c, g, or t
  misc_feature (211)..(216): n is a, c, g, or t
  misc_feature (219)..(219): n is a, c, g, or t
  misc_feature (225)..(225): n is a, c, g, or t
  misc_feature (230)..(231): n is a, c, g, or t
  misc_feature (233)..(235): n is a, c, g, or t
  misc_feature (237)..(237): n is a, c, g, or t
  misc_feature (240)..(240): n is a, c, g, or t
  misc_feature (242)..(242): n is a, c, g, or t
  misc_feature (244)..(244): n is a, c, g, or t
  misc_feature (246)..(248): n is a, c, g, or t
  misc_feature (250)..(253): n is a, c, g, or t
  misc_feature (256)..(260): n is a, c, g, or t
  misc_feature (262)..(262): n is a, c, g, or t
  misc_feature (266)..(266): n is a, c, g, or t
  misc_feature (269)..(269): n is a, c, g, or t
  misc_feature (272)..(275): n is a, c, g, or t
  misc_feature (278)..(278): n is a, c, g, or t
  misc_feature (280)..(280): n is a, c, g, or t
  misc_feature (284)..(284): n is a, c, g, or t
  misc_feature (286)..(286): n is a, c, g, or t
  misc_feature (288)..(292): n is a, c, g, or t
  misc_feature (294)..(295): n is a, c, g, or t
  misc_feature (297)..(297): n is a, c, g, or t
  misc_feature (299)..(299): n is a, c, g, or t
  misc_feature (301)..(302): n is a, c, g, or t
  misc_feature (306)..(306): n is a, c, g, or t
  misc_feature (309)..(311): n is a, c, g, or t
  misc_feature (313)..(314): n is a, c, g, or t
  misc_feature (317)..(325): n is a, c, g, or t
  misc_feature (327)..(334): n is a, c, g, or t
  misc_feature (336)..(339): n is a, c, g, or t
  misc_feature (342)..(342): n is a, c, g, or t
  misc_feature (354)..(355): n is a, c, g, or t
  misc_feature (357)..(357): n is a, c, g, or t
  misc_feature (360)..(360): n is a, c, g, or t
  misc_feature (362)..(363): n is a, c, g, or t
  misc_feature (365)..(365): n is a, c, g, or t
  misc_feature (367)..(371): n is a, c, g, or t
  misc_feature (373)..(375): n is a, c, g, or t
  misc_feature (381)..(381): n is a, c, g, or t
  misc_feature (385)..(387): n is a, c, g, or t
  misc_feature (389)..(390): n is a, c, g, or t
  misc_feature (392)..(393): n is a, c, g, or t
  misc_feature (395)..(403): n is a, c, g, or t
  misc_feature (406)..(407): n is a, c, g, or t
  misc_feature (409)..(409): n is a, c, g, or t
  misc_feature (411)..(411): n is a, c, g, or t
  misc_feature (413)..(415): n is a, c, g, or t
  misc_feature (417)..(417): n is a, c, g, or t
  misc_feature (419)..(419): n is a, c, g, or t
  misc_feature (422)..(423): n is a, c, g, or t
  misc_feature (425)..(425): n is a, c, g, or t
  misc_feature (427)..(432): n is a, c, g, or t
  misc_feature (434)..(435): n is a, c, g, or t
  misc_feature (438)..(438): n is a, c, g, or t
  misc_feature (441)..(441): n is a, c, g, or t
  misc_feature (444)..(444): n is a, c, g, or t
  misc_feature (446)..(450): n is a, c, g, or t
  misc_feature (452)..(454): n is a, c, g, or t
  misc_feature (458)..(458): n is a, c, g, or t
  misc_feature (460)..(462): n is a, c, g, or t
  misc_feature (464)..(464): n is a, c, g, or t
  misc_feature (466)..(467): n is a, c, g, or t
  misc_feature (469)..(470): n is a, c, g, or t
  misc_feature (477)..(478): n is a, c, g, or t
  misc_feature (484)..(484): n is a, c, g, or t
  misc_feature (491)..(492): n is a, c, g, or t
  misc_feature (496)..(496): n is a, c, g, or t
  misc_feature (500)..(504): n is a, c, g, or t
  misc_feature (506)..(506): n is a, c, g, or t
  misc_feature (509)..(509): n is a, c, g, or t
  misc_feature (512)..(514): n is a, c, g, or t
  misc_feature (516)..(517): n is a, c, g, or t
  misc_feature (521)..(522): n is a, c, g, or t
  misc_feature (524)..(524): n is a, c, g, or t
  misc_feature (534)..(534): n is a, c, g, or t
  misc_feature (536)..(536): n is a, c, g, or t
  misc_feature (541)..(541): n is a, c, g, or t
  misc_feature (543)..(545): n is a, c, g, or t
  misc_feature (549)..(552): n is a, c, g, or t
  misc_feature (555)..(555): n is a, c, g, or t
  misc_feature (558)..(558): n is a, c, g, or t
  misc_feature (560)..(560): n is a, c, g, or t
  misc_feature (571)..(571): n is a, c, g, or t
  misc_feature (574)..(574): n is a, c, g, or t
  misc_feature (579)..(580): n is a, c, g, or t
  misc_feature (590)..(590): n is a, c, g, or t
  misc_feature (600)..(600): n is a, c, g, or t
  misc_feature (636)..(636): n is a, c, g, or t
  misc_feature (714)..(714): n is a, c, g, or t
  misc_feature (780)..(780): n is a, c, g, or t
  misc_feature (795)..(795): n is a, c, g, or t
  misc_feature (840)..(840): n is a, c, g, or t
  misc_feature (870)..(870): n is a, c, g, or t
  misc_feature (978)..(978): n is a, c, g, or t
  misc_feature (993)..(994): n is a, c, g, or t
  misc_feature (1023)..(1023): n is a, c, g, or t
  misc_feature (1080)..(1080): n is a, c, g, or t
  misc_feature (1089)..(1089): n is a, c, g, or t
  misc_feature (1179)..(1179): n is a, c, g, or t
  misc_feature (1200)..(1200): n is a, c, g, or t
  misc_feature (1206)..(1206): n is a, c, g, or t
  misc_feature (1208)..(1208): n is a, c, g, or t
  misc_feature (1220)..(1220): n is a, c, g, or t
  misc_feature (1224)..(1224): n is a, c, g, or t
  misc_feature (1233)..(1233): n is a, c, g, or t
  misc_feature (1245)..(1245): n is a, c, g, or t
  misc_feature (1248)..(1248): n is a, c, g, or t
  misc_feature (1254)..(1254): n is a, c, g, or t
  misc_feature (1260)..(1261): n is a, c, g, or t
  misc_feature (1278)..(1278): n is a, c, g, or t
  misc_feature (1284)..(1284): n is a, c, g, or t
  misc_feature (1311)..(1311): n is a, c, g, or t
  misc_feature (1313)..(1313): n is a, c, g, or t
  misc_feature (1326)..(1326): n is a, c, g, or t
  misc_feature (1332)..(1332): n is a, c, g, or t
  misc_feature (1335)..(1335): n is a, c, g, or t
  misc_feature (1338)..(1338): n is a, c, g, or t
  misc_feature (1341)..(1341): n is a, c, g, or t
  misc_feature (1347)..(1347): n is a, c, g, or t
  misc_feature (1353)..(1353): n is a, c, g, or t
  misc_feature (1356)..(1356): n is a, c, g, or t
  misc_feature (1358)..(1359): n is a, c, g, or t
  misc_feature (1362)..(1362): n is a, c, g, or t
  misc_feature (1371)..(1371): n is a, c, g, or t
  misc_feature (1374)..(1374): n is a, c, g, or t
  misc_feature (1377)..(1377): n is a, c, g, or t
  misc_feature (1380)..(1380): n is a, c, g, or t
  misc_feature (1386)..(1386): n is a, c, g, or t
  misc_feature (1389)..(1389): n is a, c, g, or t
  misc_feature (1391)..(1392): n is a, c, g, or t
  misc_feature (1395)..(1395): n is a, c, g, or t
  misc_feature (1398)..(1399): n is a, c, g, or t
  misc_feature (1404)..(1404): n is a, c, g, or t
  misc_feature (1416)..(1416): n is a, c, g, or t
  misc_feature (1428)..(1428): n is a, c, g, or t
  misc_feature (1431)..(1431): n is a, c, g, or t
  misc_feature (1440)..(1440): n is a, c, g, or t
  misc_feature (1443)..(1443): n is a, c, g, or t
  misc_feature (1446)..(1446): n is a, c, g, or t
  misc_feature (1449)..(1449): n is a, c, g, or t
  misc_feature (1461)..(1461): n is a, c, g, or t
  misc_feature (1467)..(1467): n is a, c, g, or t
  misc_feature (1473)..(1473): n is a, c, g, or t
  misc_feature (1476)..(1476): n is a, c, g, or t
  misc_feature (1479)..(1479): n is a, c, g, or t
  misc_feature (1485)..(1485): n is a, c, g, or t
  misc_feature (1497)..(1497): n is a, c, g, or t
  misc_feature (1506)..(1506): n is a, c, g, or t
  misc_feature (1509)..(1509): n is a, c, g, or t
  misc_feature (1514)..(1514): n is a, c, g, or t
  misc_feature (1519)..(1519): n is a, c, g, or t
  misc_feature (1521)..(1521): n is a, c, g, or t
  misc_feature (1524)..(1525): n is a, c, g, or t
  misc_feature (1527)..(1527): n is a, c, g, or t
  misc_feature (1529)..(1529): n is a, c, g, or t
  misc_feature (1549)..(1549): n is a, c, g, or t
  misc_feature (1553)..(1553): n is a, c, g, or t
  misc_feature (1563)..(1563): n is a, c, g, or t
  misc_feature (1575)..(1575): n is a, c, g, or t
  misc_feature (1578)..(1578): n is a, c, g, or t
  misc_feature (1586)..(1586): n is a, c, g, or t
  misc_feature (1632)..(1632): n is a, c, g, or t
  misc_feature (1635)..(1635): n is a, c, g, or t
  misc_feature (1664)..(1665): n is a, c, g, or t
  misc_feature (1668)..(1668): n is a, c, g, or t
  misc_feature (1680)..(1680): n is a, c, g, or t
  misc_feature (1697)..(1697): n is a, c, g, or t
  misc_feature (1707)..(1707): n is a, c, g, or t
  misc_feature (1710)..(1710): n is a, c, g, or t
  misc_feature (1722)..(1722): n is a, c, g, or t
  misc_feature (1734)..(1734): n is a, c, g, or t
  misc_feature (1752)..(1752): n is a, c, g, or t
  misc_feature (1758)..(1758): n is a, c, g, or t
  misc_feature (1764)..(1764): n is a, c, g, or t
  misc_feature (1791)..(1791): n is a, c, g, or t
  misc_feature (1795)..(1795): n is a, c, g, or t
  misc_feature (1797)..(1797): n is a, c, g, or t
  misc_feature (1827)..(1827): n is a, c, g, or t
  misc_feature (1878)..(1878): n is a, c, g, or t
  misc_feature (1881)..(1881): n is a, c, g, or t
  misc_feature (1936)..(1937): n is a, c, g, or t
  misc_feature (1941)..(1942): n is a, c, g, or t
  misc_feature (1964)..(1964): n is a, c, g, or t
  misc_feature (1971)..(1971): n is a, c, g, or t
  misc_feature (1983)..(1983): n is a, c, g, or t
  misc_feature (1985)..(1985): n is a, c, g, or t
  misc_feature (1989)..(1989): n is a, c, g, or t
  misc_feature (1991)..(1992): n is a, c, g, or t
  misc_feature (1995)..(1995): n is a, c, g, or t
  misc_feature (2008)..(2009): n is a, c, g, or t
  misc_feature (2016)..(2016): n is a, c, g, or t
  misc_feature (2029)..(2031): n is a, c, g, or t
  misc_feature (2042)..(2042): n is a, c, g, or t
  misc_feature (3753)..(3753): n is a, c, g, or t
aagnnnaannnntntanntcnnnnannttnatntnatnnnnnnnnnntnnnntntntnnnnnnnnnnnnnnnnnnnnangnncttnctgcnnannnnnnannnnnngntnnncnnnnnnntntnnntnnncagnnnnnnnnngcnnatattntcngttnnnnagcttnanttcttcnntngtattntntngnntnnnnanggnnnacnntnnnnnnttngcttcnataanncnnngnagnancntnnncnnnnatnnnnngncttnctngannnnatnantatnantnnnnncnnantntnncttntcnnnannatnnnnnnnnntnnnnnnnngnnnntantttttgataatnntnccncnncntnnnnntnnntgttgntggnnnannanntnnnnnnnnnttnncnantnnngnancannancnnnnnntnngcngtngtnannnnnannncctntnnntntnntnnttccganncgacancaacgannaagncatnnnnntnacnttnnntnntatnntnttcgttgttntntttgntnnnactnnnnatntcntnacaaagataantcnaatannggataatctntgaaactgantgatacttttatagttggttaaacttgttcatggcntttgccttaatatcatccgctatgtcaatgtaaggcttcatggctttatagtcactgtgccccgtccatttcattacnacctgtgccggaataccgagagccagcgcattacagatgaatgtccttcttcctgcatgggtactnagtaatgcgtatttnggtgtgacttcatctatacgttcatttcctttgtagtaggtttcncgtacaggctcgttgatttctgccagttcncccagttctttcagataatcattcatcttctgattgctgatgacgggcagtgccatgtggttctcaaaatggatgtccttgtatttttcaagtatggctttgctgtanttgttcagttcaatnntcagactgtctgccgttttgactgtggtnacttcgatatggtcggacttcacatcgcttcttttcaggttacgaacatctgaatancgcagactngtaaagcaacagaacaggaaaacatcccggacacgttccagatattgtttgtctttgggtatctgatagtctttcagcctgttcaattcntcccaagtcaggaagattacntttttngnggtggttttcantttnggtttgaangtatcgtatgcnatnttctgntgatgnnctttcttgaagctccancgcagnaaccatttgaggaatcccatttgtttncngatggtgctgttnctcatntcnttnttntcacgnaggaanttnanntantcgttcaanccnaantcntcgaantantnnaangtnncatcntccttgaactcnttgaggtggttnttnactgctgcnaanttntcntaggtggatgcngtccanttattntgnttnccgcantcttttacaaantcatcgaanacntcccnaaaantnatnngngnttcttcctgctgttcttcgntggnatctttcatncgcaggttgaangcntcctttanttgttgggtagttggcatggcttcctgtacctcaaattccttgaanacnttttgaatttcggcatagtatttcagcanntcngcattgatttcngatgcactttgctttantttgttggtncanccgttctttacncgctgcttgtcngcatcccatttggctacntcaatncggtancccgttgtaaactcgatgcgttggctngcananatgacacgcatacggatgggtacgttctcnacgattggcacaccgttctttttccggctctccaatgcaaaaatgatgttncgnttgatattcataattgggtgcgtttgaaattctacacccaaatatacacccaatnnttgnnatagcaaaagacatttagaaanatttagntttactctatantntaantnntanttgattatcagtnntttgcanttttatgatattnnntgaaagtatangttcgagagcctgtctctccgcgaaagtagaaaagttaaagttgtagattcttgaatttgaacgattcaagaatttttctttttctagtattttccttcatcttttcaaggagcttatgttaaattggaatccggtaatttgatttatgaagacaatttcgatatatgattcgttgcttgttttagggcgtggaataggacaagtcatgtttcagaataatgcgttgtccggtttgttaatgttggtcggaatttttctgaactcgtggcagttgggagtattagcggtaggcggtaatataataagcacgttggcggcttgtatctcaggttatggacgtgacgatataaagaatggactgtatggttttaacggcacattgataggtatagcagtcggagttttcatgcagctgtctttgtggtctttgctgctcatggcggtagcttcatgtttttctacttggatagtacggcttttcagccggcagcattcacttcccggatttactgctcctttcattttttctgtgtggatattattgggaatctgtacttggataacgccggatttattgctggtttccgaaacggtatctgatactgtgcgggaggttgattacgttcaggctttttgtttaggtattggtcaggtcatgtttcaagaaaatttattgaccggactgttctttttggctggtattggggttaattcatggactggaactttttatactgcgctggggacacttcttcctgttctttttgctgtattttgggggatagatccggaaatgttgaatatgggattgatgggctataatggtgtattgtgtgctttggctttaggaggcaaaacttggaaaagctttgtatgggctttatgttcagtcttgctgtccgttgtattgcagtttgcagggatcaagttgggaattactactctgactgcaccttttgtactatctgtatggatgataatgataatgcagaaagtggtgaatacaaaaggtgaataatagacagtatccgtagttcaggcagattgattttataatggatgtaaaacaatctaattgggatattattatggatctaaattgattgacgcaaaggctggaaaagtatagcttacgctcaatgaatcatttatgaagggttcctttcaagatccttcatgacaacacattgaaaaacaatatattgtgtaattatgaaggatttgaaggatttcccggtatctttttatatttataggttttatgataactccaatcccagtgcttcttttaatttcagcagattcgggtttttcttgctcatcatctggaaacgttccacatggctgtaagcacggatgttctcggtaggggcactgacacgtaccgtcatggtgattttccggttgtgcagtcgttcgcgtaaatgattctgaaccgatggtatcaattgtaccatatatttttccaccatatcattgtctactgtcacttcaaaagtcgtgtcattcaacaaatgcggatgcatgttcatcattcgtgcggagttagccttctcttccttgggcagggcggctgcaaattcacgccagtaatagtccagatctttttcattgaaaatataatcttcgtatgtggcatcgttttggacagcggtgcttgccgcttttgcttcttgcttttccgcagcttgctgttcgtgcaaaggacgncgcagggatataccgagtgagcccgccttgaacaccgggatttttttctcttctctggtctgaggcagcgggcttggacggcttgcgttcatactgccggctgtacttgtaccctgtggttgaggaacggcggttgctgcggtctgtgcagcggcagctttagcctgaggctgtggctgcgtggcggctgtggaagccgcttgctgcgtaaataggggttttaatatcttcttagggccacgcccac

SEQ ID NO: 410 - DNA, 4000 bp, Escherichia coli
  misc_feature (468)..(469): n is a, c, g, or t
  misc_feature (472)..(475): n is a, c, g, or t
  misc_feature (478)..(484): n is a, c, g, or t
  misc_feature (486)..(486): n is a, c, g, or t
  misc_feature (488)..(489): n is a, c, g, or t
  misc_feature (491)..(493): n is a, c, g, or t
  misc_feature (495)..(495): n is a, c, g, or t
  misc_feature (499)..(499): n is a, c, g, or t
  misc_feature (501)..(503): n is a, c, g, or t
  misc_feature (584)..(584): n is a, c, g, or t
  misc_feature (709)..(709): n is a, c, g, or t
gccgacgccgccttcgtcggcgaccgactgctgcacctccacgacctgctcgtccgttgggtgcagctgcctgcggtgctgcgcgacggcggtccggcacgtttcgagcgcacaccggagtcgctgcgggcgttcatcggctccatgcgcgtgggcgctcgcgagcgggcccggccgctggccgaccggctcgcggcgctgttcccggcgacgaagaccgtgctcgacgtcggaggcgggccgggcacgcaggcgcttgcctttcgggaacacggctggcaggtgaccgtgctcgacttccccgaagtgatcgacctcatggcaggcgacctcgcgagggccggcatcgccgccatcaagggtgacgcgacgcagggcatccccgcccagggcttcgacctggtctactgcggcaacctcttccactcgatgtcgcctgcggaatgcgcgctggtcgtggagagcgcnnccnnnnccnnnnnnncngnngnnncnttgncnnncacgacttcttgcgcggcacgggcctgccctcgtcgctcttcgccgtgaacatgctcgcggcgacgagcgccggtgacgtntacggtgaggaggactaccgtcgctggtgcgagggcgccgggctgcgggacttcgccgtgcacgaggtggccgggcaatcgcagcggctgctgacggccgacaagcgctagcacacagaccctgnacaggcgactgaccttaggctggccgttgttccgcggtgaacaccagctccgcgatcagcgccgccgccgcctcctgcatcgccgggatggcgtgcgagtaggtgtcgagggtgatcgcgatggtcgcgtgcccgaggcgctctgagacgaccttggggtgcacgccggcctgcagtgccaaggtggcgtgcgtgtgcctgaggtcgtgcaagcggatctgcggcagcatcgactgcttcaccgcctgccggaagtagcgcgagacgctctcggggtcgagcgcggcgccgttctcctgcgtgaagacgaggccggtctcgacccacgcctcgtcccagtcccgctgctcctcgagctggcgtgccgcctgacccttcaagacctcagcggtgcccgggtcgagggcgatgacgcgccgccccttgacggtcttcggctcgctgacgatgacctcgcggccacaggggatgagagcgcgacgcactgagaggcgcccggcctcgaggtcgacgtcactccagcgcaggccgatggcctcgcctctgcgcatgccggtcatggcgatcgtgtgccaagggggggagaggcggtcgtccctcacggcgttgaggaacgccttgagttgctccttggtccaggtccgcatctccttggtgccgtcgcccttcttgcgcggcgggtcggccgcgtcgagggggttacgcgagagctggccccagcgcaccgcgtccttgcaagccttgtgcaagcaggcgcggacatgatggatcgtcatcggggagaggcccttcttgccgtctttgcggccgctctcggcgagcttcgcgtacagggcgttcacctgagagcccgtgagcttctggagcttcacggcgccgatgtgcggcacgatgtgacactcgacgtgctgcacgtaggagttgtaggtcgagggcctgatcgtcgctttgactgccggcagccactccttggtcaagtactgcttcaccgtcgccttcgtcggtgccatgtaggcgtgctggtcgacggcgaccagcagcttgttcatcgccgcttggcactccttgcgcatggcgaagccgcccttggtgtcgcggcggcgctcctcggtctctgtgagcttgccgccgcacttcgggcagctctccttggggcgccgctcgatccaatgcctcttgttgcagctctggcagcgttgcgccgcggccatgccgatgtcgacgatgtactcccagcttccgggctcgccgcgctttcttacgtggcctcgcatgctctcccccagacgcgcgtctactgtgaaatagcagcttcgctctggggcatggcgcgagcaacgagagagagcgcaccagaggcacggattacttgccgacgagcaacctgttcggtgcgctccatgacggcagcgcgtcggcgcgcgacgccgagtgcagccgcttctcgctcgccacaggactggcggtgatgttgctgagggctgaactgggagcctaaccttagtcgtggtcctggtcggcacggcgtccttcggtcgccgcccggaacgcatactccgtcacctgctcttcttgaagcgccgccagatgcggtcgaggttcgacggccacttcttggagtgcgacgccgccgccggtcggaccctacccgcgcgcctgcatcggacatgggccgtatcgttgcggcgaggcacggagcggtcatactggcggcatggagtccctcctcgtgcagatcctgcccatcgccgtcgccatcgctgtcgagcctctgtgcatcatcgccgcgctcatcatgccggcgacgaaccgacccgcggccaacagcttcgcctatttggccgcgctcatcggcgtcatgctggcctatggcgcggcggtgctcctggtcttccagcaccacgccattgccggcggcgcgcgcaccgacgacgtcgtgcagatgctctggctgctcatcggactcggcttcctgagcgcgttcacggtgatcctcatcagacgaccgccggccggccgtgcccgccacgagtcccggtgggcgggctgggtcgagaagatgggtcccgccggcgcaggtgctgtcggtctcttcctcgtcaactgggagatggagacccctgcgctgaccgagatcctcaaagcgcgagtgtcgctggccaccgcactcgcttcgctcctcgtcttcactgccgtcgccgtcagcacctcggtggcgccgctcgccgcctacttggcggctcctgcccgcgtgggcggcatgctctctgcgggcaagggctggctcagccgccacgagcgcgtgctcctgctcgtgctcttctgtctggtcggcgccgtgtacacctacaagggtgcggctgccctcctgcatcagtgagccccgagaccggatggctcggagcgtgcgtggtcgccgcaatggacgggaaagctgacgcgatgggctgggcgtggagcacgcagaaggggatgtgatggaggagatcggcgacgtggcggcgtcatcgccagaggtgtcgccgcggcgcctctcgagcgcctcccgcgtgccgggcctgatcgccgcggcggcgaccgtgttcgcctgtctcagcctcgcggcggcgaccaccggcccttggcacggcgtggtcgccggactgcaggcggcgctcatccccggaggggcgcctcagggggtcgtccgcggcctggtcgtgagcgtgtccatcgggctgctcctcctgacgcgaggtctggcgcgcaggcagcaccgcgcctggctggcggccgtcgtgctcagcgccgccgccaccgggctgttcctgctgcgggacatcgacgtgccggcggccttcatcgcggtcctgctgctgttctgcctctggcactggcgctcggagttctacgccgcggcctcggctcgccggccggcccgggcagccgcagcggccgcagttgccctggccatcgtcttcggctacggcgtggccgccctgatctggcatgccgcggccacgcatctctcctggtcgtggacgggggtcatgagtcaagccggctggggcatgatcggccaggacgccgtggtgcccggcagcgagttctcgcgggaccttgttgcttcgctgaccgtgggcagtgtgctcatcctggcagctgtcgcctgggcaattctgcgaccgccgaggagtggtgccacgagcagcgaccgtgagtggcgcgaggcgcagcgcctggtggcggctgcgggcagcgactccctcgcctatttcgcgctgcgccgcgacaagcgctacttcttcgacg

SEQ ID NO: 411 - DNA, 4000 bp, Escherichia coli
  misc_feature (392)..(393): n is a, c, g, or t
  misc_feature (2518)..(2518): n is a, c, g, or t
  misc_feature (3922)..(3922): n is a, c, g, or t
ggagcttgccccggcctttgagaaacctcaaccgttcaccgagctcttccaggatgcccgcgatggcgcgctccgtctggtcggcgggcgtgacgtagtggctggcgggatagatgcgcgcgccggtgacggtgcccgtggtgacgccgcggagcgggtcgagcgtcgacagcttctcgatggtgtcgccccacagctccacgcgcagcgcctccgcctcggcggcggcgggaaagatctcgaccacgtcgccccgcacccgaaaggtgccccgccggaaatcgacgtcgttgcgctcgtactggatggccacgaggctccggatgagcgcgtcgcgctcgagggtctggcccgtctcgagccccacgtgcatgccctggtaggtctccggnncgccgatgccgtagatgcacgacacggaggcgaccacgatgacgtcgcggcgctcgaagagggacgtggtggcggagtgccgcatccggtcgatctcgtcgttgacgagggcgtccttctcgatgtaggtgtccgactgcggaatgtaggcctcgggctggtagtagtcgtagtacgacacgaagtactcgacggcattgtcgggaaagaacgacttgaactcgccgtagagctgggcggccagcgtcttgttgggcgagatgacgagagcgggccggtcgagctgccggatcacgttggcgagcgtgaaggtcttgccgcttcccgtgatcccgaggagcacggcatgggggtgcccctcggccaccagcgaggcgaggcgctcgatggccccgggctgatcgcccgcgggcgagtactccgaggacagccggaaagacacgctcagggggcggtgggaaccgccaccaggtacttccgccacgagtccaggaagctggtggcgtgggggtgccgcatcaggtggaccgagaagaggaattgcgggtggaccggctcacggatgagccgcatgcgcgactcctcgagggtgcggttgcccttgaagaggttgcatcggagacaggccgccaccacgttggtccacgtcgtctggccgccccgcgagcgcggcatgacgtgatccaccgtgagcttctctccgcgccgggagcagtactggcaggtgtagccgtcgcgacgaaggatattcttcttgttgaaggccacccgctccaggaagggcttccggatataggcggcgagacggatcacggaggggagcgggaaggcccgcgagggcgagcggatcacgcggggcgagctctccacgctctcggccttgcccgcgagcagcagggtgacggcgcgcttggcgttggtgaagtggagcggttcgtacgtgtagttgagcaccaggaccgcgatatcgttcatatcccttcgtcaaggatagtcagcggtcccagcactgtcaacacctgcccctcagaccagggcccgccacacgaccggcgcaaagccggtgagcacgaggaagaccgatcccacccagcgccagtcgcccgtggtgagcgagacggcgatgaggacgatcatgagacagaggaggaggaagcacagagcgtagaatcggatctcgcgccgatccgtccatccgcctttgcccacgagggccggcatcatccccgcgagatagaccggggagtagacgagaaagaacacgacgagggcagcggagaagagcacgatgccggccaggcctccgactacgccccaggcaatccacgccacgggtgacgccgcgggctctgaaaggagacgcggcaccatgtcgggacggaacatgatgaggaggagcgcgcccgcgcatacgggcaggacccattcaagccaggcgagcttgggagggcgcgggccaatctggatcgctgatcggcgctgctgcttggcgctgtactggccggatctgttcgccatggcccctccctctcagcgagcctgggtctcgacgaccaagagcaagctccgctgctcggcaaagcgcccggacgcaagtcttcgcttcatgacctgctcagtatctcacaaggatgccctccgacggtccgcccgcggctgcacccgcccaccccgcagctaggcggacgggcggagacgcagggcgtcggcgagcacggccagcacccgctcgagcctgaagggcttgacgagcatgaggtccacgccggcctcccgcagcttctccggatccagcaaatgcccccaccccgtgatgaggatgaccggtgtgtcgggacgcaggcgcttcaccgagctggcgacgtcgagccccgaacactccggcagcgagaggtcggtcagcacgacgtcgaaggccccgccctggaagcgcgccagccccgtgagcccgtcggtcgcggattcgacgcgatggcccgcagaggccagggcctcgaccagcatcgtgcggatccggtcctcgtcctcgagcaccaggatggaggcgatatccgagagcgcggccgccttcgcttgctcggccgcgggcgggggcacctccacggcacgggcggaggcgacgggnaaccacagcgtcaccgtggtgcccccgcccggctcgctccgcacgtgcacgctgccgcggtggcggctcaccactccctggaccaccgagaggccgagtccagtgcggtgcggggcccgcgtggtgaagaagggatcgaacatgcgccgccgtatgtcctcgcggatcccctctccagtgtccgagacctggagctcgacccccgtgtccacgcggcgcgcggtcaagcccaggcgacctccctgcggcatggcgtcgatggcattgaggatcaggttcatgacgccctcgcgcagcgccgtcgcctgcccgtccaccgagaggtggagatccagatcggtgaccacgtcgatctgcaccccgcgcgcttccgcctcgtccttccacaccgctcgggtcaatgtcatcgcgtcctgcacgacggcgatcaggtccacgggccccgtcgcatcgtccgcgctcgtcgccgcgaagccctggagacggcgcacgatgtcggcagcccgccaccccgcctcctcgatgtcggccaggtcttcgcgcaagggcccgtcgggcacgcgcgagagcatgagctgcgtcttgccgagcacgatggccaggacattgttgaactcgttggcgatgccgcccgccatggcgcccgccgcgcgcgcgctcgacgtctgcacgagctgctcctgggctctctcgaggccctggagggcgccctgcacctcaccgtagagtcgattgttctccatgccgagcgcgagcatggaggcgaggacctggacggcctcgatctggtcggcggagaaatcgcgcgcctcggggtcgcccacgtagagcgcgcccaccgtctgccgccggaggcgcaccggcacggcgaggcaggcgcgcagaccgacctggagcaggaagtcgtcctccgatcccgcgcggccctggatgtcccggcaggccgccgggcgctgcgtcgcgaacatttcccccgtcagtccgcgcgcgctatccacgcggatggtgtcgagggcatctgcggagagccccatgcccgccgcgagagcgaggccgcccgtcccacccggcacgccgatggccgcgacccgcgcctcggccagccggcaggcgacctcgcacgcgcgcgcgagaacggcctccatgtcctggcccacgagcacatggccgaggaagacctcgagctcgcggagccggccgatgtggcctcgcgtggtctcaatggcatcgcgctggcccagggcgttgccgaccctgtcggcgatcacgaggagcagcaagacctcggcctcggaaaagggcggccgcggcgcgcggcggcccgcgtagagaattcccaacgcgctgcctcccgagcggacagggacggcgacggcatcggagacgggaaacagggcgaggaanggatcctccacgatgcgaggggcgccgccggagacgcgcgtgagcctctcgtcctggaaggcctggcccacgagtcct

SEQ ID NO: 412 - DNA, 4000 bp, Escherichia coli
  misc_feature (54)..(54): n is a, c, g, or t
  misc_feature (888)..(888): n is a, c, g, or t
  misc_feature (1065)..(1065): n is a, c, g, or t
  misc_feature (1445)..(1445): n is a, c, g, or t
  misc_feature (1472)..(1472): n is a, c, g, or t
  misc_feature (1847)..(1847): n is a, c, g, or t
  misc_feature (1882)..(1882): n is a, c, g, or t
  misc_feature (1949)..(1950): n is a, c, g, or t
  misc_feature (1958)..(1959): n is a, c, g, or t
  misc_feature (1961)..(1962): n is a, c, g, or t
  misc_feature (1967)..(1967): n is a, c, g, or t
  misc_feature (1974)..(1974): n is a, c, g, or t
  misc_feature (1980)..(1980): n is a, c, g, or t
  misc_feature (1982)..(1982): n is a, c, g, or t
  misc_feature (1988)..(1989): n is a, c, g, or t
  misc_feature (1994)..(1995): n is a, c, g, or t
  misc_feature (2062)..(2062): n is a, c, g, or t
  misc_feature (2221)..(2221): n is a, c, g, or t
  misc_feature (2284)..(2284): n is a, c, g, or t
  misc_feature (2344)..(2344): n is a, c, g, or t
  misc_feature (2350)..(2350): n is a, c, g, or t
  misc_feature (2353)..(2353): n is a, c, g, or t
  misc_feature (2380)..(2380): n is a, c, g, or t
  misc_feature (2397)..(2397): n is a, c, g, or t
  misc_feature (2473)..(2473): n is a, c, g, or t
  misc_feature (2536)..(2536): n is a, c, g, or t
  misc_feature (2954)..(2954): n is a, c, g, or t
  misc_feature (3041)..(3041): n is a, c, g, or t
  misc_feature (3053)..(3053): n is a, c, g, or t
  misc_feature (3059)..(3059): n is a, c, g, or t
  misc_feature (3065)..(3065): n is a, c, g, or t
  misc_feature (3080)..(3083): n is a, c, g, or t
  misc_feature (3085)..(3085): n is a, c, g, or t
  misc_feature (3092)..(3092): n is a, c, g, or t
  misc_feature (3098)..(3098): n is a, c, g, or t
  misc_feature (3125)..(3125): n is a, c, g, or t
  misc_feature (3134)..(3134): n is a, c, g, or t
  misc_feature (3158)..(3158): n is a, c, g, or t
  misc_feature (3170)..(3170): n is a, c, g, or t
  misc_feature (3185)..(3185): n is a, c, g, or t
  misc_feature (3194)..(3194): n is a, c, g, or t
  misc_feature (3229)..(3230): n is a, c, g, or t
  misc_feature (3251)..(3251): n is a, c, g, or t
  misc_feature (3254)..(3254): n is a, c, g, or t
  misc_feature (3266)..(3266): n is a, c, g, or t
  misc_feature (3279)..(3279): n is a, c, g, or t
  misc_feature (3283)..(3284): n is a, c, g, or t
  misc_feature (3287)..(3287): n is a, c, g, or t
  misc_feature (3290)..(3290): n is a, c, g, or t
  misc_feature (3293)..(3293): n is a, c, g, or t
  misc_feature (3295)..(3296): n is a, c, g, or t
  misc_feature (3298)..(3298): n is a, c, g, or t
  misc_feature (3302)..(3302): n is a, c, g, or t
  misc_feature (3308)..(3308): n is a, c, g, or t
  misc_feature (3310)..(3310): n is a, c, g, or t
  misc_feature (3317)..(3318): n is a, c, g, or t
  misc_feature (3321)..(3322): n is a, c, g, or t
  misc_feature (3326)..(3326): n is a, c, g, or t
  misc_feature (3329)..(3329): n is a, c, g, or t
  misc_feature (3332)..(3335): n is a, c, g, or t
  misc_feature (3350)..(3350): n is a, c, g, or t
  misc_feature (3353)..(3353): n is a, c, g, or t
  misc_feature (3370)..(3370): n is a, c, g, or t
  misc_feature (3373)..(3373): n is a, c, g, or t
  misc_feature (3389)..(3389): n is a, c, g, or t
  misc_feature (3439)..(3439): n is a, c, g, or t
  misc_feature (3449)..(3449): n is a, c, g, or t
  misc_feature (3485)..(3485): n is a, c, g, or t
acaaacttttcaaaatgtccttcgatataaacatattcccaccattcaggaagnaacatcgctgcaattttacggcggatattgtacgttgcaaagtgtttcatcaggccataataagagttcatcgtactcacaaacttctcaacatacgcttctgcaaatccattttcagctattctattaaatttcctgacagcgttatatgtgttaccaaccaccctgttagatacataaattctaccaggcaaaatgaacgcccctacaaacaagactccttttttataatgctgaagatacagtttgcgtggatgcaaccgtaaaaggagttgttctttcaggaaaccatcaagaagatggactttggacaatatttcttccggtgatttcactacgatacaaaagtcatcaacaaagcgtacataatatatgaatcccagtatttccatcacgaaataatcatatacagacgccagaaagttggctatgagttgcgacggcaggttcccgatagccactcccctgtcagggtcattatgaaacagacttttattactgggaagtttgtcccacatggagacgggagagcgtctgatacacttattttgtggacaatgaaagatagtaacggctagaaggtaaagcagacattcaatatcatcgcctttataattgtcccttacgaatatgttcagcatttcccataccaacgatttcgagatagacatgaagaaactgaacaggtcatctttgaaaatgtacgcatcggcagtataattctcactgacctcgactatcatgttattcagatagtgcacggcagacagacatccctcacctttccggcagttcttcgagacgttcccttgttcccgaaaacgttcctctaanatcggctcgatacgaagagcgatccagtgatggacaacacgatcaatgaaagcggcggcaaaaacctcccgatataccgggtaagtccgtatgaatacttttgaaaagtccggtacatattcaccgtaaataatagaataccatagccgcaccaatgcagactgataatcattatanaactcaacacaatccgtactcgttcttttctgcctggcacaatcttcggatgcttcgaaaatactgctaagaagtatgtcatagattatattacctgttgcggcgaggggacgaacccggttcgcgttctggcggttgttcgtgttgacgttgccgttgttgaagttcacgttccaactgctggaagccgttgcatccgctatcttagtctttcccggctcatcaccggggggatgcccaataaataattctaattgctcactcataatccccttggcgattatgactccggctttgcgacttgttgcgatccgttagctttttgccgttggagatctgcaaccgtttttttgtaccagccggtactttgcttaccgatnctctctgcaagcagacagatttcggcngtttgagtcaggctggtcaaatgtcgttcttcacacactcttagcagtaatttcaatgcatcaaactcacacaaaaacttcatcagataatctgcacggtgctcaaggttcatatctgtatttgcataacggatatattcgcaacaatgaacggcaagcatcatcaactccgtaccaaattcataccggaacgccttggggaattgttgccgggcatcaatgataaggttcagaagcttatacatcgaatttgatataggaaggtcttgtgtaagtgccatgttaattttttaatattttaatgtatgtattagagggcgcaaagttaataactgtaaagcaattaacacaattttagctcaaaaaagtgaaacnaaaaagcccctaccggggcttttatttagctaacnctctaagggataaagaattaaagggataaagtgtttattgcggcgaggggacgaacccggtacgcgnnctggcggnngnncgtgntgacgtngccgtngntgaagnncacgnnccaactgctggaagcgtcatattcggtactagaccaataccagtcgtttgtaaatatattttgattnccaaacatagaagttatgagctcattgatttcggttttatacttggccataagcataagttcacccaatgcgggcaggttccacacggttgtatcttcaattccgtcagattcaagcgtacaggctttataggctctggcaacttcggcggcaggggcnccgacagttccctgggtgtccttgacgcctgcaagggtttctattataacatcggtattttcnttgccgtcgaaggtatcatagagtccttggttaccactgccgtagtttttcaggccgcgnaggtcngtnccgtagccaccccatttgaacgttttnttgccgcctgcgtcaangcagtcgcttttggcgataatgaactggtggcattcggcgcgaagtcggatgccgatacggatatacttggagcgnttattcgcgctcatggagttccattcggaagccgtgaaaaagacttgttcaccgtcttcaatncggagcgtagccaaagaaaggtcaagaagcgtacctgaccattgcatatatttggcgatgtcgcttgcgggggtgttttcattcacggttgtaaaacctattgattttaaggcttctatctggtcttgtttattcaagcgcagaagcatggcgttggcgatatttttatccattttattgtataatattaagttaatactattcggaagcaacagctctcacatgaagaagggctgaatttttgttttgattcgtaatacgcccggtattcagttcgaacgcccaggcggagttagtatcccaaattgttgatgaccagtagtatttatcagtcatcagcatactgtcactactccaaaaggtacgcatcatctcattgattttatcgcggtagcggtacatcagaagcatttggccngatgaaggaaggaaccagttggattcatcctcgataccgtcactttccaaagtgtaggcacggtatgcacgggcggcttcggcagcnggcgcaccgatnacaccnctattnttttggtctttcagnnnngngataatnaggtcngtatcttcctcacccgtgaagcagccntacatggcncccagtcctttttgattcaggccntctatggctttnccctgaccgccccantagaaggtngtagtcatgtcggcattatagcactcctgggcggnnattacgaaggagtgtccatgngcncggatacgaagnccgcgtttgatanacanntgnttnttngnnancgtnagggantnccattcnncannggtnaantannnnttggagttatccganatncggttacaggcaagatncanatcaagcaggccggcngcccacttgatacgttgtccaaattcagatgcgcgggaattctcggtganatccgagaancccacggcgttcagtgctgccacttgtgcctgtttnttcaagcgaagcagcgttgcgctttgttcattcgtcatagttacttgttgattaaatcattaatatccatattgtcttcagcgaagcgttcgagatattcttcgtaggtttcgccgttataatattcaaggacttcattgatgttgtccagcgttacgttatcgtagtacggttctccgccataagactcattattgaaccagttgatcaggtcgatgtaggcatctatgacggtaaggatgacaaggccgtcgataccggattcaagggattcgatttcatccgtttcacggataactgtcagttcatacgtgccgttgactaccggtttatcctgtctgttgccgtcctcatccattccggcaactccatattcgagaatggcaagaagctcggagccgtcagccttcagtgtcatgttcgagatacggagcatggaaagtttacgggatgccgtttgtgaagcgaggacgtcacggagcatctgaatggcgtcaagtttaggcgacgtttca

SEQ ID NO: 413 - DNA, 4000 bp, Escherichia coli
  misc_feature (1201)..(1201): n is a, c, g, or t
  misc_feature (1992)..(1992): n is a, c, g, or t
  misc_feature (2038)..(2038): n is a, c, g, or t
  misc_feature (2187)..(2187): n is a, c, g, or t
  misc_feature (2191)..(2191): n is a, c, g, or t
  misc_feature (2194)..(2194): n is a, c, g, or t
  misc_feature (3454)..(4000): n is a, c, g, or t
gggatggaactaactattgtttaaatttgagtcaaaagtcacaaaactaagtatttatataagtctgatttggttgtcatttcagacttatataattttttttccatctcaacctcttttagagagaccactgcacttaatattcgcattattattaatttttttttttaatttaaatttaaaaaaaataaaaataactgactcaattatatttattttattactttctttcctaatatattttttttttagttttgaaagattagtttccagaatggaaactgtagatgaaatatttaaaattgatgttatttttggattaattttaatttttcttcttttatattatgtttttaaaattgttggatattcattattttatgtaattctattctttttaatctatgcattttttggaaattattttccttcatggatggaatttagaggttttaaagttgatgagttgattgaaattcttacactttctactagaggtgtatttgggataaccacacaaacttcgttatattttgtgttttatttcataatttttggaggattttattcagctattggtggaagtagttttcttgtcaatttaggactttatctatcaagaaaaagttttggaggaagtgcaaaatcagcaatcatttcttcaagtttgatgggcagtatcactggaagtgctgttgcaaatgtttcttcaacgggagtttttacaattccgttaatgaaaaaaggtggttacaaatctgaacaagctgcttcaatagaggcaatagcatcaactggtggtcaattaatgcctcctgtaatgggaatagcagcatttgttatggctgaaataatgatggttgattattttgaaattgttaaatcagctttgatgcctgcactatttttttatatttccttatttttgcttattcacacaaattcaaaaaaaacaaaaattggatattttgaaacagaaataaaattaaatttcaaaagagatcttaagttattgtttcctttaatattgttagtatttcttttattgaataaatactccccacctttttgtgctttatttagtgttttaagctgtattttaataaatctatttgatgaaagaaaattaaatattaaagaatatcttgatatagcttcaaaaagttgccttcaggcagcaaaagttgcaatccctattgcngcaatagggattgtagttgctgtgtgtattcaatcaaatattgcattgaagttttcatcaacattaatttcagtctcagataaaaatatttggttaaatttacttataataatgataggttgtttgataatgggtatggggttacccactgttgctgcatatgtaattggtgcagttttttttgtacccgctttgaaagatttggggtttagtgagatttcatctaatttttttgtgatgtattactgtgttttgtcaatgcttacccctcctgttgcgttagcttcatacacagcagccggtatagcttctgcaaataattttaaaacaagcattgaagctttcaaaaaaagttttgttatttttttaataccaatttgttttttatttgatgaaaatattttattgataaactttgaattatttaattttctaataagcattatcggattatgtttagtaactttttcatgggtatattttttagaggggtacataaaaagaagaataagcatcattagtagacttacttttctattaatcatatttttattaatttattataaatttgatccaacaataattggggtatcttctgcaatatttataatcaattatttactaactaataagataaattcttaactattaattatactttaaaacttctctaaccaaagtaggatgttactacaatactctacaaaaattaaaaattttaatttctgctccaatagtgctccaatgacattggttcttgactaagattctttaatttgattcaatatcantagaaaggaaagagagcatttacaggagtaattgttctagaggtangctcaagggttcatggcgatagactcataagcccgaggtcagtggttcgatcccacttcccgctaccattaatgtcctggaaattctattaaattttctactttgtagtttttttttcttaaattatcgcatccaccaagatcaaatanattnatnacaaaaataaatgctgcaacttttgcattagacatttctattagttttgcagctgcatcagccgtaccacctgtagcaattaaatcatcaattattaaaacagagtcgttttctttaaaggagtctttgtggacttctatcgttgcggtcccatattcaagttcaaaatcaactgaatgaacatcagctggtaatttatttttttttctcaacataatgaaaggttttttaagcaaatatgatactgctgaggcaaatacaaaacctctactttcaattgccgcgattttatctattttaaaattttttgatctctcaataatttgatcaattgttgcagcaaaagcttcttcatctttaattaaggtagtaatatctctaaataatattccttttttaggataatcaggaatagatcttataaagtcttttaaattcataatagttatttataaatcataattaatttaaatttaacatatgacaataaataaattagcaattattggtggaagtggcttgtatgatgttgaggaatttaaaagtagagagctaattaaacttaatactccctggggaaatccatctgatgaaattttaaaaacagtatataatgataaagaagttttttttcttccaagacatggaagaggccatttcatttctccttccaatattaattttagagccaatattgatgcccttaaacaattaggtgttacagatatagtttctgtttcagcggtaggttcattaaaagaagatttgccaccaggcaagtttgtaattgttgatcagtttattgatagaacttttgcaagaagtaaaaccttttttgaagatgaaattgttgctcatgtttcaatggctcatccaacttcaaatggtttaatgaatgcttgtgaggatgctattaaaaaatcaaatatagaatatcaaagaaatggcacctatgtggtgatggagggaccacagttttcaacattagccgaatctaatttatacagatcctggaaagcagatgtgattggaatgactaatatgcctgaagctaagttagctagagaggcggagattagatatgcatccgtttctatggttacagattttgactgctggcatccagatcatgagaatgttgatgttcagcaagtaataaagattttattaagtaatgctgaaaaagcaaaaacaatgattaaaaatttaatcgataattttgaaaattatattgatccaaatgatccaacaaataattgnnnnnnnnnnnnnnnnnnnnnnnnnnnnnnnnnnnnnnnnnnnnnnnnnnnnnnnnnnnnnnnnnnnnnnnnnnnnnnnnnnnnnnnnnnnnnnnnnnnnnnnnnnnnnnnnnnnnnnnnnnnnnnnnnnnnnnnnnnnnnnnnnnnnnnnnnnnnnnnnnnnnnnnnnnnnnnnnnnnnnnnnnnnnnnnnnnnnnnnnnnnnnnnnnnnnnnnnnnnnnnnnnnnnnnnnnnnnnnnnnnnnnnnnnnnnnnnnnnnnnnnnnnnnnnnnnnnnnnnnnnnnnnnnnnnnnnnnnnnnnnnnnnnnnnnnnnnnnnnnnnnnnnnnnnnnnnnnnnnnnnnnnnnnnnnnnnnnnnnnnnnnnnnnnnnnnnnnnnnnnnnnnnnnnnnnnnnnnnnnnnnnnnnnnnnnnnnnnnnnnnnnnnnnnnnnnnnnnnnnnnnnnnnnnnnnnnnnnnnnnnnnnnnnnnnnnnnnnnnnnnnnnnnnnnnnnnnnnnnnnnnnnnnnnnnnnnnnnnnnnnnnnnnnnnnnnnnnnnnnnnnnnnn

SEQ ID NO: 414 - DNA, 4000 bp, Escherichia coli
  misc_feature (64)..(64): n is a, c, g, or t
  misc_feature (256)..(256): n is a, c, g, or t
  misc_feature (886)..(886): n is a, c, g, or t
  misc_feature (1921)..(1921): n is a, c, g, or t
  misc_feature (3508)..(3508): n is a, c, g, or t
  misc_feature (3568)..(3568): n is a, c, g, or t
  misc_feature (3592)..(3592): n is a, c, g, or t
  misc_feature (3634)..(3634): n is a, c, g, or t
  misc_feature (3676)..(3676): n is a, c, g, or t
aaacatacgttttttctgcaggtcattgttcatgagcgtgaaatgatccatatctatgcaagcnaagggctgtcgctcaaatgcgctaattttttggcataattgcggcgaagataagaaaatttggagtcaccgaacaatgtttactgggatcatcacagatattgggcaaattgaacgcgttgaacaacgcggcgatatcagagcaaggttaaaaaccagctatgaccatgaaacgatcgccctgggtgcttcnatcgcgtgcaatggggtgtgcctgaccgttgttgattttggtgacggctggtttgatgttgatattagtgcagaaacggtttcaaaaaccaatattgggccgtctgataccgcgacaaacagcagatccgcttgggttgaaggagggcgcgtaaatctcgagcgtgcgctcaaattgggcgatgaacttggcgggcatattgtatcgggccatgttgatggtatcgctgaaatcacggccatcaccgaggatggcgacagcacgcgggttgaatttaaagtggcgaaagatcttgcgcgttttattgccccaaaagggtcggtggctttgaacggcacctcgctaacggtgaatgaggttggggatgaaagcttcggcgtcaattttattccccacaccaaaacggtcacaacttgggacgacatggctgtaggggatttggtcaacctagaaatagacacgctggcgcgatatgtcgcccgattggccgaaacgcgttaaattatcgaaagcgacgttaagattttcggaattttttctctaaatttgaagaagccttttgtggcatatggccaagaaataatatcgtactcgcgcatcacttgcgttaactgaacgccgtgattactnaatagatgtttacatttttcaagcatctgtgacgtattccctacggcggcgtagggtgtgactatttgctctaatttgttttctagcgcccaagacaagatcccctcgggggtggtcacgtcgcagcaattgagcaggttgggtttccaacgctttgtcgcggcatccaaagctgcgttgttaaattcaagcaatttcgggctcgaaaccagcatagtgcccgcatcaaccgggcgataagcggccgatgcgatgcagtcgctacgatgagtgagatgcgcgatatttagatcgtctgaatgaagcaataacccagttttgcgcccctcgaggtaaggattgggagggtctattattttaggagccatcgtgctcgcggtgtcgttcagcggcggcgcgacctgcgccaatccttttggggcgaacctgccattggtaaagcgttgaatattttcggcgcgcgccagataggttttcccaacagaatgtaaccccaccacccagcgccagctcaacgtgtttgaggcagcatcgccatccagaaggtgccgcaaaaaaaagtcagcgcccaattgccagggcaactgcagcgtgtaaacccagattgaggcaaaccacattctcgcatgattgtgcagatatccggtttcggccagttcttttgcccatgcatcaaagcaatctatcccggtttcgcccaggcaggcggccgcccaacgatcgcgcaggcctgattgagtttgcaactcatgggttaggtgatgcacatcggcgcagtattgcatccaaatatggggcctgctttcgagccatcccttgaagtatgtgcgccaaaaaatctcatcaatgaactttcccgcctcgttgagagaatgcgctgacagcactttcttcaaaacgtcttcttccgttataatgcggcgttttatataagcagagagctgcgacacatgtttatgctggcccgcgcccaggtcaaagtttcggtttcttgtataggatgtgccagcttttggtaaaaaagcggccaaaagnacaagggcctcttctcgcgatcctgaacaaacctgcattgaaaattccgccgtaaccattcttgcgagttagtcctaaagaggatgatttcaagacgataaaaacaaacgagttttggttttcatttgaaaagcatatgaagcttaagagcggtagatttcacctaaaaagcgcgggttttgtctaaaacgaacgagatgcttgcctcggaagcaggtttaatctgcgtgagctattgcagagcgggggttgcagcactaagactcgtactagtcagatatccttaagaataggcagggcagaatgaaagatccaatagacacatatatgaacagcttggttccgatggtggttgagcaaaccagccgcggcgagcgcgcctatgatatcttctcaaggcttttgaaagagcggatcatttttctcagtggtcccgtccatgacgggatgtccagcttgatcgttgcgcagttgctacatctagaggcggaaaacccttctaaagagattagcatgtatatcaacagcccgggcggtgtagtgaccagtggattgtcgatttacgatacgatgcaatatatcaaaccaaaagtttcaacgcttgtgatagggcaggcggcttcgatggggtccctactgcttacggcaggtgaaaaaggcatgcgcttctcgcttccaaatagtcggattatggtacaccaaccctctggtggatatcaggggcaagccactgacatcatgatacacgctgaagaaacattgaagcttaaaaaacgcctcaatgaaatctatgtcacgcataccgggcaggatcttgatcaggttgaaaccgcgctcgagcgcgataattttatgtctcctgaagatgccaaagactgggggttaattgacgaaatcgtgactaatcgcgcgaaagatgacgcggaatagggttcggcttgtgacagcgcccgcaagcgcaggaggttggaagcaaaattttggcattgtagagccgccatgcctagcttaagctagcaggcagtatatgtagacgcgtaaagtttttgggattttgaaaatccaaaagggtagaacatggcatcaaattccggtggtgaaagtaagaatactctttattgcagcttctgcggtaaaagccagcatgaggtgcgaaagctgatcgctgggccgactgtgttcatttgtgacgaatgcgtcgagctctgcatggatatcatccgcgaggaaaccaaaagctcggggttgaaatcctcagaaggggttccaacgccgcgcgaaatttgcggcgttcttgatgattacgtgattggtcaaagcattgccaaacgtgtcttatctgtggcggttcacaaccattataaacgtttgaaccacgctgctaaatcgggcgatatcgaattgtcaaaatccaacattttgctgatcgggccgaccggctgcgggaaaaccttgcttgcccaaaccttggcacggattttagacgtgccctttacaatggcggatgcaaccacgctgaccgaagcgggctatgtgggcgaggatgttgaaaatattattttgaagcttctgcaagcttctgaatanaatgtcgagcgcgcgcagcgtggcatcgtttatatagatgaagttgataaaataacgcgnaaatctgaaaacccatcgatcacncgggatgtatcgggtgagggggttcagcaagctttgctgaancttatggagggcaccgtggcaagcgtgcctccgcaagggggncgaaagcatccgcagcaagaatttttacaagttgatacgaccaatattttattcatttgcggtggcgcttttgccggtttggataagattattgcgcagcgtggcaaaggcagcgcgatggggtttggcgccgatgtgcgcgataatgatgagcgcggtgtgggcgaggttttccaagatttagaacccgaagatcttctgaaatttggccttattcctgaatttgttgggcgcctgccagttttggcgacgctagaagatctggatcaagacgcgctggttacgattttgacgcagcctaaaaatgcgttggtgaagcaatat

SEQ ID NO: 415 - DNA, 4000 bp, Escherichia coli
  misc_feature (1)..(5): n is a, c, g, or t
  misc_feature (8)..(8): n is a, c, g, or t
  misc_feature (10)..(12): n is a, c, g, or t
  misc_feature (15)..(15): n is a, c, g, or t
  misc_feature (17)..(17): n is a, c, g, or t
  misc_feature (23)..(23): n is a, c, g, or t
  misc_feature (26)..(27): n is a, c, g, or t
  misc_feature (29)..(29): n is a, c, g, or t
  misc_feature (33)..(34): n is a, c, g, or t
  misc_feature (36)..(38): n is a, c, g, or t
  misc_feature (40)..(41): n is a, c, g, or t
  misc_feature (43)..(52): n is a, c, g, or t
  misc_feature (54)..(54): n is a, c, g, or t
  misc_feature (56)..(59): n is a, c, g, or t
  misc_feature (61)..(61): n is a, c, g, or t
  misc_feature (64)..(64): n is a, c, g, or t
  misc_feature (66)..(67): n is a, c, g, or t
  misc_feature (70)..(72): n is a, c, g, or t
  misc_feature (74)..(74): n is a, c, g, or t
  misc_feature (76)..(77): n is a, c, g, or t
  misc_feature (80)..(84): n is a, c, g, or t
  misc_feature (86)..(87): n is a, c, g, or t
  misc_feature (90)..(90): n is a, c, g, or t
  misc_feature (94)..(94): n is a, c, g, or t
  misc_feature (99)..(108): n is a, c, g, or t
  misc_feature (111)..(120): n is a, c, g, or t
  misc_feature (122)..(122): n is a, c, g, or t
  misc_feature (124)..(124): n is a, c, g, or t
  misc_feature (127)..(127): n is a, c, g, or t
  misc_feature (130)..(131): n is a, c, g, or t
  misc_feature (133)..(134): n is a, c, g, or t
  misc_feature (137)..(137): n is a, c, g, or t
  misc_feature (139)..(140): n is a, c, g, or t
  misc_feature (143)..(146): n is a, c, g, or t
  misc_feature (148)..(148): n is a, c, g, or t
  misc_feature (151)..(153): n is a, c, g, or t
  misc_feature (155)..(155): n is a, c, g, or t
  misc_feature (157)..(160): n is a, c, g, or t
  misc_feature (165)..(165): n is a, c, g, or t
  misc_feature (167)..(170): n is a, c, g, or t
  misc_feature (174)..(177): n is a, c, g, or t
  misc_feature (179)..(180): n is a, c, g, or t
  misc_feature (185)..(185): n is a, c, g, or t
  misc_feature (187)..(189): n is a, c, g, or t
  misc_feature (191)..(193): n is a, c, g, or t
  misc_feature (196)..(197): n is a, c, g, or t
  misc_feature (201)..(206): n is a, c, g, or t
  misc_feature (210)..(210): n is a, c, g, or t
  misc_feature (214)..(216): n is a, c, g, or t
  misc_feature (218)..(218): n is a, c, g, or t
  misc_feature (220)..(220): n is a, c, g, or t
  misc_feature (223)..(223): n is a, c, g, or t
  misc_feature (226)..(228): n is a, c, g, or t
  misc_feature (230)..(232): n is a, c, g, or t
  misc_feature (234)..(234): n is a, c, g, or t
  misc_feature (237)..(237): n is a, c, g, or t
  misc_feature (239)..(240): n is a, c, g, or t
  misc_feature (243)..(245): n is a, c, g, or t
  misc_feature (247)..(250): n is a, c, g, or t
  misc_feature (252)..(256): n is a, c, g, or t
  misc_feature (260)..(260): n is a, c, g, or t
  misc_feature (263)..(263): n is a, c, g, or t
  misc_feature (265)..(265): n is a, c, g, or t
  misc_feature (268)..(270): n is a, c, g, or t
  misc_feature (275)..(277): n is a, c, g, or t
  misc_feature (279)..(283): n is a, c, g, or t
  misc_feature (285)..(286): n is a, c, g, or t
  misc_feature (288)..(288): n is a, c, g, or t
  misc_feature (290)..(303): n is a, c, g, or t
  misc_feature (306)..(309): n is a, c, g, or t
  misc_feature (311)..(312): n is a, c, g, or t
  misc_feature (314)..(316): n is a, c, g, or t
  misc_feature (318)..(325): n is a, c, g, or t
  misc_feature (327)..(327): n is a, c, g, or t
  misc_feature (331)..(333): n is a, c, g, or t
  misc_feature (336)..(337): n is a, c, g, or t
  misc_feature (339)..(340): n is a, c, g, or t
  misc_feature (344)..(344): n is a, c, g, or t
  misc_feature (346)..(348): n is a, c, g, or t
  misc_feature (352)..(356): n is a, c, g, or t
  misc_feature (358)..(358): n is a, c, g, or t
  misc_feature (364)..(367): n is a, c, g, or t
  misc_feature (369)..(371): n is a, c, g, or t
  misc_feature (373)..(379): n is a, c, g, or t
  misc_feature (382)..(382): n is a, c, g, or t
  misc_feature (384)..(384): n is a, c, g, or t
  misc_feature (386)..(386): n is a, c, g, or t
  misc_feature (391)..(391): n is a, c, g, or t
  misc_feature (393)..(396): n is a, c, g, or t
  misc_feature (399)..(402): n is a, c, g, or t
  misc_feature (405)..(406): n is a, c, g, or t
  misc_feature (410)..(410): n is a, c, g, or t
  misc_feature (417)..(421): n is a, c, g, or t
  misc_feature (423)..(423): n is a, c, g, or t
  misc_feature (425)..(426): n is a, c, g, or t
  misc_feature (428)..(433): n is a, c, g, or t
  misc_feature (435)..(436): n is a, c, g, or t
  misc_feature (438)..(439): n is a, c, g, or t
  misc_feature (442)..(447): n is a, c, g, or t
  misc_feature (451)..(452): n is a, c, g, or t
  misc_feature (454)..(455): n is a, c, g, or t
  misc_feature (458)..(458): n is a, c, g, or t
  misc_feature (461)..(463): n is a, c, g, or t
  misc_feature (465)..(465): n is a, c, g, or t
  misc_feature (467)..(468): n is a, c, g, or t
  misc_feature (470)..(470): n is a, c, g, or t
  misc_feature (474)..(474): n is a, c, g, or t
  misc_feature (477)..(477): n is a, c, g, or t
  misc_feature (481)..(483): n is a, c, g, or t
  misc_feature (486)..(486): n is a, c, g, or t
  misc_feature (488)..(491): n is a, c, g, or t
  misc_feature (493)..(496): n is a, c, g, or t
  misc_feature (499)..(501): n is a, c, g, or t
  misc_feature (503)..(503): n is a, c, g, or t
  misc_feature (505)..(506): n is a, c, g, or t
  misc_feature (509)..(509): n is a, c, g, or t
  misc_feature (511)..(513): n is a, c, g, or t
  misc_feature (515)..(515): n is a, c, g, or t
  misc_feature (517)..(519): n is a, c, g, or t
  misc_feature (521)..(522): n is a, c, g, or t
  misc_feature (524)..(524): n is a, c, g, or t
  misc_feature (527)..(528): n is a, c, g, or t
  misc_feature (530)..(532): n is a, c, g, or t
  misc_feature (534)..(534): n is a, c, g, or t
  misc_feature (536)..(536): n is a, c, g, or t
  misc_feature (539)..(540): n is a, c, g, or t
  misc_feature (544)..(544): n is a, c, g, or t
  misc_feature (546)..(552): n is a, c, g, or t
  misc_feature (554)..(555): n is a, c, g, or t
  misc_feature (557)..(559): n is a, c, g, or t
  misc_feature (562)..(565): n is a, c, g, or t
  misc_feature (568)..(570): n is a, c, g, or t
  misc_feature (572)..(573): n is a, c, g, or t
  misc_feature (576)..(578): n is a, c, g, or t
  misc_feature (580)..(580): n is a, c, g, or t
  misc_feature (582)..(583): n is a, c, g, or t
  misc_feature (585)..(588): n is a, c, g, or t
  misc_feature (591)..(591): n is a, c, g, or t
  misc_feature (608)..(608): n is a, c, g, or t
  misc_feature (635)..(635): n is a, c, g, or t
  misc_feature (638)..(642): n is a, c, g, or t
  misc_feature (644)..(648): n is a, c, g, or t
  misc_feature (651)..(652): n is a, c, g, or t
  misc_feature (656)..(657): n is a, c, g, or t
  misc_feature (660)..(662): n is a, c, g, or t
  misc_feature (665)..(665): n is a, c, g, or t
  misc_feature (667)..(667): n is a, c, g, or t
  misc_feature (670)..(670): n is a, c, g, or t
  misc_feature (676)..(677): n is a, c, g, or t
  misc_feature (679)..(680): n is a, c, g, or t
  misc_feature (682)..(682): n is a, c, g, or t
  misc_feature (685)..(685): n is a, c, g, or t
  misc_feature (688)..(688): n is a, c, g, or t
  misc_feature (691)..(691): n is a, c, g, or t
  misc_feature (695)..(695): n is a, c, g, or t
  misc_feature (697)..(697): n is a, c, g, or t
  misc_feature (712)..(712): n is a, c, g, or t
  misc_feature (716)..(717): n is a, c, g, or t
  misc_feature (719)..(719): n is a, c, g, or t
  misc_feature (721)..(721): n is a, c, g, or t
  misc_feature (728)..(730): n is a, c, g, or t
  misc_feature (733)..(733): n is a, c, g, or t
  misc_feature (742)..(742): n is a, c, g, or t
  misc_feature (747)..(747): n is a, c, g, or t
  misc_feature (779)..(779): n is a, c, g, or t
  misc_feature (793)..(793): n is a, c, g, or t
  misc_feature (808)..(808): n is a, c, g, or t
  misc_feature (831)..(832): n is a, c, g, or t
  misc_feature (838)..(838): n is a, c, g, or t
  misc_feature (883)..(883): n is a, c, g, or t
  misc_feature (892)..(892): n is a, c, g, or t
  misc_feature (913)..(913): n is a, c, g, or t
  misc_feature (926)..(926): n is a, c, g, or t
  misc_feature (928)..(928): n is a, c, g, or t
  misc_feature (931)..(931): n is a, c, g, or t
  misc_feature (937)..(937): n is a, c, g, or t
  misc_feature (940)..(940): n is a, c, g, or t
  misc_feature (955)..(955): n is a, c, g, or t
  misc_feature (972)..(972): n is a, c, g, or t
  misc_feature (994)..(994): n is a, c, g, or t
  misc_feature (1017)..(1017): n is a, c, g, or t
  misc_feature (1225)..(1225): n is a, c, g, or t
  misc_feature (1230)..(1230): n is a, c, g, or t
  misc_feature (1240)..(1240): n is a, c, g, or t
  misc_feature (1289)..(1289): n is a, c, g, or t
  misc_feature (2000)..(2000): n is a, c, g, or t
  misc_feature (2154)..(2154): n is a, c, g, or t
  misc_feature (3747)..(3747): n is a, c, g, or t
nnnnntcngnnnagngnaccgtnacnncncagnngnnncnntnnnnnnnnnncngnnnntntgncnncgnnncncnnatnnnnntnnctncgcnttttnnnnnnnnnntgnnnnnnnnnntntnganatnncnncgncnnatnnnncntgnnntngnnnnagagngnnnncacnnnntnncgcgngnnnannnggnnacannnnnngaantctnnncncncgngcnnnannntntgncnncgnnntnnnntnnnnnctcnctntntgnnntctcnnncnnnnngnngngnnnnnnnnnnnnnngannnncnncnnngnnnnnnnncncccnnntgnnannccgngnnnactnnnnntnttccannnngnnngnnnnnnntcncncncgcgngnnnnacnnnnccnncgcngaccccnnnnncncnncnnnnnntnntnncannnnnntttnnannatntannnangnnanaganaanagannnagngnnnntnnnncannncnannggntnnnangnnncnntngcnntnnngngnaanntttncnnnnnnngnnannncannnnggnnngnnttnnncnanngnnnngtnccatcgccgtgtttatngtgcccacctgcgccgccgaacgaatnttnnnnncnnnnnagnnggcnnggnnncgncngantcgtcnngnntngcntgnagncgangnactcgacgaattacngcanngntngtgtgcnnnttncgtcgcatnttgancaactcccgaaacgctttcgcgataacggcancgttaccgccggtnggcttgccgtgccgncgtgggaaatggctcacgggcanntccttnaccgtcatgccaaacctggatacctgagcgaagatttccgtgttnaccatcgcncccaccgagttgatctgaacnttgtcgaagacangncgnttgaanacnttgaaagcgcaatcnatgtcccggaccctgancccgagcacgagccgcacgagnatattccaaccccaggcaaacancagcctgtgcggcggatcctgccgccgggcccggtaaccagcaacgatgtcgtaggaatccgcctgttcgaggagcgcggcgacttcgtttaagtcgaactgcccatcagcgtcagtgaagaaaattagatcgtagcgcgccagcgtgatgccgctcttgagtgcggcaccgtacccgcggttccggggatgatgaacaacacgcacntcggncaactcctcnacgagccgatcgcaaatctcccccgtgcggtccttgctgccgtcgtttnccacaatgatctcaaaaattggggcaagtttcggtacagtccgatatgcgtcctcaacgacggcccggatatttgcctcttcgttaaatgcaggaaaaacaaccgataacgatttcatattggggtgaaaatttataagctatcaaaatcgaggcggccgctgcaagcaaaatttcgcatcattgtggttggctcatcagttccgcatcgggtttgctctgtgcaaccaaacttactgcttacgacgcgcgaatctgcaagaatggatttgttaaattttggcgacgtttgcgaagcccggttctgagcccgctttgtcgcagcggcagcgcacccttgttattaacgatgcaaaagaggaaagtcaatctgcggcgacgaaatatgccgatcggtcgcgaccgataattcggcaatcctctcgcgaaccgaatgacactgctttaccgggaaatggaaaaccggtggctgttcccgcagcttgcccgcgaactagcctgacggcggatcgctgcgcggatctcctgttggcttcggcacttgaacagttcgctgcacgccgaccgacattcccgcgcgtctgagcgatccaggcagaacgtgcttcacagcatgcctttcttccgagcggtttagtgccgcacggcaagaggcgaaagcatcggttctgtccctaggcgaaaatacttaatagccagccgtaatccctangaaaagaatcctaagaaacagcttgacagatttgtttgcttagcaaaaaaatgccccgccccgtctttggcaaagtgagccgagcgacgaggcaggcaacaaccgaggacccctcagaatgaaaaagaaatccgcttcactattagccttcttnaatccgctcgttttaaccgcacatcgaaaacaatctgcaacgcaaccctgcagactgccggcgttaatcggcatgctgctttgcgttgccgagctgcttgccccgggaaacgtcttcccacaggcggtcaagcctgaccccgctggcatcatcgatttaccgggagcaatttccgccaacgcgcctatcggaacgctcgatgaccacccgtggctaaacccaaacgtggacgggcttcggatcagagtgagctggtctgatatcgagacagccgacaacgtttataattggccgctgattgatgactgtttggctaatgctcttaccagcggaaaatttatcggtctcggggtgattgctggcatcgacaccccgccgtggcttttgggcggtgtcactttcaccgatggctcgaccacaaccgatgtggccacgcttacctcagccactgccaattttgttccggcggatgttggaagggcgatcgcgtgtggcaacttttcaccgggcacgaccatcgtttccattatcaactcaacagtggtgcaaacatccaccgcggcgaccagaaccacttcaagaacaccggccaccttttccatcctggcgcgcaacgcaggaggggccgaatttcgtgtgctcaccgcgcccgacgaaggggcgatgccggtgccatgggatcctctttacagagctaaatgggaggaatttatcaccgctttaggagcccggtacgactttaatccgcaacttggatacatagttatgacgggcttttgtcaggtcgctgaggcttatctggccactgagcaggcggatattgatttctttgacgccaatgcgattgcagctggttataccgggaatgggactttgcctgccggattggtggcatgggaagcgacaatccaggaaatgattgcgcaatacatgattgcattcccgcatacgccgttgttcatcaccggcgcgcgtccttacggcggagattcacaagaagtcggcacaacggcgatgaatgatatttttgactggggcgtcgcgacgtatcccgggaggtttgggatcatgaactcccagttgcatgcaacttctgccgccggttattacctcaacgctgccatctacggcaactacttgtatgagccgaccggcattcagtttctctgcaacagtgctagtgacgacaatgttgcccgcctgagcaattctccaccatatggcgacgacccgcttctctcggcttacgatgccatgaataattcgtttaccgcagcggtgaattttggctgcaagtttgtcgaagtctatgagacggatgtcgagaacccggcatatcaaacgatgttggcgactcagggagcagctcttcaattaagggcggcggaaacgccgacggccgacctcagcgttaccgtaacggacggagtgactacggtaaacgctggtacgtcggttacctgcacaattgtggtgaccaatggcgggccgggtaatgttactggcgcggtggtaagcgacaatttcccggccatttttaccggcgtgaccttcacggcgacgcagaccggtggcgcttcaggattcaccgcnagtggaagtggcaatatcaataatactgttacgatgccagccggcagcgttatcacctaccgagccaccgggacgatcagcccatcggcaaacggcacacttgtggacacagcgacggtaaccgctccaggcgacgttccagatccaaatcttgccaacaacatcgcgactgatattgatacaattgtgttatcggctgacctcaaagttaccgtaacggacggaaagagtaccgttaattcgggtacggcgg

SEQ ID NO: 416 - DNA, 4000 bp, Escherichia coli
  misc_feature (968)..(968): n is a, c, g, or t
  misc_feature (1324)..(1324): n is a, c, g, or t
  misc_feature (1936)..(1936): n is a, c, g, or t
  misc_feature (1992)..(1992): n is a, c, g, or t
  misc_feature (2006)..(2006): n is a, c, g, or t
  misc_feature (2045)..(2045): n is a, c, g, or t
  misc_feature (3083)..(3083): n is a, c, g, or t
  misc_feature (3371)..(3371): n is a, c, g, or t
  misc_feature (3492)..(3492): n is a, c, g, or t
  misc_feature (3494)..(3495): n is a, c, g, or t
  misc_feature (3497)..(3497): n is a, c, g, or t
  misc_feature (3503)..(3503): n is a, c, g, or t
  misc_feature (3509)..(3509): n is a, c, g, or t
  misc_feature (3521)..(3521): n is a, c, g, or t
  misc_feature (3527)..(3527): n is a, c, g, or t
  misc_feature (3530)..(3530): n is a, c, g, or t
  misc_feature (3536)..(3536): n is a, c, g, or t
  misc_feature (3539)..(3539): n is a, c, g, or t
  misc_feature (3545)..(3545): n is a, c, g, or t
  misc_feature (3548)..(3548): n is a, c, g, or t
  misc_feature (3551)..(3551): n is a, c, g, or t
  misc_feature (3557)..(3557): n is a, c, g, or t
  misc_feature (3569)..(3569): n is a, c, g, or t
  misc_feature (3968)..(3968): n is a, c, g, or t
cattaatgtttgacatagctgttgtgtatttcgatcatctaattgtttaattttctaacaacgtgtagcggactacatcaagttataaaaacaagtaatatgcctataagcagccaatttgattaacaatataatgagttcacgagacattattttgccatatcagcagatataagtttgtgttttgtcaaacatattgattattcatctcccaccctatctatcgtttcttgccctatcgtttgtacacttcaatcatttatcgtaactttgttccatattattaatataaggaataaagtgtattaatattaagctctgaaaggatatgctaaacattgcaattataggaggaggggctgcaggattttttgctgctatttcggcaaaaacaaaaatgcccaattccaatgttatagtgtttgaaaagacaaatcgtatactagctaaggttggtatttcggggggtggacgctgtaatctaactaactcgtttgccgatataagcgatttaaaacaagcttatccgcgtggcaacaaactgataaaacgactttttaaaagattcgattataacgatacttttcaatggttcgaggctcatggagttcaattagtaacacaaccagacaattgtgtgttccctttttcgcaaaattcacaaaccattatcgattgtttaacacatacagcacaacaacttggtgttgatgtttgtttgcaacatagacttacaaacattactaaacaaacagaaggaaaaatagaagtacactttaaagataagccttatcgtacattcgacagagttattataaccacaggagggtcgctacgtactgcaaacttacaatatttagagaatttagggcacaaaatagaagcgactataccagcactatttacgtttaatatagccgaaaaggcgttcaaaaaccttatgggaacagtagtagaacacgttttantatctattcctgctactaaatttcatagcaatggggctttgcttattacacattggggtatgagtggacctgctacactaaagttatcgtcgtatgctgcacgatatttagcagagaacaacaataaaacaccagtatctgtgaactgggtgaacgaaacaaatgcgcaatctgttgcacaaaacattactgccattgctactgaaaatgctaaaaagcaaatagtaaacacacgtccatataaccttcctactcgcctttgggaatatttactgcaacgcgctaatatagaaaaggagaaacgctggatagacattggaaagaaagcaatgcacaaacttattgagactcttacnaacgatgtacaccaaatagagggtaagggtagctttcgcgatgagtttgtaacatgcggtggaattagtttgaagagcataaatcctaatacactggaaagcaaagtgtgcaaaggagttttctttgcaggcgaagtgctcgatgtagatgccattactggaggatttaacctacaagctgcatggaccactggttatgttgcaggacaagaagtatgtgtttaagatacatcaacagaatgtaaacaaaacctaaataaaatatatttagcgaatcaaatgttaattcccgaataacaagacagaagtctctaaaaaacaagaaactgcctacttcacactatctaatttggtttcgcaccgcaaaaaagtaggtatcggttagcgaaatataggcttttgcatggtaaaagagccgttttcgcatcacaaaaataggtatttctgcatgaagaaactaatctatatgtattctataatgttctaaacacgaaataattaagacttaattattgcacatatccatttcttttttctataaaaccttatcactcaataattaaagaatgcacacaattggttgcctttttctgaaaaaagaataatattgantgaaaaaacgctcggcatttgctatattaagaggttaaaaataaacacttaacaanatttattaacaaancaaaggtcatataaaaatctatgtatcattactttatcnagtggtatatattagccaagatatacatttgcaaacgtttgcatgatattaatcaaaaaacgagcaaaaaggttttgcaagttcgttttattattactacctttgagccatataactaacaactatatgaacttacaatttaatatagaatacaagacatattacggacaagaacttgttcttaatatagtaggtaacgagggttccgaagccaattcggtgtgccaatacagaatgcacacgtacgatggactggtttggacagtggatattaacaaagaaataaagcccggcacggtgatagactacttttatagtgtacacgttggcgaccacgaggagcgtcgtgggtggagtgttgcaccccatagggtaatgttcaattcatcgcaagcattgaattacaggatattcgaccattggagagaaattcctgacaatgctttcttatactcttctgccgtaaccgactgtattgttggtgcaaaaccagagaacctaaaattagagaaattcagcaaatatgtatgcttaaaggtgcgtgcacctcagcttagtgtaggcgattcgctttatttaataggagcagacccactattgggatcgtggaaagagcagaaagctgtaaaaatgacacaggtttctaccaacgaatgggctgtatgtttcgatgtaaatcgtctggcaagcaacaagttagagttcaagtttattattgtaaactctaacaaagaatactctccaatgtgggagaattgtaacaaccgcaccattgaactaccttcaatggaggaaggcgatgctataatatacgaactagacgaagcctatttcactttacccacaatgcgcgtagccggtacacttgtgccgttattctctctacgatctgatgatagcttcggtgttggagactttggcgacctaaagaaaatgatagattgggtaagttcaactcaacaaaaggcacttcaaatcctgccaataaacgatactaccatcacacacacgtggacagactcttatccttatagctgnatctctatctttgcactgcatccacagtatgtaaacctaaatcttctgcctgcattaaaagacaagatacaacgcgaacgcttcgaaaatgaacgcaaaaaactgaatgcactaccacaaatagactacgaacgtgttaacgaacttaaattagcttatcttaaactcatctttgagcaagaaggaaaagacacaattgcaagtaaagagtataagaaattcttcacagaaaacgaaagttggttggttccttatgcacaatacagcatgctgcgcgataagtacggnactgcagaatttgctaaatggccagaccacaaccaatgggacgaagcagaaagaaagcaactctctacaagtggtagcaaggcttacaagagtgtagagttctactattacgtacaattcntnntnagtagncagctnaaagccgtacangaatangcnatttcnaancacgtnatnctnaaaggngatattcctatnggcgtaaatcgtaatggctgtgatgtgtggatggaaccacgctacttcaatttgaatggtcaggctggtgcaccacccgatgatttctcggtaaatggacagaattggggtttcccaacctacaattgggacgctatgatagccgatggttgtaagtggtggttacatcgtttccagaatatggcaaactattttgatgcttaccgcatagaccacgtgttaggtttcttccgcatttgggaaattccagccaatgcagtgcacggtcttttaggtcagttcgcaccagcattgggtatgacacgcgaagaagtagaaggctatggactacgctggcaagaggaattattcacagaacctttcattaccgattgggtattagaccgtattttccgtgancatacgaacgaagtacgcgacaaatacataga

SEQ ID NO: 417 - DNA, 4000 bp, Escherichia coli
  misc_feature (1)..(120): n is a, c, g, or t
  misc_feature (400)..(407): n is a, c, g, or t
  misc_feature (409)..(410): n is a, c, g, or t
  misc_feature (413)..(421): n is a, c, g, or t
  misc_feature (423)..(430): n is a, c, g, or t
  misc_feature (432)..(436): n is a, c, g, or t
  misc_feature (438)..(438): n is a, c, g, or t
  misc_feature (441)..(443): n is a, c, g, or t
  misc_feature (445)..(447): n is a, c, g, or t
  misc_feature (449)..(452): n is a, c, g, or t
  misc_feature (454)..(454): n is a, c, g, or t
  misc_feature (456)..(457): n is a, c, g, or t
  misc_feature (459)..(460): n is a, c, g, or t
  misc_feature (462)..(466): n is a, c, g, or t
  misc_feature (468)..(472): n is a, c, g, or t
  misc_feature (474)..(474): n is a, c, g, or t
  misc_feature (477)..(477): n is a, c, g, or t
  misc_feature (480)..(480): n is a, c, g, or t
  misc_feature (482)..(483): n is a, c, g, or t
  misc_feature (485)..(491): n is a, c, g, or t
  misc_feature (494)..(494): n is a, c, g, or t
  misc_feature (496)..(496): n is a, c, g, or t
  misc_feature (498)..(506): n is a, c, g, or t
  misc_feature (508)..(508): n is a, c, g, or t
  misc_feature (510)..(512): n is a, c, g, or t
  misc_feature (515)..(518): n is a, c, g, or t
  misc_feature (521)..(523): n is a, c, g, or t
  misc_feature (525)..(531): n is a, c, g, or t
  misc_feature (534)..(534): n is a, c, g, or t
  misc_feature (536)..(537): n is a, c, g, or t
  misc_feature (540)..(543): n is a, c, g, or t
  misc_feature (547)..(549): n is a, c, g, or t
  misc_feature (551)..(551): n is a, c, g, or t
  misc_feature (553)..(553): n is a, c, g, or t
  misc_feature (555)..(555): n is a, c, g, or t
  misc_feature (557)..(565): n is a, c, g, or t
  misc_feature (567)..(568): n is a, c, g, or t
  misc_feature (570)..(571): n is a, c, g, or t
  misc_feature (573)..(576): n is a, c, g, or t
  misc_feature (579)..(579): n is a, c, g, or t
  misc_feature (581)..(583): n is a, c, g, or t
  misc_feature (585)..(589): n is a, c, g, or t
  misc_feature (591)..(598): n is a, c, g, or t
  misc_feature (600)..(600): n is a, c, g, or t
  misc_feature (602)..(602): n is a, c, g, or t
  misc_feature (604)..(609): n is a, c, g, or t
  misc_feature (612)..(614): n is a, c, g, or t
  misc_feature (616)..(617): n is a, c, g, or t
  misc_feature (620)..(620): n is a, c, g, or t
  misc_feature (623)..(627): n is a, c, g, or t
  misc_feature (629)..(629): n is a, c, g, or t
  misc_feature (632)..(634): n is a, c, g, or t
  misc_feature (636)..(636): n is a, c, g, or t
  misc_feature (638)..(646): n is a, c, g, or t
  misc_feature (648)..(650): n is a, c, g, or t
  misc_feature (652)..(653): n is a, c, g, or t
  misc_feature (655)..(657): n is a, c, g, or t
  misc_feature (659)..(667): n is a, c, g, or t
  misc_feature (669)..(670): n is a, c, g, or t
  misc_feature (672)..(676): n is a, c, g, or t
  misc_feature (678)..(690): n is a, c, g, or t
  misc_feature (692)..(701): n is a, c, g, or t
  misc_feature (704)..(704): n is a, c, g, or t
  misc_feature (707)..(707): n is a, c, g, or t
  misc_feature (709)..(716): n is a, c, g, or t
  misc_feature (719)..(721): n is a, c, g, or t
  misc_feature (724)..(726): n is a, c, g, or t
  misc_feature (729)..(731): n is a, c, g, or t
  misc_feature (733)..(735): n is a, c, g, or t
  misc_feature (738)..(741): n is a, c, g, or t
  misc_feature (743)..(743): n is a, c, g, or t
  misc_feature (745)..(746): n is a, c, g, or t
  misc_feature (748)..(752): n is a, c, g, or t
  misc_feature (754)..(755): n is a, c, g, or t
  misc_feature (758)..(758): n is a, c, g, or t
  misc_feature (760)..(762): n is a, c, g, or t
  misc_feature (765)..(765): n is a, c, g, or t
  misc_feature (767)..(772): n is a, c, g, or t
  misc_feature (775)..(783): n is a, c, g, or t
  misc_feature (786)..(789): n is a, c, g, or t
  misc_feature (1034)..(1034): n is a, c, g, or t
  misc_feature (1075)..(1075): n is a, c, g, or t
  misc_feature (1090)..(1090): n is a, c, g, or t
  misc_feature (1093)..(1093): n is a, c, g, or t
  misc_feature (1099)..(1099): n is a, c, g, or t
  misc_feature (1108)..(1108): n is a, c, g, or t
  misc_feature (1114)..(1114): n is a, c, g, or t
  misc_feature (1129)..(1129): n is a, c, g, or t
  misc_feature (1136)..(1136): n is a, c, g, or t
  misc_feature (1183)..(1183): n is a, c, g, or t
  misc_feature (1199)..(1199): n is a, c, g, or t
  misc_feature (1201)..(1201): n is a, c, g, or t
  misc_feature (1210)..(1210): n is a, c, g, or t
  misc_feature (1420)..(1420): n is a, c, g, or t
  misc_feature (1648)..(1648): n is a, c, g, or t
  misc_feature (1729)..(1729): n is a, c, g, or t
  misc_feature (1741)..(1741): n is a, c, g, or t
  misc_feature (1747)..(1747): n is a, c, g, or t
  misc_feature (1765)..(1765): n is a, c, g, or t
  misc_feature (1798)..(1798): n is a, c, g, or t
  misc_feature (1807)..(1807): n is a, c, g, or t
  misc_feature (1828)..(1828): n is a, c, g, or t
  misc_feature (1831)..(1831): n is a, c, g, or t
  misc_feature (1837)..(1837): n is a, c, g, or t
  misc_feature (1990)..(1990): n is a, c, g, or t
  misc_feature (2513)..(2513): n is a, c, g, or t
  misc_feature (3667)..(3667): n is a, c, g, or t
  misc_feature (3679)..(3679): n is a, c, g, or t
  misc_feature (3682)..(3682): n is a, c, g, or t
  misc_feature (3718)..(3718): n is a, c, g, or t
  misc_feature (3734)..(3734): n is a, c, g, or t
  misc_feature (3736)..(3736): n is a, c, g, or t
  misc_feature (3775)..(3775): n is a, c, g, or t
  misc_feature (3966)..(3966): n is a, c, g, or t
  misc_feature (3996)..(3996): n is a, c, g, or t
nnnnnnnnnnnnnnnnnnnnnnnnnnnnnnnnnnnnnnnnnnnnnnnnnnnnnnnnnnnnnnnnnnnnnnnnnnnnnnnnnnnnnnnnnnnnnnnnnnnnnnnnnnnnnnnnnnnnnnnntaatgtattatacctaaatcctggtgccgcaggtagacatggttttcataaaaaaagaactatgataagatttgaaattaatgaagataaaattgaaaatatggaagtaattgaactaggaaatcgttcaaagctacctcaatctatttgatgaactaattatagcttgatctttttttattgaactaattgacataaaaattaagaaaaaagagattaaaaaatatataagcccaggatctataattgaaatttttaaagatctttcgtcaaataaatnnnnnnnncnnaannnnnnnnntnnnnnnnnannnnncnatnnntnnntnnnntngnntnntnnnnnannnnnanaantantnntnnnnnnnatnantnnnnnnnnntnannnaannnntannntnnnnnnnatngnntannnnaacnnnantnanannnnnnnnntnntnntnnnngancnnnannnnnannnnnnnnantnannnnnnttnnnannaanatnnnnnanatnnntnannnnnnnnntnnntnnannntnnnnnnnnntnntnnnnncnnnnnnnnnnnnntnnnnnnnnnnttnatnannnnnnnnatnnntannntgnnnannntannnntncnnannnnnanntanannnaancnnnnnnttnnnnnnnnnatnnnncataagaggaattcctactatgctcttatttaaagatggagctgttcaagccacaaaggttggcgctctctcaaaggcgaatctaaacgctttcttggattcaaatatttaactatcaacctaatttcttaaataaataatataaaactctaaataaatcactctttaaaacaaatatttatatccattgttttttcatctggcactttgccatccctcacaaaacttataaatctatatgaaantatcagaacttaaaattaaaacgcctgccgaacttcttgancttgctcagtctctnggnattganaatatttcnagagcnaaaaaacaaaccctnatatttncaattcttaaatacaaggctgacaatgaagaggaggttttgggaganggtgttttagatatantncaagaaggntatggttttttaagatcttcaaatgattcatatgtttctggtccagatgatatttatgtctctcccaaccaaataagacgttttaacttatcaactggagatgttgttactggaaagattagggccccaaagaaaggcgaaaaatattttgcacttgtcaaagtttctgaagttaatgaggattcaccagaaaatataagaaaccgaatnccattttcttccttaacaccacttcatccaaatcaaaggcttggacttgagctaggaaatggtggtacagaagatattacagcaagagttattgatcttgttgcaccttttggaaaaggacaaagaggactattagttgctcctccaaaggccggcaagacaatgattatgcaaaatattgcgtcttcaattgcagtcaaccaccccgagtgtgaactaattgtactnctaattgatgaaaggcccgaagaggttactgaaatggagcgtacagttcgaggagaggtcatttcatctacatttgatganccagctaaaagncatgtncaagttgcagaaattgtnatagaaaaagccaaaagaagagctgaacaaggnaaagatgtnatcattttgcttgactcaatnacncgtctngcgagagcttacaatacagttgccccgtcttcaggtaaggttttaactggtggtgttgatgctaatgcgctccaaagaccaaagcgtttttttggagcagcgcgtaatattgaaaatggtggaagtataactattatcgcgactgctttagtngacacaggatccaagatggatgaagtcatttatcaagagtttaagggtacaggcaatatggagcttcatcttgaaagaaggctgtctgaaaaacgtatctttcctgctataaacattaatgcttcaggtactaggcgtgaagagctcatcactgatgagcaagaacttcaaaagatgtggattttaagaaaaattcttcatccaatggacactgtcgaagctgctgagtttttaattgaaagactgaggttcactaagactaatgatgagttttttgattcgatgaaacaaaagaagtaaaggctcgcttatcagctagagtattttataattaacttaatgctgtcaaaaatctttaattttccaaatacaatcatttcaagatatttactgaaaagtttaatcgtttttcttgtatctattttttttattattgggcttatcgtttttggtaatcagtttgttctaactgttcaggagagtgttgagcatggcattccttttcaggaattaatgccaattnttggttttaatatgctccgtgatattcctattatattttctctttccttattcttggctatcataatttctatatctcagatgtataaaagctctgaagcggtcattatgaattcagttgggataggagataaaggctttatctattatattcagccgattgttattctttcttttattgtagtttttattctaactatttatgctgttccatgggctaaacagcaaaaaagttttgcagaggatcagactgttaatgcttctgagttttcgtttattactgaaggaaagtttgaaagctttaaaaacggtgatattgttttttatgcatcggaatcatcggcaatagattcggcaggtgaacaaaatatggaagaggtgtttatttatgtttctagcaaagagagtcctgtcattgtattggcatctgaggctacgaaatatactgactcaactagtcaaagtatttatttaagactcaaggatggcgttagatatgaaggacttcctggtgatttaaatataaatatcttagattttgatcaatatgatttagagatagtatcaggcgaagttcaaaaatcactctctaatttctctgaaattgaagaaaaaagctctattaatttgttatctgatggaagtttgcttgcaaacgctgaaatgcaatggcgattttcccagccactatcaatattgattttgtcagttattggagtgcttcttgggaaaacttcaccaaggactggcaagggtattaatttgttaattggcgtattaatttttatgctttataacaatggactgctggtagcaaaaacctcaattgaaaatggtgaattagacccatctattggcttatggtcgatacatgtaatgtttattttatttttgttaattttttatcagcttagacagggaaaagtttcttattttattgataaaatagcgtttttaaacaaatagagaaatataatgtctagttcacccagtaaaattttagaagtctttgataatccaaattctgagagagatttcgtcattcgaattgattcatctgaatttacttgcctttgcccattaacagggcagcctgactttgctgatatacatattgaatatattgctgacaagctttgtgttgagttaaaagcnttgaagaattanttntggtcatatagaaatgaaggtgcttttcatgaagcngtaactaataaaattntngatgatttggttgaagttatgaatccaaggtttattagnctaaaagctgtctttaatgtaaggggcggtgtttatacaaatgttgaatgcgaacatagaaaagaaggttggtctccaagagaagttgttagtctatgagtccaattcgtcaaaaggttaaatttgacaaaaaattattagatcaagatgctttaaagatcttaaaaaaattaaataattcaggccatganacttatttagttgggggttgtataagaganattc

SEQ ID NO: 418 - DNA, 4000 bp, Escherichia coli
gctttttgattgtcgacgcggatcttgagtaggcctgccgggcttggaaggctcttggccccagtttgaagaaggaagaaacgctggcgctgattccggaagaaaacgtcctcatggacacggaaaaagcgtggatttcagtccggcaactttctacgggtttcggaatgaggctgacagacgcggccacttcggaggaacgagcccccaagaacccggcaaaaccacggttcaataccagcaacgttccgtgggtttcgaaacggtgccgagacgggaggtcccgccacccaccacgggtagacattgttttggaacccgccatggctcactccggacaggtaaagagggggaacaagcaagatcggccgcgaactgaggtccgccacatcaacgtgttgcccaaatccacgcgcaggaacgatgtcgttctcacccgcccctctgggttgagacctcaagccccgtgccaacacttcgatgtggcgcacggcgcttcgtgggaggttcggacgccaacccgctcccttccggctcggagtgaccgaccgaggtccccaaaaaaaacggtttacgcatggttcatggtgttggcacggggcttgagatccccatccaatggggggtggagaagaacgaccgccgttcctgacgcgtggatttgggtcccgccggcggtctgggattgtgggctcagcctcgggctcccgtgcccaccgtctccgcccagggcgagagggcggccaggaccgactccgccgggaccgacgccatgatccgggtcaattcctcggccgttcccgcgatcgcccgcccgtcgtaccggtagaagtcgagatgccgaccgccgatggccgggttggggatgaggacccagtcgtcccgtcggggatggacgggcggattgaaggtgggcgtctcgatgacccattggcggggcacacccatcgcggcggccacgtgcatgaagaccgtgtccacgctcaggaacccgccggcgtgacccaccagggccatggcctcgcgcaatccgggggtggccgcctcggtgaactccaccccggccgcacgcaatgccgcatgcaagggccgctcctcggccgacccgaataggaccgccggcacgccgggatgccggatgcgccattcccgcaggaagtccgcgaagtgccccaccggccagcgccgaagggccaggttcttggtgccgcccgaacccacatgaatcccgagccacgggcgcccggccagaccgcgctccgccagccaagccccggcccagccgcgctcggccccggagaggaacacctcgtaaccgggacgcgccagccggggcgcgaggcccagcgtcgccagcaggcgcacgttgttctccatcacgtgcaccgagtagtcctgggggatcgaccgggtcaccaggcagcggtccagccacgactggttctcgtaggcatggctgaggcgctcccgggccccgacgagaaaggcgatgagacgataggcccggcgcccctgggtatgggtgttgatcgacaggtcgtagcggcgacgcctcagctccagacaccgcgccaccgaggccatcggcccggaccgcaggaagtcgtggcgcagaacctcgcgcacgtgcggattgcactgcagcacctccgccgcacccgcccacaggaccagcacgtcgatcgccgcgccgggatgttgcaggcgcaactcgtgcagcagcggggtcgccatcagcgtgtcgccgattccggaaagggacaggacgaggattcgggtcaccgggaccgaaccgtagggagccgccgccccggccacaaggcgcggccaaaggccctcgttccaccgtcggtgcggagggcccgccgaggcggccggatcccccgggcccggttgcgccgggccccgcgccgccgagcgcacgagcgcacgggcgcacgattttgtccccgcaaatgacttgcggtgcccccggttcggaacaatgttaaagctccgcaggcgacgatcccttcctcggaatcgtccactttccccaggtcccatccccgtccggaactgcgtcggcgccgttgaaggcaccccgagggaacccatccgatccgaaccgattttccacatgccgcgcgcaccgaaagatccgtccgccccgaagaagccccgggcgccccggaagaaacccgacgcatctgccgggatcgccgaagacccgtccgaacccaccttggccgggccgtctgcgatcgacatcgccaccggcggggtcaccggggacacccggcatcccgggaagtcggccgggaagcccgcggaccgggtgccgtcgggcgccgagggcggcgggaaggcctccggggattcgcccagcctccaggacccgccgaaatccccggagtccgggcacgcacctgcccgacggggccgtcgtgcggccgccgacgacggcaacctgctgagcagcgtgtccgccccgcccgcagacgcacccgtgacgcgtgagaacgaagacgaacccctggtggtcaaggcctccccgctgccgccgagggccccgatggccccgcccaacgaggacaccccggccccggaggctcccgagaaggccacggtggcgatcgaaccccgcacgctgaacctccacgagctgcagccgatgcccatcggcccgctggccgaggtggccaagcatttcggcatcgagaactacggcaccctcaagcggcaggagatcatcttccaaatcgtccagcgcaacctcggcgcgggcggcatcatcaacacccgtggcgtcctggaggtcatgccggagggctttggattcctgcgctcgccggccttcaactacctgccctgccccgaggacatctacgtctccccgtcgcagatccgccgcttcgacctggccaccggcgacgacgtcgaggggcaggtgcgtccacccaaggacaaggagaagttctacgccctgctcaaggtcgagcgggtggccggactggatcccgacaaggccaaggaaaagacccatttcgagaacctcaccccgctcttcccgaaccgccggttcctgctcgagaccacgcccgacgagtacagcacccgcgtggtggacatcgtctgcccggtcggcaagggcacccgcggcctgattgtcgcccctccacgcaccggcaagacggtgctgatgcagaagctggccaacgccatcctcaagaacaacccggactgccacctgatcatcctgctcatcgacgagcgccccgaggaggtcaccgacatggagcgttcctgccgaggcgccgaggtcgtcagctcgaccttcgacgaaccgcccgagcgccacgtgcaggtggccgagatggtcatcgagaaggcccgccggatggtcgaacacaagaaggacgtggtcatcctgctcgattccatcacccgtctcgcgcgcgcctacaacacggtgcagccgcactcgggcaagatcctttccggcggcgtcgacgccaacgcgctgcacaagcccaagcggttcttcggagcggcccggaacatcgaggaaggcggctcgctgaccatcatggccacggcgctggtcgacaccggcagccgcatggacgaggtgatcttcgaggagttcaagggcaccggcaacatggagatccacctcgaccgctcgctggttgatcgccgcatcttcccgtcgatcaacatcgagaagtcgggcacccgcaaggaggagctgctctaccaccccgacgaataccagcgcatctcggtcctgcgccgagccctggtcggcgtgccgccggtcgagtcgatggacctgctgctcggcaagctcaagaagacgccgaacaacatcatgttcctgctctcgatgggcccgtcctcccggtgaggcgatcctccgcggtcttctgaaatagagcctgacagaggggcccgccgacaggacatgccgcgggcggaccatccttggggaacctcccagaaactcaggggagaagcg

SEQ ID NO: 419 - DNA, 4000 bp, Escherichia coli
  misc_feature (2)..(3): n is a, c, g, or t
  misc_feature (6)..(8): n is a, c, g, or t
  misc_feature (10)..(14): n is a, c, g, or t
  misc_feature (17)..(18): n is a, c, g, or t
  misc_feature (20)..(21): n is a, c, g, or t
  misc_feature (23)..(25): n is a, c, g, or t
  misc_feature (27)..(28): n is a, c, g, or t
  misc_feature (30)..(31): n is a, c, g, or t
  misc_feature (35)..(35): n is a, c, g, or t
  misc_feature (37)..(42): n is a, c, g, or t
  misc_feature (44)..(49): n is a, c, g, or t
  misc_feature (51)..(56): n is a, c, g, or t
  misc_feature (59)..(68): n is a, c, g, or t
  misc_feature (70)..(82): n is a, c, g, or t
  misc_feature (84)..(84): n is a, c, g, or t
  misc_feature (86)..(89): n is a, c, g, or t
  misc_feature (91)..(93): n is a, c, g, or t
  misc_feature (95)..(96): n is a, c, g, or t
  misc_feature (100)..(103): n is a, c, g, or t
  misc_feature (398)..(398): n is a, c, g, or t
  misc_feature (931)..(931): n is a, c, g, or t
  misc_feature (1249)..(1249): n is a, c, g, or t
  misc_feature (1989)..(1989): n is a, c, g, or t
  misc_feature (2054)..(2054): n is a, c, g, or t
cnnccnnngnnnnnaannannannntnntnntgtngnnnnnntnnnnnnannnnnnccnnnnnnnnnnannnnnnnnnnnnncngnnnntnnnannaacnnnngcccggaagctcagatcaatccttgtggcccagtaacacacacttcatattagcatttggatcgaccatgtcctgtcatagtgagaggtttctcaaggcaaacaaggccttggtttttgcctcaacaggctcgataatgaaggttcgatcaggccggaaaacatgtctcaagaggctgcccattcatcgatcttattgctcgggatcaacgcaaaatacatccacgcttcctttggtcttaggtgtattcaggctaaccttggtccgctcaaggcccagagctaccttctggagngcgaaatcaaccaacggccggctgagatcgtcgagaaattattggataggcaacccaaaatcatcggtattggcgtctacatttggaatgtggatgtagtcaaatccgtggtcgggattctgaaggctgtttcacctcagacacacatcatcctgggggggcctgaagtgagctttgaaatggatcagcaaacctggctaaaaaccgcagatcatgtggtcacaggggaaggggaggtagcttttcgagacctttgtgagcgtatcctgagcccagcaaactccgagcccctcccgtggatgataccagggggactccctgacttggcacagttagaatgggcttatccactttatttggatgaagatctagcccaacgcgtggtttatgttgaagcttcaagggggtgtccgtttacttgcgaattttgtctctcatcgctggatacgccagtcaggggttttgataccaatgctttccttgatcaaatgcagcttttattggatcggggcctcaagcatttcaaattcgtngatcgcaccttcaatctaaatctacggacaagtcaatcgattctggatttttttctggagcgtatgaaaccaggcttattcctgcacttcgagatgattccagaccgtctccctggggctctcagggagcgaatcgctcaattcccagcaggaagccttcagctggaaataggcatacagaccctcaatccagtggtttcagacctcatcagtcgccgacaaaatgtcaataaattgtgcgaaaacctgcactatctccgaacatccacccacgcccatttgcatgtggatttgattgcaggattacccggggaaganctcatgagttttgggaaaggttttaatcaggtgttgggcttggatcctcaagaaattcagatcggtatccttaaaagactgagaggaacccccattacaaggcatgatcagactcatggcatgatttatgatcagcaagcaccttatgaagtgctcaagacagctgacatgacttacatggcactccaacgggtcaaaaggttggcccgatactgggacttggtcgccaatagcggtaatttcacgcaaactgtccgctacctatgtcacgatagatccaatcctttcgaagctttcctgtcttttagtgattggctctttcagcacactggccagcggcacggcatggctttgacacgtcttttaaaccatatctggttctacctcacggaggttcaaggcatgaatccagctgtcatcgcggactcgctatgggcagattatcgagctggcgggagaagtgatatacccatctgtttgcgagatcacatcaggattaccaagaaagaccaatccgcagcaaaaggatctgatgccaaggatccgctgaaagaagcgaatcaaaccaagggcgacaaagttcaggaaaaggattcttcgaggttacaggccaaccgccgacaaagccgacatgaccgcaaatcgcacccgtaatacgcctcaactaaaggattcctcaaggatcacaggctcaagcaaaagccccgactaaatttcgcacaatatttgttatgtctagntcgtcactgccggcatcttagtggtagtattgggatgtgtggatgagaattatgcatgagttctnagcacaaaccgagactgcctgccccacggatcaatttgagggctttttccagggttgttctggaaacacctcaggtgtccgatagcctgtgggtttgggacgattaacttcgagcgagggttcttcattggcaggctcattgggcgtatccatacccattttccaggaggcaatcttcgcttgaagcccatgatgctcagctttttccttgttgccaattttcacgtaaaaaagcgagaggttggtgtgaagcatcggatgattggggcaaagcgactccacctggtggcccaaccgaatagcctcctgatacgattcttgacgataatgggccatggccagactcatgatggcatccgggtaatctggggcttcggaaaggatctcggtgagtaaattgatagcatggtcgtatttcgcctgagaaaaaagaaacatagcctcgtcatgcttggctaggatggcctcgctttgttgcggtggcagctcatgttcactttccatgactaaatcttagtgaaccgaccttcgcagctcaagctggcatatacatatcgatgtcattgaagcattcgtgcatcatgttttctctttgttcagatccatgatttacccttagcggcggttgagcaaggggccctatcatgctatgagtaacatcaccatgggcaattcctccagtcccgtttctgggaccatgcttaatcgcgaacaactcgcccgtctgtatgatatcagtcaggagcttcaagccacgctcgaacccaaagtcgcactccaactcatcctccgacatgccatcgaattgacggctgccgactcggcaagcatctcgcttgtcaatcccggtaatgcgctccttgaattagaagcctctcggggtttgcctgagtcattaactcaggactatcagctagccttggggcgtgggatcaccggttgggtagccaaacatggctcccctgccctgattgctgacgtcagggaggatgctcgttacatgtctctgtggggcgatgtgcgctccgaattggctgtcccattcgatgtgcacggtgaagtcagaggtgtcctgaatgtcgatagcacgcaagtcaacactttcgatgaaaccgatcaggcaatgctatcggctctggctattcaggcttcaaggattattgggaatacttggcttttccagcaaatccaaggcaaggcagccatgcttgaatcccttgctcaaatcaatgaaaccctgcaacaaacccttagcctagatgaagccttggaggcagtaacccgtgaggcctgccgcctgatgtccgcgaccatgggctcagttctgttacttgatgaatcaaaggactggttggacctcaaggcctcttatggtgctggcaaaacctaccaagctaagcccagactgcatgtcgatgaatcctttgctggtgctgccttgcgccgtgatcatccaatccaattaaaggatgtgcgacattccagtctttatcaaaacacagagttggcttgtgaggaagggcttgtcagtatgttatgtgttccccttcgaaccgagtcgcaagcttttggtgtgctcaatatctacactagcgagcctcatgttttttcagttgaggaaatcaatattctcaaagcctttgccaacatttcagccatgacgattcatcgggccaggatgaataaggaaatgcgccagctggaggaagcactcagggggcgagaaaaattatcagctctaggcttgctggcagctgaggtagcccatgagatccgcaatcccctgaccgttatgaaaatggtttaccacgccctggatctcaaatttgaacccgaggaccctcgccatgaagatgctcaactcttgggcagaaaaatggaccacctcaacaaaatcgtggaacgtgtgctggactttgcccgtcacgatgaacccaaaattgaat

SEQ ID NO: 420 - DNA, 4000 bp, Escherichia coli
  misc_feature (1267)..(1267): n is a, c, g, or t
  misc_feature (1651)..(1651): n is a, c, g, or t
  misc_feature (1663)..(1663): n is a, c, g, or t
  misc_feature (2770)..(2770): n is a, c, g, or t
  misc_feature (2878)..(2878): n is a, c, g, or t
  misc_feature (3249)..(3249): n is a, c, g, or t
  misc_feature (3270)..(3270): n is a, c, g, or t
  misc_feature (3402)..(3402): n is a, c, g, or t
ttgcgccagttgcaccgtatagtagtcacctgttaccaaacgagcactatctgatctaacgatcattccgccggcctgaaatcccacaaaagctgcagaatctgcagaattcgagaggtcgaattgcgcgattgagtctccattggcgtaggtcacggttcgcaaattttcggtgaagtagcaatcgcatcccagccgtgtcgttccatacgaatgaccgaggtattcgaatgaaacagggcaagctcctgcgcagaacagaatctcaaccccctcattcagaccgttgacgttctttacaaaggcccgaaaactgtattcattgctgtactcaaaaggcaggttgacggttaacgttgaatccgctgccaatgacgagaaggcgagcgttgtgtcaccggccgcactcaaatcggcgcggtaccaggagaatcccacggaatctggctgggcaatatcttctgtccatgtaaaacgtgcgttcaaatacgccgtcgaatcggttggattcgtaacaggaagtgtagtgacatccaccaaggtgaaaaactggatagtatcggttttggaggttccaatttcattctcagcaaaccctgcggcgaaatactgcgctccgggcaataagtcaggtaagaccgccgagaatactgagtctgaaggaatgtaagtcagcacagaatcggctgcacctaccaaatcgctcgaaatgccccatttgatgtaggtgctgtctggaccaactccacccgtatccgtcaactttacagctaacttctccaaagagccatcccatgtgatggtgtcgatcactggcgcaatcgccaacgtcttgaatgttaacgtgtcaccgtaagttgttcctgtgctgtttgttgcgctcgcggcgaagtaataatcggtgtaccgcgtcaagccctccgcaatcactgcgtactgatcatcgcatgccgttgtggaattggtgatgccttcgctgtaattgatggtcgagtcttgcgcgcttgccaaacttgccgccgttccccacttgaaactcaaattggtgatggcatcgtcaaatgcgaaacaagcgtttaattccgcttcatgtgccgaaatcgatgcagcagattcagtgactacagccacggacgtcgcaaaggggatggtgtctgaaccggtgcctccaacgttcgccgcgaagcttccgacatgataatttgtgccatctgccagaccggtaaaagccgccgtgaacgtactgtcagaaggttggtatgtgctngacaaggtgtcgccaggtgcactcaaatctgcgtttacgctccaaacgaagtaggtcgaatctggaatcggagtgccgttgttacctccgagatccaaaaggcgcccggtcatgacctccgtctcagcgtcccaagacacgacgcccaacgtgggtgattccggcaaggtcttgaatgtcatgctgctctcggagtttcctcgtccttggacattgtctgcaaaggctcggaaatagtaatccgtgtaacgcgtcagtcctgtaataactgcggagtgtgctgtcccgccggtgctgtcggaactgatgcttccgccgtcaaacgttgctgctgtgaaatcaacgatgtcgtattgaaattgaaccgcgtcgggtccttggccnccggcgtcggtnatactcgtgattaaacgtgcagaagtcgaagtcaccgaagctgtatccaaagtgaaaccagatgctgtgtccgctagtgttcggaacatcaaggtgtctcccatgccgtaaagtccaaggatacttgcattgagttcttgaccattgatggaaatcccttggccattgaattcacgcattaatgaatcgttcgccgcaattggaatggcgatgtattccgagtaacgctcgagtcccacgatggatcgcgtaaagaccgaatcaacgttcaatagagcagtgtccattgctgtatgagtcggcaaatcagtgggcggcgctgttacatcgatcgcgttcacatatgtggtccaatggtccgcaagaagtgaatctgttaggagtgcaaagtccacgtcctcggtaaaaattgagtcaatctcaaaaaaaccaagggaatcattccacacatcctgtttgccataaatgacgccccaaatgcgcatggcggctccaccatcgtcggtcactttggctttgatggaagccgtgtgctgagcgatgctcatcacctcttgggtcaataccgttggcgggccgagcaacgcctcgtccaattggatttgcagggacagaatgctgtcgcggagaacgtaacagtcatgccacatgttgattgtgtttcctgcaatagaacccgacacatagacatcgtatacggtatccacttccaaagcgcctgcaatgcgattttccaagtcccgaatcatgagcatgagcgtcggccaatcgcaatccatttgcagttctaccccagcagtttgatcaatcaattgcccggtcaccggtaacgtcaacaaggtgtcaccttggtatggcacagagtcgtgcaaggcaagttgtgcctgtacatcctggcctataggtgaaaggatgcaaaccatagctaggctaaaggagagtataaaacttttcatagcggattataaattcgattaaacgattaaaatgctcgatttatggagattaaaattacgttttgtgtcgtcggtatgtttctcatgatgatgtcatataattcagacttaatcaggtttaaacttcatgtgatatcactttaggtcaagnagggtgctgaatgaaataccttcgagtgagcatcatcctttgccgccagaaatacaggaattacattgaagggaatccttatcgccttgacccattcatgggtacatngggtcattagttggtttgttgtgagcgttccattcctgctcaatgcgcaagtacaagtggatttgagcggccgcctacttttgaaaaaactttatcacacgtccgaatacaatcaagccagcttagattctgcaacggtagaacttcaacgactcgaagccaaagaagcgcaggatgccgattgtgttgaaagggaaaggttgaaggccattattgctcatggctgcgcacgtggtgggaagtccattgcgctgacatctatccttgaagaggacggagcgtgttgcccggcttccggattgtatcagtatttcttgggctgcgctttaattgacgcgggacaagacaagtcggccgccaatcgatttcancgagccattgaattgatggangaatctgatgaagccactcagccagcgtcggtcgctgaaggcgttgatttattgcgattccttagaaatcctgatctgtctattcattccaaggatttctaccacggacatctttactacgagttgctgttngataccaacttatctgaagatgagtgggtaagaaattgggagatactgaaggccaccaatgcttttcagcgagatgcattttctgagtatgtcaatgagttcttagaggagtctgataacaatgccgttttaaattacatagattccggccacgtggcggagtccaaggttgctcactggccgattgctttctttattctattgggctttgttgcagtgttggtctgcttgatggccatgcgggaaattcgcaagcggcgcgaaatttcagagaaatcatcaatcatgacgcccaaacgtgaatccggcgagaatatagatgcgccggaaggcacctccctcatgctggaagtcacggaagaagatataagtacgttgggtcatgccttgcagcgaggtgatcgtgtgggtgatgcgatgattgtggtgcgaaagctcgaaaatatgtttccaaccgatcggcaatccatcacgctcaactccatttcttcactgcagtattcggaaagtttgagtcatttggaagcgacgattgttttattgaccgttagaggcattcatgcgaaagaaattgcgcaccaattgaacatgagcaacg

SEQ ID NO: 421 - DNA, 4000 bp, Escherichia coli
  misc_feature (99)..(99): n is a, c, g, or t
  misc_feature (132)..(132): n is a, c, g, or t
  misc_feature (210)..(210): n is a, c, g, or t
  misc_feature (279)..(279): n is a, c, g, or t
  misc_feature (321)..(321): n is a, c, g, or t
  misc_feature (570)..(570): n is a, c, g, or t
  misc_feature (663)..(663): n is a, c, g, or t
  misc_feature (795)..(795): n is a, c, g, or t
  misc_feature (1459)..(1459): n is a, c, g, or t
  misc_feature (1462)..(1462): n is a, c, g, or t
  misc_feature (1971)..(1971): n is a, c, g, or t
  misc_feature (1973)..(1973): n is a, c, g, or t
  misc_feature (2265)..(2265): n is a, c, g, or t
  misc_feature (2275)..(2276): n is a, c, g, or t
  misc_feature (2284)..(2284): n is a, c, g, or t
  misc_feature (2286)..(2287): n is a, c, g, or t
  misc_feature (2294)..(2294): n is a, c, g, or t
  misc_feature (2302)..(2302): n is a, c, g, or t
  misc_feature (2306)..(2306): n is a, c, g, or t
  misc_feature (2315)..(2318): n is a, c, g, or t
  misc_feature (2328)..(2328): n is a, c, g, or t
  misc_feature (2332)..(2332): n is a, c, g, or t
  misc_feature (2340)..(2340): n is a, c, g, or t
  misc_feature (2347)..(2347): n is a, c, g, or t
  misc_feature (2350)..(2351): n is a, c, g, or t
  misc_feature (2358)..(2358): n is a, c, g, or t
  misc_feature (2360)..(2361): n is a, c, g, or t
  misc_feature (2363)..(2364): n is a, c, g, or t
  misc_feature (2369)..(2369): n is a, c, g, or t
  misc_feature (2371)..(2373): n is a, c, g, or t
  misc_feature (2376)..(2376): n is a, c, g, or t
  misc_feature (2379)..(2379): n is a, c, g, or t
  misc_feature (2386)..(2386): n is a, c, g, or t
  misc_feature (2395)..(2395): n is a, c, g, or t
  misc_feature (2407)..(2408): n is a, c, g, or t
  misc_feature (2412)..(2412): n is a, c, g, or t
  misc_feature (2416)..(2416): n is a, c, g, or t
  misc_feature (2418)..(2418): n is a, c, g, or t
  misc_feature (2422)..(2422): n is a, c, g, or t
  misc_feature (2429)..(2429): n is a, c, g, or t
  misc_feature (2431)..(2431): n is a, c, g, or t
  misc_feature (2433)..(2433): n is a, c, g, or t
  misc_feature (2455)..(2455): n is a, c, g, or t
  misc_feature (2458)..(2467): n is a, c, g, or t
  misc_feature (2470)..(2470): n is a, c, g, or t
  misc_feature (2475)..(2476): n is a, c, g, or t
  misc_feature (2479)..(2482): n is a, c, g, or t
  misc_feature (2484)..(2484): n is a, c, g, or t
  misc_feature (2486)..(2487): n is a, c, g, or t
  misc_feature (2489)..(2489): n is a, c, g, or t
  misc_feature (2492)..(2495): n is a, c, g, or t
  misc_feature (2497)..(2505): n is a, c, g, or t
  misc_feature (2507)..(2508): n is a, c, g, or t
  misc_feature (2510)..(2510): n is a, c, g, or t
  misc_feature (2512)..(2514): n is a, c, g, or t
  misc_feature (2516)..(2517): n is a, c, g, or t
  misc_feature (2520)..(2520): n is a, c, g, or t
  misc_feature (2525)..(2525): n is a, c, g, or t
  misc_feature (2528)..(2532): n is a, c, g, or t
  misc_feature (2534)..(2540): n is a, c, g, or t
  misc_feature (2542)..(2543): n is a, c, g, or t
  misc_feature (2545)..(2549): n is a, c, g, or t
  misc_feature (2552)..(2554): n is a, c, g, or t
  misc_feature (2556)..(2557): n is a, c, g, or t
  misc_feature (2559)..(2572): n is a, c, g, or t
  misc_feature (2574)..(2574): n is a, c, g, or t
  misc_feature (2576)..(2578): n is a, c, g, or t
  misc_feature (2580)..(2584): n is a, c, g, or t
  misc_feature (2588)..(2598): n is a, c, g, or t
  misc_feature (2601)..(2601): n is a, c, g, or t
  misc_feature (2603)..(2603): n is a, c, g, or t
  misc_feature (2605)..(2612): n is a, c, g, or t
  misc_feature (2614)..(2616): n is a, c, g, or t
  misc_feature (2618)..(2648): n is a, c, g, or t
  misc_feature (2650)..(2680): n is a, c, g, or t
  misc_feature (2682)..(2695): n is a, c, g, or t
  misc_feature (2697)..(2703): n is a, c, g, or t
  misc_feature (2705)..(2720): n is a, c, g, or t
  misc_feature (2722)..(2724): n is a, c, g, or t
  misc_feature (2728)..(2728): n is a, c, g, or t
  misc_feature (2730)..(2738): n is a, c, g, or t
  misc_feature (2740)..(2744): n is a, c, g, or t
  misc_feature (2746)..(2781): n is a, c, g, or t
  misc_feature (2783)..(2784): n is a, c, g, or t
  misc_feature (2786)..(2816): n is a, c, g, or t
  misc_feature (2818)..(2822): n is a, c, g, or t
  misc_feature (2824)..(2844): n is a, c, g, or t
  misc_feature (2846)..(2851): n is a, c, g, or t
  misc_feature (2853)..(2907): n is a, c, g, or t
  misc_feature (2910)..(2971): n is a, c, g, or t
  misc_feature (2973)..(2973): n is a, c, g, or t
  misc_feature (2975)..(3008): n is a, c, g, or t
  misc_feature (3010)..(3036): n is a, c, g, or t
  misc_feature (3038)..(3048): n is a, c, g, or t
  misc_feature (3050)..(3068): n is a, c, g, or t
  misc_feature (3070)..(3149): n is a, c, g, or t
  misc_feature (3151)..(3175): n is a, c, g, or t
  misc_feature (3177)..(3217): n is a, c, g, or t
  misc_feature (3219)..(3220): n is a, c, g, or t
  misc_feature (3222)..(3237): n is a, c, g, or t
  misc_feature (3239)..(3289): n is a, c, g, or t
  misc_feature (3291)..(3291): n is a, c, g, or t
  misc_feature (3293)..(3370): n is a, c, g, or t
  misc_feature (3372)..(3441): n is a, c, g, or t
  misc_feature (3444)..(3450): n is a, c, g, or t
  misc_feature (3452)..(3455): n is a, c, g, or t
  misc_feature (3457)..(3461): n is a, c, g, or t
  misc_feature (3463)..(3465): n is a, c, g, or t
  misc_feature (3468)..(3468): n is a, c, g, or t
  misc_feature (3470)..(3473): n is a, c, g, or t
  misc_feature (3476)..(3477): n is a, c, g, or t
  misc_feature (3479)..(3490): n is a, c, g, or t
  misc_feature (3492)..(3492): n is a, c, g, or t
  misc_feature (3494)..(3507): n is a, c, g, or t
  misc_feature (3509)..(3509): n is a, c, g, or t
  misc_feature (3512)..(3512): n is a, c, g, or t
  misc_feature (3514)..(3514): n is a, c, g, or t
  misc_feature (3516)..(3516): n is a, c, g, or t
  misc_feature (3518)..(3518): n is a, c, g, or t
  misc_feature (3520)..(3520): n is a, c, g, or t
  misc_feature (3522)..(3522): n is a, c, g, or t
  misc_feature (3524)..(3525): n is a, c, g, or t
  misc_feature (3527)..(3528): n is a, c, g, or t
  misc_feature (3530)..(3530): n is a, c, g, or t
  misc_feature (3532)..(3534): n is a, c, g, or t
  misc_feature (3536)..(3537): n is a, c, g, or t
  misc_feature (3539)..(3540): n is a, c, g, or t
  misc_feature (3543)..(3549): n is a, c, g, or t
  misc_feature (3551)..(3551): n is a, c, g, or t
  misc_feature (3553)..(3556): n is a, c, g, or t
  misc_feature (3559)..(3563): n is a, c, g, or t
  misc_feature (3565)..(3565): n is a, c, g, or t
  misc_feature (3567)..(3568): n is a, c, g, or t
  misc_feature (3570)..(3571): n is a, c, g, or t
  misc_feature (3573)..(3574): n is a, c, g, or t
  misc_feature (3577)..(3577): n is a, c, g, or t
  misc_feature (3579)..(3580): n is a, c, g, or t
  misc_feature (3583)..(3584): n is a, c, g, or t
  misc_feature (3586)..(3597): n is a, c, g, or t
  misc_feature (3599)..(3602): n is a, c, g, or t
  misc_feature (3604)..(3616): n is a, c, g, or t
  misc_feature (3618)..(3618): n is a, c, g, or t
  misc_feature (3620)..(3623): n is a, c, g, or t
  misc_feature (3626)..(3627): n is a, c, g, or t
  misc_feature (3629)..(3632): n is a, c, g, or t
  misc_feature (3634)..(3638): n is a, c, g, or t
  misc_feature (3640)..(3641): n is a, c, g, or t
  misc_feature (3644)..(3646): n is a, c, g, or t
  misc_feature (3648)..(3649): n is a, c, g, or t
  misc_feature (3651)..(3651): n is a, c, g, or t
  misc_feature (3654)..(3666): n is a, c, g, or t
  misc_feature (3669)..(3669): n is a, c, g, or t
  misc_feature (3671)..(3677): n is a, c, g, or t
  misc_feature (3679)..(3681): n is a, c, g, or t
  misc_feature (3683)..(3685): n is a, c, g, or t
  misc_feature (3687)..(3688): n is a, c, g, or t
  misc_feature (3691)..(3694): n is a, c, g, or t
  misc_feature (3696)..(3701): n is a, c, g, or t
  misc_feature (3704)..(3707): n is a, c, g, or t
  misc_feature (3709)..(3713): n is a, c, g, or t
  misc_feature (3715)..(3720): n is a, c, g, or t
  misc_feature (3724)..(3724): n is a, c, g, or t
  misc_feature (3727)..(3740): n is a, c, g, or t
  misc_feature (3742)..(3744): n is a, c, g, or t
  misc_feature (3746)..(3751): n is a, c, g, or t
  misc_feature (3753)..(3753): n is a, c, g, or t
  misc_feature (3755)..(3756): n is a, c, g, or t
  misc_feature (3758)..(3758): n is a, c, g, or t
  misc_feature (3760)..(3762): n is a, c, g, or t
  misc_feature (3764)..(3764): n is a, c, g, or t
  misc_feature (3766)..(3769): n is a, c, g, or t
  misc_feature (3771)..(3771): n is a, c, g, or t
  misc_feature (3773)..(3774): n is a, c, g, or t
  misc_feature (3778)..(3778): n is a, c, g, or t
  misc_feature (3780)..(3781): n is a, c, g, or t
  misc_feature (3783)..(3784): n is a, c, g, or t
  misc_feature (3786)..(3788): n is a, c, g, or t
  misc_feature (3790)..(3793): n is a, c, g, or t
  misc_feature (3795)..(3796): n is a, c, g, or t
  misc_feature (3800)..(3810): n is a, c, g, or t
  misc_feature (3812)..(3812): n is a, c, g, or t
  misc_feature (3814)..(3816): n is a, c, g, or t
  misc_feature (3818)..(3827): n is a, c, g, or t
  misc_feature (3829)..(3832): n is a, c, g, or t
  misc_feature (3835)..(3835): n is a, c, g, or t
  misc_feature (3837)..(3838): n is a, c, g, or t
  misc_feature (3840)..(3842): n is a, c, g, or t
  misc_feature (3844)..(3848): n is a, c, g, or t
  misc_feature (3851)..(3856): n is a, c, g, or t
  misc_feature (3858)..(3858): n is a, c, g, or t
  misc_feature (3860)..(3861): n is a, c, g, or t
  misc_feature (3863)..(3867): n is a, c, g, or t
  misc_feature (3869)..(3874): n is a, c, g, or t
  misc_feature (3876)..(3889): n is a, c, g, or t
  misc_feature (3892)..(3898): n is a, c, g, or t
  misc_feature (3900)..(3901): n is a, c, g, or t
  misc_feature (3903)..(3904): n is a, c, g, or t
  misc_feature (3906)..(3906): n is a, c, g, or t
  misc_feature (3908)..(3914): n is a, c, g, or t
  misc_feature (3916)..(3927): n is a, c, g, or t
  misc_feature (3929)..(3931): n is a, c, g, or t
  misc_feature (3934)..(3938): n is a, c, g, or t
  misc_feature (3940)..(3943): n is a, c, g, or t
  misc_feature (3945)..(3946): n is a, c, g, or t
  misc_feature (3948)..(3949): n is a, c, g, or t
  misc_feature (3952)..(3953): n is a, c, g, or t
  misc_feature (3955)..(3972): n is a, c, g, or t
  misc_feature (3974)..(3975): n is a, c, g, or t
  misc_feature (3977)..(3978): n is a, c, g, or t
  misc_feature (3980)..(3981): n is a, c, g, or t
  misc_feature (3984)..(3985): n is a, c, g, or t
  misc_feature (3987)..(3987): n is a, c, g, or t
  misc_feature (3989)..(3992): n is a, c, g, or t
  misc_feature (3994)..(3997): n is a, c, g, or t
  misc_feature (3999)..(3999): n is a, c, g, or t
caccccacgtgtatccccgtccacggcgaattccagtctaagctcacgctgatgtctgagtcgctccgtaacgacggccgtatctgggtgcccaagaanatcgaagacgctaagaagctccaggctggtacncttcgtcctaccgatatcaaggaggaggatcgtgactactacctcgagcgccgctatcccgccttcggtaacctcgtncctcgtgacgtcgccagccgtgctgctaaggaacgctgcgacgctggctacggtgtcaacaacacgggnctggctgtcttcctcgacttctccagcgctatcaagcgtctnggtaaggatgtcgtagaagctcgctatggtaacctcttccagatgtacgaaaagatcaccaacgacaatccctacgagacgccgatgatgatctatcccgctatccactacacgatgggtggtatctgggtggactacgagctcatgacctctgtccctggcctcttcgctatcggtgaagctaacttctccgaccacggtgctaaccgcctcggtgcttcggctctgatgcagggtctcgctgacggntacttcgtactgccctacacgatccagaactatctggctgaccagattcaggtcccccgcttcagcacggaccgtcctgagttcgacgaagcngaaaagggtatccaggatcgtatcgctcgcctgatgagcatcaagggtaagcagtccgtcgacagcctccacaagaagctcggtcacatcatgtgggacttcgtaggtatgggtcgcgagcgcgaaggcctngagaaggctatcgtcgagctcaaggctctgaagaaggagttctggagcgacgtccgtatccctggtaaggctgacgacctcaacgtggagctcgagaaggctcttcgtctggctgacttcatcgagatcggcgaacttatggctcgtgacgctcacgaccgtgaagagagctgcggtggtcacttccgcctcgagcaccagacgcccgaaggtgaagccctgcgccacgatgatcagttcgcttacgtctcctgctgggagtaccagggcgaagatcaggatcccgtccttctgaaggaacctctggactacgagttcgtcgtacgtcagcagcgtaactataagaactaaccccaagccaacatccacaatggacaagaatataaatatcaaggttaaggtctggcgtcagcgtggccccgaggtaaagggtgcgttcgaaacctacgacctgcagaatatctctcagggtagctccttcctggagatgctcgatatcctcaacgagcagctcgtacgcgaaggcaaggagcccgttgtcttcgaccacgactgccgcgaaggtatctgcggtatgtgctcgctctacatcaatgggcacccccacgggcccgatgatagcatcacgacctgtcagctgcacatgcgtcgcttcaacgatggnganacgatcaccatcgagccttggcgctcggctggcttccccatcatccgtgacctcatggtagaccgctcggcctacgacaagatcatccaggctggtggcttcgtgtcggtcaataccggtggtgtacccgatgctaacgctatccccattcctaaggctaacgccgacatggctatggacgctgctgcttgtatcggttgcggtgcctgcgctgcagcttgtaagaacggctcggctatgctcttcgtctctgctaaggtcagccagctggctctcctcccacagggtcgtgtcgaagctgcccgccgtgctaaggctatggtcgctaagatggatgagctgggcttcggtaactgtacgaacactcgtgcttgcgaagtcgaatgccccaagaacatctcgatctccaatatcgctcgtctgaaccgcgagttcctcgctgctaagttcaaggactaagctccgagacgaatccctctcttcggcctcctgtggcggcttctcccccntngcgggagaagtcatacggagccgactaccatcgctctcttcaggattcacctcctggattgaataggttagattggtgtagtatcgcccgccctcctgagcctacggctcctgaggacgggcgatcgcattataggcctctccgtacttcggtgcggggaggcttctttgtttctctgaaaggtgttgaccgtacccataggagacagttgtggtagagtcctgccctccatttagagtgctaaggcatcgtgcgcccagctccccgatacacctctccgaagtgaccgagnaagcccttcnncttatcananntattccncttatccngcgnagggaaaannnnccttctcgtnaagnaaaaagcnccttcangtnntggtttncnncnntctangnnngtngtnttaaagnctaggcacntaaatccaaatnnccangtangnaganattagancnangtacgtagcccaaacttatttnccnnnnnnnnnnaanttttnnccnnnngngnngnaannnncnnnnnnnnngnngntnnngnnaanctatnttnnnnngnnnnnnnanntnnnnnccnnnanncnnnnnnnnnnnnnntncnnngnnnnnctgnnnnnnnnnnngcngngnnnnnnnntnnntnnnnnnnnnnnnnnnnnnnnnnnnnnnnnnngnnnnnnnnnnnnnnnnnnnnnnnnnnnnnnngnnnnnnnnnnnnnngnnnnnnngnnnnnnnnnnnnnnnntnnngggncnnnnnnnnncnnnnntnnnnnnnnnnnnnnnnnnnnnnnnnnnnnnnnnnnncnntnnnnnnnnnnnnnnnnnnnnnnnnnnnnnnngnnnnntnnnnnnnnnnnnnnnnnnnnntnnnnnngnnnnnnnnnnnnnnnnnnnnnnnnnnnnnnnnnnnnnnnnnnnnnnnnnnnnnnnggnnnnnnnnnnnnnnnnnnnnnnnnnnnnnnnnnnnnnnnnnnnnnnnnnnnnnnnnnnnnnngngnnnnnnnnnnnnnnnnnnnnnnnnnnnnnnnnnngnnnnnnnnnnnnnnnnnnnnnnnnnnntnnnnnnnnnnncnnnnnnnnnnnnnnnnnnncnnnnnnnnnnnnnnnnnnnnnnnnnnnnnnnnnnnnnnnnnnnnnnnnnnnnnnnnnnnnnnnnnnnnnnnnnnnnnnnngnnnnnnnnnnnnnnnnnnnnnnnnngnnnnnnnnnnnnnnnnnnnnnnnnnnnnnnnnnnnnnnnnncnntnnnnnnnnnnnnnnnngnnnnnnnnnnnnnnnnnnnnnnnnnnnnnnnnnnnnnnnnnnnnnnnnnnngngnnnnnnnnnnnnnnnnnnnnnnnnnnnnnnnnnnnnnnnnnnnnnnnnnnnnnnnnnnnnnnnnnnnnnnnnnnnnnngnnnnnnnnnnnnnnnnnnnnnnnnnnnnnnnnnnnnnnnnnnnnnnnnnnnnnnnnnnnnnnnnnnnnnnggnnnnnnngnnnncnnnnncnnnggncnnnntanngnnnnnnnnnnnncngnnnnnnnnnnnnnngntcncntntntngnanngnngngnnngnngnngtnnnnnnngngnnnngannnnntngnnannannggngnnctnncnnnnnnnnnnnngnnnntnnnnnnnnnnnnnantnnnntcnngnnnntnnnnntnnagnnncnngnccnnnnnnnnnnnnncgnannnnnnntnnngnnngnnggnnnngnnnnnntcnnnncnnnnntnnnnnnggcnttnnnnnnnnnnnnnncnnncnnnnnntncnncngnnncngnnnngngnnggcntnngnngnnntnnnnannggcnnnnnnnnnnngngnnngnnnnnnnnnngnnnnggngnngnnntnnnnnggnnnnnngncnncnnnnncnnnnnngnnnnnnnnnnnnnngcnnnnnnngnngnngngnnnnnnntnnnnnnnnnnnngnnngcnnnnngnnnnanngnngcnncnnnnnnnnnnnnnnnnnncnncnngnncanngngnnnngnnnngng

SEQ ID NO: 422 - DNA, 4000 bp, Escherichia coli
  misc_feature (2288)..(2288): n is a, c, g, or t
  misc_feature (2594)..(2594): n is a, c, g, or t
  misc_feature (3321)..(3321): n is a, c, g, or t
  misc_feature (3327)..(3327): n is a, c, g, or t
  misc_feature (3597)..(3597): n is a, c, g, or t
  misc_feature (3913)..(3913): n is a, c, g, or t
  misc_feature (3928)..(3928): n is a, c, g, or t
  misc_feature (3955)..(3955): n is a, c, g, or t
  misc_feature (3976)..(3976): n is a, c, g, or t
  misc_feature (3979)..(3979): n is a, c, g, or t
ttagcactgggtcatcaattatgcctcagaaaaaaaatcctgacgctgcggagttaattcgggctaaagttggacgcattacaggatcattagtggggcttttaatggttatgaaaggccttccgctagcgtattcaaaggatatgcaagaagataaagagcaagtatttgatgcatccgatagccttatgttggcacttgcagctatgactggaatgatatcagatatggagcctaatgttgcatctcttgaaacagctgctgcatcaggattttcaacagcgactgatttggctgattggttggttcgagatttagggatgccatttagagaagcccatcacattactggtgctttggtcgcaaaagcagaggagaaaggatgtgatctccccgacttaagtctagcagatatgcaaattgtaaatgaaagaattaatgctgatgtatttaattttctaggcgttcaaaactctgtggcaagccgccaaagttatggtgggacagcacctaaacaagtgcgaaaacaaatagctcgatggaggaagattttatcatgatctataagttactttttgcattgtttttaatttcaagtttaaatgcttgtggaataaaaggtgaccctttgcctattgatgaggagatatcatgtctttcttgcgagtaatttatttaggttttgcaatattgggtggtattaaacccatgatgcattttttagcatggtttaatgaatttggttattcatgggcaggcattgtttctgcttggactataaacgaagcatcacgtggtttaatgtgggatttaacaatttcagcatgtgtattaattatttggatagcttcagaggtagtgcctcgtaaagattggtgggttctactagtgtgcattgttgcaacctttggaattggtgtttcgtgtggtttaccactatatttattcttgcgttcgcgctctattaagtaggtaactatggatcattttatataccgtaatggcgttttgcatgcagaagatgttgctataacagaaatcgcagcttcagttggtacacctttttatgtttattcgcaggcgacattaacgcggcactttagggtatttgatgaagctttaagcggattgaaacatcttatttgttatgcaatgaaagcaaactcaaatattgctatactaaagatcttaggagatttgggtgctggaatggacgttgtttcgggcggtgagtatttacgagctaaagcagcaggcgttcctggaaatagaattgtgttttcgggagttggaaaaactcgtgaagaaatggcattagcaattaaaaatggaattcgccaatttaatgtcgaaagcgaaacagaattaaaagtgttaaatgaagtggctctgtcactatgtgcaatagctccaataacattgcgtgtgaacccagatgttgatgcaaaaacacacgctaaaatagctacaggtaaatctgaaaataagtttggtattcccattgcaaagtcacaagaggtctatgctttagccgcatcaatggaaggcatcgaagttgttggtattgatgttcatataggctcacaattaacagacttggaaccatttaggttagcgtatgagaaagttgctgaattgacaaaaacgctaaggcaagatggtcataatattaggcgtttagatttaggtggtggattgggtataccttatgaaaattcaaaccaatcaccaccaacacctgaagattatgcaaaagttattcatgaaactgttggtaatcttgattgtgaaattgaaatagaaccaggcaggttattagcaggaaatgctggcttaatgatttcgtctgttatttataataagtctggtgaaggacgagattttatgattgtcgatgctgctatgaatgatcttattcgacctgctatgtatgaagcatatcatgaaattattcctgtgcttgagtctaatgcgcagtctaagacaagtgattatgatgtagttggtccagtatgcgaaactggtgatacattcgcaaaaaaaagaactctaacttcagttgctgatggtgaaatggttgcatttagatctgcaggtgcatatggagccgttatggcctctgaatacaacacgaggccactaataccggaagtgttggttcatgaagaccaattttctataattagaaaacgccctagcgttgaatccataattaagagagatcttatacctgattggctttaaatttttttattgaaatttattattctagattaaataatttattnatatttggaacaataaattttgtgtaactgtttcttgtgtttgtataaatatttgtgacttttaatctataaatttccaatggttttttagtttgtggtacatgtttggatatcacaggagataaaatataaattcctgttgtacttagcattataagcaatgttgcaataataatttttgaaccactatttttataggattttttgtttttatttgaaggcctacctttatttttttttacagcaagttttgttatagaattattttcttctattttgaggttaagcttttgcatgtcttttttngatattttaagtcttttagtagagcgacttccatttttatttaaattttttctattttttgcatatgttgcttcttctcgaagtattgattgaatgtcaggcgttatctgaggttgagacttattagatttaaagctctcttgaatggttttttcatgaacgctaggggcagtatatttccaaatttctaagcagtttgagcattctaatatatgcccatcgtttaaaattatattttcagaaatatcatattgtgcattacaatgtggacaatctatcagcatattgcgctctgttgtttctataatatgttttgtttaatttaatcacatattataagataaattaagaaattttcttttggttattattactatcctaatatgctttactttatagtccaatatagaatttcaagataaaggttgtttataaatttggcaatcacatgaggctaattatagggggtatctagttggttgttatacaatttttgttgtctttggtatttatattttcaatgtacttatcaatgacgctttttgcattattgggagctataccgtcacttttgtcgcgtaaggcaacttattgggttgtaagaaactttgctggatctgtcatatttttagcaaggattatttgtggtcttaaggttgaattaaggggcgaagttccaactggaaatgtcgtgatcgcatcaaaacatcagagtttttttgatgtnatattncatgcctactatttagaaaacgtgaattttgtaatgaaacaagaactaacctattttccaattgttgggttctatgggaaaaggcttggagtagctcctgtaaaaagaggtggtaaaggaaaggcagtttctcaaatgatgtctgggttagagaaaagtgatcaagagacacaacttgtaatttatcctcaaggaactcgtgtcgctcctggaaaagttatgccttacaaagtaggcgctgcagtggtgtgtcaacgtatgaaccgaagntgtattttggctgcaactaatgtaggaatgtattggccaaaacacagcttacttcgcaagcgaggtactgtagtattagaatatttagacgaagtaccaagcgacctacaaacaaagagctttgtaaagtacattgaagaaaatattgaaaaagcttcaaatgccttaatggaggaagctatattgaaataaggatgaaccattaatgaaatttattaaatcaataagtgaacttgagaagatttatggttctccaagtgttgcttcattaagaaaagtctctgatcatataactccaacttatcgtaaatggatncaagcatcctcattntgcaccttagcaacagttgggcctaanggtgttgatgctagtccaagnggngataattctaatgttgttcga

SEQ ID NO: 423 - DNA, 4000 bp, Escherichia coli
  misc_feature (1936)..(1936): n is a, c, g, or t
  misc_feature (1977)..(1979): n is a, c, g, or t
  misc_feature (1987)..(1987): n is a, c, g, or t
  misc_feature (2013)..(2013): n is a, c, g, or t
  misc_feature (2016)..(2016): n is a, c, g, or t
  misc_feature (3317)..(3317): n is a, c, g, or t
ggtatctgcaatatgggatgccttgtcatggcgggggacatgcaggagttcttcgtaatttccggatgcatggatatgggtggatatgatacctacttcattggaggcacttaatatgactgcacctgctccgtctccccataaaatggcattacttctatcgtcataatcggtgatggaagacatgcggtccgccccaataaccaaagcattttttgcgctattagttttgatgaatttttcggctatggttaaggcatatacaaacccagtacatactgcctgtacatcaaatgctgggcattccttgatacctaaacgtgcttgaaccgtacacgcggtacttggaaaaattttatcgggtgtcgtggtggcaagaataatcaggtcgatatcgccaggactgatattggcggaagcaatagctcgtaacgccgcctcatatgctaggtcgctagttttttcatctgggcccgcgatatgcctttctttaattcccgttctagaaacaatccattcatctgtggtgtccagacggctttctaagtctttattggttaatatggtttttggtaaataactgcccgtaccaatgattttcgcatgattcatttatttaaccgaaaactcgacttcgagttgttttttgatattctcgataattttactgtctatctcttccacagcggtggcaatagcataccgaaatccataagcatcggttccaccatgactcttaatgacgataccgttgaggccaagaaaggatgcgccattatatcttcgtgggtcaaggcgccgtttgaatgctttgaggacaggaatagctattattcccatcaacttggttagccagttacgcttaaactcttcggataaaaatcgacccatcatctgcgctaaaccttccgtggttttcaatgcaatattaccaacaaatccatcgcataccaccacatccgtagtacctttgaatatatcgttaccttcaacattaccataaaaattcaaatggctgttcttgatgagatgggctgcctgctttaccacttcattgcctttgatttcttcgctaccaatatttaataagccaatcgtcggttttttcttttttgtgtgcgccttagttaacatagagcccatgatggcaaattggaggagttgttctggcgtgcagtctgcattggctcctagatcaagcatacaagtggttcctttttggttcggaaggttggatgcaatagccggcctatcaatgccctttaaggttttaagcacaaatcgggctgttgccatcaatgcaccggtgttgcctgcgcttacacaagcatgcgcctcaccatccttcaccaagttaatagcaatgcgcatcgaggagtcttttttattttttaaagcactttggggggactcatccatcaacacaacctgagtggtagatttgatcgcaatgcgtgggtgattttctgcgttgtgcgattttagcagggcttctatgataacttgattgcccactaaaataatatgaagcttagggtaccgttttaatgcatctagcgaggcgggaatagtgacattgggtccaacatcaccacccattgcatcaatcgctattgattgtgaagtcatatagcttgattaatcaattaatccgtcttaacttcaataacctttttaccacgataaaaaccagacgggctcacatggtgtcttaaatgaacttcaccggtagtgggttctacagccaaaggttgaccagataaattatcatgcgatcgacgcatatttcttcttgatgcggacttcttacttttttgaacagccatgcttactccttaagcctatatatttattaggatactacgttgaaaaattaatgccggattttatcacaaaatcccttttttttgctaataaagattaataaccttttgcnctatagtatttgctaaatttagcatcatggtataattgaannntgacttantgctaatactgcactgacaattagcnctnatcatacaacaaacgaaggaaacctgtttttgatccaaaaaatattaatagcaaatcgaggggaaattgcggtccgaataattagggcatgcaaggaaatgggtatcacgagtgttgctattttctcggaagccgatcgtcatgcattgcatgtgaaaaaagctgatgagtcctatcgcatcggtagtgatcctttatcaggctatttaaatgcgcaccgcattgtcaatactgcagtcaccgcacgatgcgatgcaatccaccccggctatggttttctttctgaaaatcccgagttggctgcgatttgtaaacgaagaggcatcaaatttattggtcctgacgatagcgtaatctctcgtatgggagataaagtcgaggcaagaaaagctatgattgaggcgggagtcccggttattcctggcagtgaaggtaatataaaagatctcgatgaggcggtggtgattgccaaatccattggttaccctgtaatgctcaaagccactaatggtgggggtggtcgtggtatcaggcgttgcgataatgaaaaagaattattgtcaaattatgatcgagtgatctctgaggctaccaaagcatttggaagccctgagctttttattgagaaatgcgttgtaacaccgaagcatattgaggtgcaaattttagccgatcaaaaaggtcatgccattcatttgtatgagcgagactgctctattcaaagaagaaatcaaaaattgattgaaatagccccctctccccagttgtctgaagaccaaagaaattatattggtgatttggcagtcaaggcggcgaaagcggtcaattatgaaaatgccggtacggtggagtttttattagatagtgaagataaattttatttcatggaaatgaatactagactgcaagtagaacataccattactgaaactattactggaatagatatcgttcaggagcagatacgcattgccagtgggatggagttaaggtattcgcaagacgaagtgagctaccgtggttttgctatcgaatttcggattaatgctgaggaccctaaacaagactttcttccctcatttgggaaaattacccgatattttgctgccggtggtcctggggtaagaacagatgcatccatttatactgggtatattattccgccctactatgactctatgtgtgcaaaattaacggtatgggctcttaactgggacgatgccataaaaagaggaagtcgtgcattaggagatatcggggtatttggggtcaaaaccaccattccgtactataaagaaatnttaaaaaatgaactgtttataaatgctaattttaatacgagctttgttgaaagccatccagagctgatcgattacgaagatgaaatgtcgcctgatattattgcagctgctattgctgcggcaattgcggcacacgaagggatataaaaaactatgaaaaaaataaatattactgaattagttctaagagacggtcatcaatgccatatagcaacccgtttgcgtactgaagacatgctccctatttgcccccagctagataatcaaaatttttggtcaatcgaagcatggggcggggcaacttttgacgcctgtgttcgatacctcaaggaagatccttgggaacggttaattaagctacgtaaagccttaccaaatagccaaattcaaatgctacttcgcggtcaaaatttattaggttataggcattattcggatgatgttgtggatctgtttgtaaaaaaagcagcggataacggggttgatgtatttagggtttttgatgccatgaacgatattcgaaatatcgaactatcaatcaagtcggttaaaaaatataaaaaacatgcacaaggcacgattagttataccacctcgcccgttcataatattgagtattttgtgaagctggctaaacaaatagaggaattaggtagtgataccttagcgattaaggatatggc

SEQ ID NO: 424 - DNA, 4000 bp, Escherichia coli
  misc_feature (4)..(4): n is a, c, g, or t
  misc_feature (13)..(13): n is a, c, g, or t
  misc_feature (15)..(15): n is a, c, g, or t
  misc_feature (17)..(18): n is a, c, g, or t
  misc_feature (25)..(26): n is a, c, g, or t
  misc_feature (28)..(28): n is a, c, g, or t
  misc_feature (30)..(30): n is a, c, g, or t
  misc_feature (34)..(34): n is a, c, g, or t
  misc_feature (37)..(38): n is a, c, g, or t
  misc_feature (40)..(40): n is a, c, g, or t
  misc_feature (48)..(49): n is a, c, g, or t
  misc_feature (51)..(52): n is a, c, g, or t
  misc_feature (55)..(56): n is a, c, g, or t
  misc_feature (58)..(58): n is a, c, g, or t
  misc_feature (60)..(64): n is a, c, g, or t
  misc_feature (70)..(70): n is a, c, g, or t
  misc_feature (74)..(74): n is a, c, g, or t
  misc_feature (76)..(80): n is a, c, g, or t
  misc_feature (82)..(85): n is a, c, g, or t
  misc_feature (88)..(88): n is a, c, g, or t
  misc_feature (92)..(92): n is a, c, g, or t
  misc_feature (95)..(97): n is a, c, g, or t
  misc_feature (99)..(99): n is a, c, g, or t
  misc_feature (102)..(102): n is a, c, g, or t
  misc_feature (111)..(113): n is a, c, g, or t
  misc_feature (115)..(115): n is a, c, g, or t
  misc_feature (119)..(120): n is a, c, g, or t
  misc_feature (127)..(128): n is a, c, g, or t
  misc_feature (133)..(134): n is a, c, g, or t
  misc_feature (143)..(143): n is a, c, g, or t
  misc_feature (146)..(146): n is a, c, g, or t
  misc_feature (150)..(150): n is a, c, g, or t
  misc_feature (155)..(155): n is a, c, g, or t
  misc_feature (158)..(159): n is a, c, g, or t
  misc_feature (168)..(168): n is a, c, g, or t
  misc_feature (175)..(176): n is a, c, g, or t
  misc_feature (178)..(178): n is a, c, g, or t
  misc_feature (181)..(181): n is a, c, g, or t
  misc_feature (188)..(188): n is a, c, g, or t
  misc_feature (190)..(190): n is a, c, g, or t
  misc_feature (194)..(194): n is a, c, g, or t
  misc_feature (198)..(198): n is a, c, g, or t
  misc_feature (200)..(200): n is a, c, g, or t
  misc_feature (202)..(202): n is a, c, g, or t
  misc_feature (204)..(204): n is a, c, g, or t
  misc_feature (206)..(206): n is a, c, g, or t
  misc_feature (214)..(214): n is a, c, g, or t
  misc_feature (217)..(217): n is a, c, g, or t
  misc_feature (221)..(221): n is a, c, g, or t
  misc_feature (223)..(224): n is a, c, g, or t
  misc_feature (227)..(228): n is a, c, g, or t
  misc_feature (230)..(230): n is a, c, g, or t
  misc_feature (232)..(232): n is a, c, g, or t
  misc_feature (238)..(239): n is a, c, g, or t
  misc_feature (241)..(241): n is a, c, g, or t
  misc_feature (247)..(247): n is a, c, g, or t
  misc_feature (249)..(249): n is a, c, g, or t
  misc_feature (253)..(253): n is a, c, g, or t
  misc_feature (255)..(256): n is a, c, g, or t
  misc_feature (265)..(265): n is a, c, g, or t
  misc_feature (268)..(268): n is a, c, g, or t
  misc_feature (271)..(271): n is a, c, g, or t
  misc_feature (273)..(273): n is a, c, g, or t
  misc_feature (277)..(277): n is a, c, g, or t
  misc_feature (284)..(284): n is a, c, g, or t
  misc_feature (286)..(286): n is a, c, g, or t
  misc_feature (289)..(289): n is a, c, g, or t
  misc_feature (291)..(291): n is a, c, g, or t
  misc_feature (293)..(293): n is a, c, g, or t
  misc_feature (295)..(296): n is a, c, g, or t
  misc_feature (298)..(298): n is a, c, g, or t
  misc_feature (307)..(307): n is a, c, g, or t
  misc_feature (310)..(310): n is a, c, g, or t
  misc_feature (312)..(312): n is a, c, g, or t
  misc_feature (316)..(317): n is a, c, g, or t
  misc_feature (319)..(320): n is a, c, g, or t
  misc_feature (324)..(325): n is a, c, g, or t
  misc_feature (331)..(331): n is a, c, g, or t
  misc_feature (334)..(337): n is a, c, g, or t
  misc_feature (340)..(341): n is a, c, g, or t
  misc_feature (345)..(345): n is a, c, g, or t
  misc_feature (347)..(347): n is a, c, g, or t
  misc_feature (350)..(350): n is a, c, g, or t
  misc_feature (352)..(353): n is a, c, g, or t
  misc_feature (355)..(356): n is a, c, g, or t
  misc_feature (358)..(358): n is a, c, g, or t
  misc_feature (361)..(361): n is a, c, g, or t
  misc_feature (365)..(365): n is a, c, g, or t
  misc_feature (367)..(367): n is a, c, g, or t
  misc_feature (373)..(374): n is a, c, g, or t
  misc_feature (379)..(379): n is a, c, g, or t
  misc_feature (383)..(383): n is a, c, g, or t
  misc_feature (385)..(387): n is a, c, g, or t
  misc_feature (394)..(394): n is a, c, g, or t
  misc_feature (478)..(478): n is a, c, g, or t
  misc_feature (493)..(493): n is a, c, g, or t
  misc_feature (529)..(529): n is a, c, g, or t
  misc_feature (536)..(537): n is a, c, g, or t
  misc_feature (552)..(552): n is a, c, g, or t
  misc_feature (604)..(604): n is a, c, g, or t
  misc_feature (616)..(616): n is a, c, g, or t
  misc_feature (649)..(649): n is a, c, g, or t
  misc_feature (652)..(652): n is a, c, g, or t
  misc_feature (667)..(667): n is a, c, g, or t
  misc_feature (676)..(676): n is a, c, g, or t
  misc_feature (679)..(679): n is a, c, g, or t
  misc_feature (685)..(685): n is a, c, g, or t
  misc_feature (689)..(689): n is a, c, g, or t
  misc_feature (691)..(691): n is a, c, g, or t
  misc_feature (700)..(700): n is a, c, g, or t
  misc_feature (742)..(742): n is a, c, g, or t
  misc_feature (748)..(748): n is a, c, g, or t
  misc_feature (757)..(757): n is a, c, g, or t
  misc_feature (769)..(769): n is a, c, g, or t
  misc_feature (805)..(805): n is a, c, g, or t
  misc_feature (810)..(810): n is a, c, g, or t
  misc_feature (820)..(821): n is a, c, g, or t
  misc_feature (823)..(823): n is a, c, g, or t
  misc_feature (826)..(826): n is a, c, g, or t
  misc_feature (832)..(832): n is a, c, g, or t
  misc_feature (841)..(841): n is a, c, g, or t
  misc_feature (844)..(844): n is a, c, g, or t
  misc_feature (847)..(849): n is a, c, g, or t
  misc_feature (859)..(859): n is a, c, g, or t
  misc_feature (862)..(862): n is a, c, g, or t
  misc_feature (868)..(868): n is a, c, g, or t
  misc_feature (901)..(901): n is a, c, g, or t
  misc_feature (916)..(916): n is a, c, g, or t
  misc_feature (919)..(919): n is a, c, g, or t
  misc_feature (931)..(932): n is a, c, g, or t
  misc_feature (940)..(940): n is a, c, g, or t
  misc_feature (961)..(961): n is a, c, g, or t
  misc_feature (964)..(964): n is a, c, g, or t
  misc_feature (973)..(973): n is a, c, g, or t
  misc_feature (982)..(982): n is a, c, g, or t
  misc_feature (985)..(985): n is a, c, g, or t
  misc_feature (1009)..(1009): n is a, c, g, or t
  misc_feature (1012)..(1012): n is a, c, g, or t
  misc_feature (1030)..(1030): n is a, c, g, or t
  misc_feature (1033)..(1033): n is a, c, g, or t
  misc_feature (1081)..(1081): n is a, c, g, or t
  misc_feature (1084)..(1084): n is a, c, g, or t
  misc_feature (1087)..(1087): n is a, c, g, or t
  misc_feature (1099)..(1099): n is a, c, g, or t
  misc_feature (1105)..(1105): n is a, c, g, or t
  misc_feature (1114)..(1114): n is a, c, g, or t
  misc_feature (1117)..(1117): n is a, c, g, or t
  misc_feature (1135)..(1135): n is a, c, g, or t
  misc_feature (1137)..(1138): n is a, c, g, or t
  misc_feature (1144)..(1144): n is a, c, g, or t
  misc_feature (1147)..(1147): n is a, c, g, or t
  misc_feature (1153)..(1153): n is a, c, g, or t
  misc_feature (1165)..(1165): n is a, c, g, or t
  misc_feature (1168)..(1168): n is a, c, g, or t
  misc_feature (1183)..(1183): n is a, c, g, or t
  misc_feature (1189)..(1189): n is a, c, g, or t
  misc_feature (1192)..(1192): n is a, c, g, or t
  misc_feature (1201)..(1201): n is a, c, g, or t
  misc_feature (1204)..(1204): n is a, c, g, or t
  misc_feature (1207)..(1207): n is a, c, g, or t
  misc_feature (1237)..(1237): n is a, c, g, or t
  misc_feature (1246)..(1246): n is a, c, g, or t
  misc_feature (1249)..(1249): n is a, c, g, or t
  misc_feature (1258)..(1258): n is a, c, g, or t
  misc_feature (1270)..(1270): n is a, c, g, or t
  misc_feature (1282)..(1283): n is a, c, g, or t
  misc_feature (1285)..(1285): n is a, c, g, or t
  misc_feature (1297)..(1297): n is a, c, g, or t
  misc_feature (1300)..(1300): n is a, c, g, or t
  misc_feature (1303)..(1303): n is a, c, g, or t
  misc_feature (1309)..(1309): n is a, c, g, or t
  misc_feature (1315)..(1315): n is a, c, g, or t
  misc_feature (1321)..(1321): n is a, c, g, or t
  misc_feature (1339)..(1339): n is a, c, g, or t
  misc_feature (1345)..(1345): n is a, c, g, or t
  misc_feature (1351)..(1351): n is a, c, g, or t
  misc_feature (1369)..(1369): n is a, c, g, or t
  misc_feature (1372)..(1372): n is a, c, g, or t
  misc_feature (1375)..(1375): n is a, c, g, or t
  misc_feature (1384)..(1384): n is a, c, g, or t
  misc_feature (1393)..(1393): n is a, c, g, or t
  misc_feature (1396)..(1396): n is a, c, g, or t
  misc_feature (1399)..(1399): n is a, c, g, or t
  misc_feature (1408)..(1408): n is a, c, g, or t
  misc_feature (1414)..(1414): n is a, c, g, or t
  misc_feature (1417)..(1417): n is a, c, g, or t
  misc_feature (1420)..(1420): n is a, c, g, or t
  misc_feature (1423)..(1423): n is a, c, g, or t
  misc_feature (1432)..(1432): n is a, c, g, or t
  misc_feature (1453)..(1453): n is a, c, g, or t
  misc_feature (1474)..(1474): n is a, c, g, or t
  misc_feature (1477)..(1477): n is a, c, g, or t
  misc_feature (1479)..(1480): n is a, c, g, or t
  misc_feature (1486)..(1486): n is a, c, g, or t
  misc_feature (1498)..(1498): n is a, c, g, or t
  misc_feature (1510)..(1510): n is a, c, g, or t
  misc_feature (1525)..(1526): n is a, c, g, or t
  misc_feature (1540)..(1540): n is a, c, g, or t
  misc_feature (1546)..(1546): n is a, c, g, or t
  misc_feature (1549)..(1549): n is a, c, g, or t
  misc_feature (1555)..(1555): n is a, c, g, or t
  misc_feature (1561)..(1561): n is a, c, g, or t
  misc_feature (1564)..(1564): n is a, c, g, or t
  misc_feature (1606)..(1606): n is a, c, g, or t
  misc_feature (1611)..(1611): n is a, c, g, or t
  misc_feature (1618)..(1618): n is a, c, g, or t
  misc_feature (1648)..(1648): n is a, c, g, or t
  misc_feature (1664)..(1666): n is a, c, g, or t
  misc_feature (1669)..(1669): n is a, c, g, or t
  misc_feature (1671)..(1671): n is a, c, g, or t
  misc_feature (1680)..(1682): n is a, c, g, or t
  misc_feature (1689)..(1689): n is a, c, g, or t
  misc_feature (1700)..(1700): n is a, c, g, or t
  misc_feature (1708)..(1708): n is a, c, g, or t
  misc_feature (1806)..(1806): n is a, c, g, or t
  misc_feature (1812)..(1812): n is a, c, g, or t
  misc_feature (1814)..(1816): n is a, c, g, or t
  misc_feature (1819)..(1819): n is a, c, g, or t
  misc_feature (1821)..(1823): n is a, c, g, or t
  misc_feature (1826)..(1826): n is a, c, g, or t
  misc_feature (1828)..(1828): n is a, c, g, or t
  misc_feature (1830)..(1830): n is a, c, g, or t
  misc_feature (1832)..(1834): n is a, c, g, or t
  misc_feature (1836)..(1836): n is a, c, g, or t
  misc_feature (1839)..(1839): n is a, c, g, or t
  misc_feature (1844)..(1844): n is a, c, g, or t
  misc_feature (1846)..(1846): n is a, c, g, or t
  misc_feature (1851)..(1851): n is a, c, g, or t
  misc_feature (1859)..(1859): n is a, c, g, or t
  misc_feature (1862)..(1862): n is a, c, g, or t
  misc_feature (1937)..(1937): n is a, c, g, or t
  misc_feature (1957)..(1958): n is a, c, g, or t
  misc_feature (1960)..(1960): n is a, c, g, or t
  misc_feature (1965)..(1965): n is a, c, g, or t
  misc_feature (1967)..(1967): n is a, c, g, or t
  misc_feature (1971)..(1971): n is a, c, g, or t
  misc_feature (1974)..(1974): n is a, c, g, or t
  misc_feature (1978)..(1978): n is a, c, g, or t
  misc_feature (1980)..(1982): n is a, c, g, or t
  misc_feature (1984)..(1985): n is a, c, g, or t
  misc_feature (1987)..(1987): n is a, c, g, or t
  misc_feature (1989)..(1989): n is a, c, g, or t
  misc_feature (1991)..(1991): n is a, c, g, or t
  misc_feature (1995)..(1995): n is a, c, g, or t
  misc_feature (1997)..(1997): n is a, c, g, or t
  misc_feature (2000)..(2002): n is a, c, g, or t
  misc_feature (2004)..(2005): n is a, c, g, or t
  misc_feature (2008)..(2008): n is a, c, g, or t
  misc_feature (2013)..(2013): n is a, c, g, or t
  misc_feature (2015)..(2015): n is a, c, g, or t
  misc_feature (2021)..(2021): n is a, c, g, or t
  misc_feature (2031)..(2031): n is a, c, g, or t
  misc_feature (2034)..(2034): n is a, c, g, or t
  misc_feature (3396)..(3397): n is a, c, g, or t
  misc_feature (3399)..(3399): n is a, c, g, or t
  misc_feature (3403)..(3404): n is a, c, g, or t
  misc_feature (3406)..(3407): n is a, c, g, or t
  misc_feature (3409)..(3409): n is a, c, g, or t
  misc_feature (3413)..(3413): n is a, c, g, or t
  misc_feature (3416)..(3418): n is a, c, g, or t
  misc_feature (3420)..(3421): n is a, c, g, or t
  misc_feature (3423)..(3423): n is a, c, g, or t
  misc_feature (3425)..(3425): n is a, c, g, or t
  misc_feature (3432)..(3432): n is a, c, g, or t
  misc_feature (3434)..(3434): n is a, c, g, or t
  misc_feature (3436)..(3436): n is a, c, g, or t
  misc_feature (3438)..(3438): n is a, c, g, or t
  misc_feature (3444)..(3446): n is a, c, g, or t
  misc_feature (3448)..(3463): n is a, c, g, or t
  misc_feature (3465)..(3470): n is a, c, g, or t
  misc_feature (3474)..(3477): n is a, c, g, or t
  misc_feature (3481)..(3481): n is a, c, g, or t
  misc_feature (3483)..(3490): n is a, c, g, or t
  misc_feature (3492)..(3492): n is a, c, g, or t
  misc_feature (3494)..(3498): n is a, c, g, or t
  misc_feature (3500)..(3502): n is a, c, g, or t
  misc_feature (3506)..(3506): n is a, c, g, or t
  misc_feature (3509)..(3510): n is a, c, g, or t
  misc_feature (3512)..(3512): n is a, c, g, or t
  misc_feature (3514)..(3515): n is a, c, g, or t
  misc_feature (3517)..(3553): n is a, c, g, or t
  misc_feature (3555)..(3555): n is a, c, g, or t
  misc_feature (3557)..(3560): n is a, c, g, or t
  misc_feature (3562)..(3562): n is a, c, g, or t
  misc_feature (3564)..(3565): n is a, c, g, or t
  misc_feature (3567)..(3571): n is a, c, g, or t
  misc_feature (3574)..(3574): n is a, c, g, or t
  misc_feature (3576)..(3576): n is a, c, g, or t
  misc_feature (3579)..(3585): n is a, c, g, or t
  misc_feature (3587)..(3587): n is a, c, g, or t
  misc_feature (3589)..(3600): n is a, c, g, or t
  misc_feature (3602)..(3607): n is a, c, g, or t
  misc_feature (3609)..(3621): n is a, c, g, or t
  misc_feature (3624)..(3630): n is a, c, g, or t
  misc_feature (3634)..(3634): n is a, c, g, or t
  misc_feature (3637)..(3640): n is a, c, g, or t
  misc_feature (3643)..(3654): n is a, c, g, or t
  misc_feature (3657)..(3657): n is a, c, g, or t
  misc_feature (3663)..(3666): n is a, c, g, or t
  misc_feature (3671)..(3699): n is a, c, g, or t
  misc_feature (3702)..(3706): n is a, c, g, or t
  misc_feature (3710)..(3712): n is a, c, g, or t
  misc_feature (3714)..(3723): n is a, c, g, or t
  misc_feature (3726)..(3729): n is a, c, g, or t
  misc_feature (3731)..(3733): n is a, c, g, or t
  misc_feature (3735)..(3736): n is a, c, g, or t
  misc_feature (3738)..(3745): n is a, c, g, or t
  misc_feature (3748)..(3749): n is a, c, g, or t
  misc_feature (3752)..(3752): n is a, c, g, or t
  misc_feature (3754)..(3756): n is a, c, g, or t
  misc_feature (3758)..(3758): n is a, c, g, or t
  misc_feature (3763)..(3773): n is a, c, g, or t
  misc_feature (3775)..(3790): n is a, c, g, or t
  misc_feature (3794)..(3798): n is a, c, g, or t
  misc_feature (3800)..(3801): n is a, c, g, or t
  misc_feature (3806)..(3807): n is a, c, g, or t
  misc_feature (3810)..(3813): n is a, c, g, or t
  misc_feature (3816)..(3820): n is a, c, g, or t
  misc_feature (3824)..(3835): n is a, c, g, or t
  misc_feature (3837)..(3837): n is a, c, g, or t
  misc_feature (3840)..(3843): n is a, c, g, or t
  misc_feature (3846)..(3846): n is a, c, g, or t
  misc_feature (3848)..(3855): n is a, c, g, or t
  misc_feature (3858)..(3865): n is a, c, g, or t
  misc_feature (3867)..(3898): n is a, c, g, or t
  misc_feature (3900)..(3900): n is a, c, g, or t
  misc_feature (3902)..(3906): n is a, c, g, or t
  misc_feature (3908)..(3917): n is a, c, g, or t
  misc_feature (3922)..(3928): n is a, c, g, or t
  misc_feature (3931)..(3939): n is a, c, g, or t
  misc_feature (3941)..(3953): n is a, c, g, or t
  misc_feature (3958)..(3963): n is a, c, g, or t
  misc_feature (3967)..(3969): n is a, c, g, or t
  misc_feature (3971)..(3971): n is a, c, g, or t
  misc_feature (3973)..(3974): n is a, c, g, or t
  misc_feature (3976)..(3976): n is a, c, g, or t
  misc_feature (3982)..(3983): n is a, c, g, or t
  misc_feature (3986)..(3986): n is a, c, g, or t
  misc_feature (3989)..(3993): n is a, c, g, or t
  misc_feature (3995)..(4000): n is a, c, g, or t
tttntttatcttntntnntatattnntngngcanctnncnatttttannannacnnangnnnnntttacngtanannnnntnnnncanccgntcnnngntantatgtgggnnncntttnncgatagnntcaanntatttatgnaangttnagtcnttnnagcgtattntaatgtnntnggnaatatcntntggnttangncncntngatttttntgnggantnntcnntngnaaaaannanggacantntcgntnnctttggtanggnttntngacntcttttncnatngngntnntncaatttatnttntncacnngnntcanncatatngannnnatnntctntnatntnntnngnagntggntnggtttnntactntatngnnncattatnaaatggaggggaaaataatctatgggaacaatcatcgtgaaacaaaaagcagcgggattgattaaaaaaggaagtccactgatnagtcagatggacctngcgcaagaacttcgcgcagatgaaggcgaagtggtnaaagttnntgaccaacaacgtcntttcttaggaatggcctatgttggattccaaaataagggagttgcgtgggtntatagccgcgangaagacgaagcgttggatgatgcgttctttagnggnatcttcaagacggcnttcgagaancgncgtgcnctcntncattcggangatacgacgactttccgtctcttcaatggggaaggcgacggntttggnggagtgacnattgactggtangacggttttatcgttgtctcttggtatagcgagggngtttntcattaccgnnanctnattttnacgcaggcnctngcnnngtttgaaggngtnaaaggngtctacgaaaagattcgtttcaagaatgaagcngacttgccagaaagncantttgtcggcggnntagaagcnccagaaccattaatcgtattnganaatggtgtnaaatacgcnacntatatgaatgaaggattgatgacnggnatcttcctagaccaacgngangtgcgcgaaacgattcgccagcgttacagtgcaggacgtaccgtattnaanacnttcagttatacnggtgcnttttctgtngcngcagcgatgggtggcgcnannaaaacnacnagcgtngacgttgccaancgnagtcttgagaagacnaaagancantttgcagtnaanggnattgacccagaaacgcaacaaatctatgtnatggacgtnttngattatttnaaatacgccgtnaagaaacagttnnantttgatacggtngtngtngatccnccaagntttgcncgtacgaagaagagaacnttctcngtggcnaaagactacggcaaactngtngcncaaatcacnccattagtngcnccnaaaggaacnctcgtnttntcnacnaacgcagcnaatgtgagcgaatctcaattncaacaaatgattgagaaaggnatncnngaagcngaaggcaatcgnaagttccgcatngtcttgaaaaaaggnntgccaagcgatttngcagtnccngtagcnacaccnctnagcgattatctcaaagttttctttattgaatttaacaactancacanctgcccnaaattcacttataagtgaattttgggcagntttcgtacgcacctcnnnctncntgcacaaannncgtcctnatgccatttcngcagcacnggaggccattagaggcaccgacatgtcattttcatcttttggcacaaatcccattgcaccgcgatttctagcagttcacttttttgcaaaaaaatccnattttntnnnaancnnnaanancntnnngnttntatancnacagnaatggggnatngcaaccaatgtgaattactgactctagggtgaaacccgtagagtcagtttgaagcttggtaggaattgagacganaggctcaatccggtgccccnntncagtngntatnaancaancnnnanngntngnaagngnttnnnannaanaacgnantttttntaaaaaagantanactataaagattgcattgcaaattaagttttgatataataccaaagtgcatgaaaatgcacatgtcggaacaccgtgggaggagaaatcttcatctccattaaaccacgcacgaaacaatcaaggaggtaatgtctcgtggctaaaaaagttgtaaaactagttaaattacaaattcctgcaggtaaagcaactccagctccaccagtaggtccagctttaggtcaagcacaagtgaacatcatgggattctgtaaagaattcaatgctcgtacagctgaccaagcaggtttaatcattccggttgtgatttcagtttatgaagaccgttcattcgacttcatctgtaaaacaccaccagcagcagtattattaaagaaagctgctaaagtagaaaaaggttcaggcgaaccaaacaagaaaaaagttgctactgtaactcgtgatcaagttagagaaattgctgaattaaaagcacctgacttaaatgcagcagacgtagaagctgctatgcgcatggtcgaaggtacagcccgttcaatgggatttgtagtagaaggctaaaaacaaatgcagcttccaaaagtccctagcacgagtgtttcactcatggactttgtgggaggtaaaaccgttaaaaccacacaataggaggaaattatacaatggcaaagaaaagcaaaaaatatttagaagccgctaaaaaaatcgattcttctaaagcttactcagttgaagaagcaatcgcattagcaaaagaaacagatttcgctaaatttgatgcatctgtagaagttgcataccgtttaggtttagatccaaagaaagctgaccaacaattacgtggagcagttgtgcttccaaacggaactggtaaaactcaacgcgtattagtattcgcaaaaggtgaaaaagctaaagaagctgaagcagctggtgcagactacgttggtgacagcgaattagctcaaaaaatccaaggcggatggtttgagttcgacgttatcgttgcaacacctgacatgatgggtgaagttggtcgtttaggtcgtgtattaggacctaaaggcttaatgccaaaccctaaaacaggtactgttacaatggacgtaactaaagctgttgaagaaatcaaagctggtaaagttacttaccgtgttgacaaagctggtaacatccacgttccaatcggtaaagtttcattctcagatgacaaattagtagaaaacttcaaaacaattcacgaaacattattacgtatcaaacctgctacagttaaaggtcaatacgtacgtaacgttgctgtgacaactactttcggccctggggttaaagtagacgtagcttctctataatttaaaannanatannannangccntgnnntnngntnttttttntnantnaaaaannnannnnnnnnnnnnnnnnannnnnntttnnnntttntnnnnnnnnanannnnnannntttnttnntntnnannnnnnnnnnnnnnnnnnnnnnnnnnnnnnnnnnnnnanannnnananngnnnnnttntnaannnnnnntntnnnnnnnnnnnntnnnnnnannnnnnnnnnnnnaannnnnnnaaanaannnnggnnnnnnnnnnnnttnaaaaannnnttttnnnnnnnnnnnnnnnnnnnnnnnnnnnnnaannnnntttnnnannnnnnnnnnaannnngnnnannannnnnnnnaannttntnnnanaaaannnnnnnnnnnannnnnnnnnnnnnnnntttnnnnntnnttttnnctnnnnttnnnnnaaannnnnnnnnnnntntannnnggntnnnnnnnnttnnnnnnnntnnnnnnnnnnnnnnnnnnnnnnnnnnnnnnnncncnnnnngnnnnnnnnnnttttnnnnnnnggnnnnnnnnntnnnnnnnnnnnnnttttnnnnnnaaannncngnnantttttnnttnaannnnntnnnnnn

SEQ ID NO: 425 - DNA, 4000 bp, Escherichia coli
  misc_feature (140)..(140): n is a, c, g, or t
  misc_feature (151)..(151): n is a, c, g, or t
  misc_feature (154)..(154): n is a, c, g, or t
  misc_feature (158)..(158): n is a, c, g, or t
  misc_feature (163)..(163): n is a, c, g, or t
  misc_feature (172)..(172): n is a, c, g, or t
  misc_feature (217)..(217): n is a, c, g, or t
  misc_feature (283)..(283): n is a, c, g, or t
  misc_feature (418)..(418): n is a, c, g, or t
  misc_feature (421)..(421): n is a, c, g, or t
  misc_feature (856)..(856): n is a, c, g, or t
  misc_feature (980)..(980): n is a, c, g, or t
  misc_feature (1051)..(1051): n is a, c, g, or t
  misc_feature (1084)..(1084): n is a, c, g, or t
  misc_feature (1191)..(1191): n is a, c, g, or t
  misc_feature (1540)..(1540): n is a, c, g, or t
  misc_feature (1987)..(1987): n is a, c, g, or t
  misc_feature (1989)..(1989): n is a, c, g, or t
  misc_feature (2052)..(2052): n is a, c, g, or t
  misc_feature (2163)..(2164): n is a, c, g, or t
  misc_feature (2975)..(2975): n is a, c, g, or t
  misc_feature (3094)..(3095): n is a, c, g, or t
  misc_feature (3122)..(3122): n is a, c, g, or t
  misc_feature (3128)..(3128): n is a, c, g, or t
  misc_feature (3134)..(3134): n is a, c, g, or t
  misc_feature (3200)..(3200): n is a, c, g, or t
  misc_feature (3212)..(3212): n is a, c, g, or t
  misc_feature (3371)..(3371): n is a, c, g, or t
  misc_feature (3543)..(3543): n is a, c, g, or t
  misc_feature (3668)..(3668): n is a, c, g, or t
  misc_feature (3671)..(3672): n is a, c, g, or t
  misc_feature (3691)..(3692): n is a, c, g, or t
  misc_feature (3695)..(3695): n is a, c, g, or t
  misc_feature (3710)..(3710): n is a, c, g, or t
  misc_feature (3712)..(3712): n is a, c, g, or t
  misc_feature (3722)..(3722): n is a, c, g, or t
  misc_feature (3725)..(3725): n is a, c, g, or t
  misc_feature (3729)..(3729): n is a, c, g, or t
  misc_feature (3761)..(3761): n is a, c, g, or t
  misc_feature (3763)..(3763): n is a, c, g, or t
  misc_feature (3766)..(3766): n is a, c, g, or t
  misc_feature (3776)..(3776): n is a, c, g, or t
  misc_feature (3794)..(3794): n is a, c, g, or t
  misc_feature (3827)..(3827): n is a, c, g, or t
gccctatccgctgttcgtggaagacgagccttcgcgcaatcagtacctgaccgtcgaggagacggccgtcctccccggcaacctcgtgaacacgctgcgcgtcgccttcaaccgcacggacatgaacgtgcggaaccggncctacccgggngtntcgntcganccggcgctntcgttcatccccggacggccgttcggcgatctgatcatcggcggnctcacgcccaccggcagccagttcgggacggagccgcgcatcccggtggtggccaaccagaagctnttcgaggtcatggacgacctggtctgggtcaagggccgccacaccctgaagacgggggtgctcgcggcgcgctacgcctgggacgacgtccaggacttccagtcgaacggcgagtacctcttcccgagcatcgcngcnttcgtggccggcacgcccagccggttcacggcgacgctgccggggtccgtgcccgaccgcgccaaccgcgcctggctcttcggcgcctatgtccaggacgacttccggatcacgccccgcctcgtgttcaacctgggcgtgcgctactcgcctcagaccgttcccgcggacgcgcagggccgcgactacaacctgcaggacgtcgtaacgggcacgcagacgacgcagggtccgctgttcaagaatccctcctggggcaacgtggcgccgcgcgtcgggttcgcctgggaccccaagggtgacgccaagatgtccatccgcggtggcttcggcgtctaccacgaccacctgctgcactacatgctgaccacccagcgcttccagcccccgctctacctcacgcgcgccatcaccaacccgagcttcccgaacgcngggccgctcaccgcgccgccgacctcgcaactgaacatccagaccgtcgactcgaacatcaagaacccccgcacgctgcagtacagcctcaccctcgagcgcgagctgttctggcgcacgacgntcagcgtcggctacgccgggctgcgaggctacaaccagctccgcgggggcagcgtgaacctggcgacgccngtcatccaggccgacgggaccccgttcttcccngcgggagcgccgcggatcaaccccgcgtgggccgacatcgacaacaagcgcgccgacggcaacctctggtacaacgcgctccaggtcggagcggtgcaccggttctnccgcggcctgcagttccagctcgcctacacgttctcgcgcacgatcgacgacggctccggatatctcttcatcgatacccgcaacagcgtcgccgatccgcagaacccgttcgacaactcccgcgagcgcgggctcgccaactaccacgtggcgcacaacttcgtcgccaacttcaccgcggacatcccggccgggaacctttcgggcgtcgcgggtgcgctcctcaagggctggcaggtcaacggcatcgtcaacctttcctcgggcaacccgttcaccccggccatcgtgggcgaccgtgcccgggccctcctgcggcgggcggggcaggagcgtccgaaccaggtnggcgacccgttctcagggacgtgcccgaacggcgcgcccgtccacaccgccgactgctggtacaacccgagtgccttcgccttgcagccggcgggcaccttcggcaacctcgggaggaacacgctgatcgggccggggctggccaacgtggacctcgcggccaccaagaacatcggcatcgggcgctcgacggtccagctccgcgtcgaggccttcaacgtcttcaatcaccccaacttcggtgccccggacacgctcgtgttctcgggcaccggcgccgacgcggacaagatcctgcccaccgcgggcaagatcttcccgaacacgctcaccacggcgcgtcagatccagctggggatgaaggtcctcttctagagcgttcctgatgtcgtggaagccaccggttggcggtggcttccacccctcaccgcgaccccgaactcgttncnaagaggagtcttgtgatgaagcggatgatggtgctgtccctgatcgcgctcgcccttgcggcncctggtcaggcgtccgacccctatctcgatctcatggccttgccgaacgacttccctgcggagggcttcgcgatcggcaacggcacgagcttctacgtgggttccttcgcnnccaccggaacgacgggccagatcctcgtgggcgacctgcggaccggaaagctctcggagctcgtgcctccgacgggcatccaggtgacgggcatgaagctcgactatcgcagcaatctcctgttcgtgtgccgcgccaccgccgggggcgccgtcgtctacgacgcgggcaccggacgccaggtccgcacctaccagttcagctccgcgcccacgttcatcaacgacgtcgtgctcacccaggacgcggcgtacttcaccgactcgcgccagcccaagctctaccgcgtcgccctcggagcgcgcggggaaccggcgcaggacttcacggtggtcccgctgcccgcggaattcgagtggccggcgggctcgggcacctacaaccccaacatcaacgggaacggaatcaccgcgagcgcgaagggagacttcctgatcgtcgtgcacaccggcaaggggacgctctaccgcgtggagacgtcgaccatgcgcgtggaccggatcacgctcagcgggggtgacgggacggaggcgggcaacggcgacagcctgatgctgtacttcaacacgctcttcgtcgtgaagaaccgccagaacaaggtcgcggtcgtccagatgtcgacggactacctctcggggacgatcgcccgctacatcacggagccgttccagtccaacccggccctgcgggtccctaccgcgatggggtacatcggcaactcgctgtacgtggtgagcggtgccctcaccggggtaccgccgtactacgtctcacggctggatttctagccgtccccggacggctcgctcangcggacgcgcgctcgtggaactccactatggcgctccacgcgcccagaccgatgccactcgccatttgcggcagctcgaccatgttgtgcgccaggaagatcaggaccgagttgtcgcnngggtccgcttgccaccagccgccatangcgccnggccanccgaccgtcccgacaccgccgcgacacgtcaagggatccgccttctccggttccatcaccacggcnacgcccatcccntatccgtggccggccgcaaacaccgaccggcccagcattcgagcggtccgacgctggtccgacgtgagctggttcgaggccatcagggcgcacgtttccgggcgcagcaggcgcacaccgtccacctctccacgaccgaggaagaggcgggcgaaggcnagatagtcgtccaacgtcgaccagagcccctgacctcccgactcgaaggtcatgtcgtcaggccgttccgagagcgcgtgcccgcccggcaccgccgtcaacgcggtcaacttcccctcggcgtcgaacccgcagaggcccgcgcggcgcgctcgcttctctcgagggacgncgaaacccgtatcgcgcatgcccagcggcctgaagacgcgccgctcgaggacaacgccgagagagacaccttcgagacgcgcgatcaggaatccgagcaggtcggtcgacagtccgtagtgaaanccnncccccggctgatcgatcannggnagggtggcgagtcgngngatccactcntcngggncgagggcattgtccatcgtccctccgagggcntnggngcaggcgcgngagatcgggccacgatgnaactcgccgtaggtgaggccggagcggtgagtnaggagatcgccgaacgtgatcggccgctccgccgcatccgtctggtccagaggaccattcgggtcgcgcaggactcgaaggcgtgcgagctcgggagccaggcgcgcgatgggttcgtccagggcaaagcggccttcgtcgtacaagatcaaggcggccacggtcgtcagcgg

SEQ ID NO: 426 - DNA, 4000 bp, Escherichia coli
  misc_feature (1)..(801): n is a, c, g, or t
  misc_feature (1991)..(1992): n is a, c, g, or t
nnnnnnnnnnnnnnnnnnnnnnnnnnnnnnnnnnnnnnnnnnnnnnnnnnnnnnnnnnnnnnnnnnnnnnnnnnnnnnnnnnnnnnnnnnnnnnnnnnnnnnnnnnnnnnnnnnnnnnnnnnnnnnnnnnnnnnnnnnnnnnnnnnnnnnnnnnnnnnnnnnnnnnnnnnnnnnnnnnnnnnnnnnnnnnnnnnnnnnnnnnnnnnnnnnnnnnnnnnnnnnnnnnnnnnnnnnnnnnnnnnnnnnnnnnnnnnnnnnnnnnnnnnnnnnnnnnnnnnnnnnnnnnnnnnnnnnnnnnnnnnnnnnnnnnnnnnnnnnnnnnnnnnnnnnnnnnnnnnnnnnnnnnnnnnnnnnnnnnnnnnnnnnnnnnnnnnnnnnnnnnnnnnnnnnnnnnnnnnnnnnnnnnnnnnnnnnnnnnnnnnnnnnnnnnnnnnnnnnnnnnnnnnnnnnnnnnnnnnnnnnnnnnnnnnnnnnnnnnnnnnnnnnnnnnnnnnnnnnnnnnnnnnnnnnnnnnnnnnnnnnnnnnnnnnnnnnnnnnnnnnnnnnnnnnnnnnnnnnnnnnnnnnnnnnnnnnnnnnnnnnnnnnnnnnnnnnnnnnnnnnnnnnnnnnnnnnnnnnnnnnnnnnnnnnnnnnnnnnnnnnnnnnnnnnnnnnnnnnnnnnnnnnnnnnnnnnnnnnnnnnnnnnnnnnnnnnnnnnnnnnnnnnnnnnnnnnnnnnnnnnnnnnnnnnnnnnnnnnnnnnnnnnnnnnnnnnnnnnnnnnnnnnnnnnnnnnnnnnnnnnnnnnnnnnnnnnnnnnnnncgcacctcagcgtcagtatcgagccagtgagccgccttcgccactggtgttcctccaaatatctacgaatttcacctctacacttggaattccactcacctctctcgaactctagactaggagttttagaggcagttccgaggttgagccccgggatttcacccctaactttctaatccgcctacgtgcgctttacgcccagtaattccgaacaacgctaaccccctccgtattaccgcggctgctggcacggagttagccggggtttctttacctgctactgtcattatcatcacaggcgaaagagctttacgaccctaaggccttcatcactcacgcggcatggctagatcaggcttgcgcccattgtctaagattccccactgctgcctcccgtaggagtctgggccgtgtctcagtcccagtgttgctgatcatcctctaaaaccagctatagatcgtaggcttggtaggccattaccccaccaactacctaatctaacgcgggccgatccaaatccgataaatctttcccccgaagggcgtataaggtattactcaccgtttccagtggctattccttagatctgggtacgttcccacgcgttactaacccgtccgccgctcactccgaagagtgcgctcgacttgcatgtgttaggcctgccgccagcgttcgttctgagccaggatcaaactctcaagttgaaaagctgttaccagcttatccttgacgttcgaacctctgcacatcacttccggttttgttcaaaaccggaaaaactgtttgttgtgcttcagtaccaaaagataccgaaagccgtccaaacagtgaagctgacactacatcatcggacataagccctagtagcgttgatatgcgaggtagatccatcgatatgaaccaaactgcccacatatctcttcagtgtcttcaattttcaaataacgttgacacaaaactcaccgaccgcgctaaactcttacctagcgcaaccgcttcattctgcctctattttgcctcaacctcgttgcgtttccgccccgccgtctcggccaccgtagcgatcatcgctgccggtgaaggggcttttacgcataccaccaaaaacccgcaacccctaaaaagcaaaaaaatgaattttcttgtgaattttttgaattttaagtgtaaacagttgtttttattnnatttttataaatccggttttttgcatatttttgatcgcccctattttcatggtcgcataatgacctgatgttagcgtccaaaccacaaatccgtgaatcgtacccacagaatccacatttcagccgcaagaatctgttaccttaacatcggttttgttttggtcgttctctgattcacgcaggatttaggatggaaaaaatgcaatttagaccactgaccgcgaaataccatgtatcaggcccccttacggtggatctgattcctttgttggcggatcaaggattcgcgaaaatcatctgcaatttgccggacggtgaaattgacgggcaaccagaccacgcaacactgtcagaagctgtgacagcctatggaatcgattttgtctatattcccgttacggtcaccgaaatgacgccccaagtggttttacaccacaccaaggcggtgatcgaaaccgaaggggctgttttggcctattgcgcaaccggtcgccgttgcagcatgttatgggcgctggaattcagcgataaatattcgcaagaccagattatgagcaaagcccgtgcgattgggtttgatttttccagcatgcgccagaaactggccgcgttccaacctctgccgtctggggtgcggttttaagccccctgttcaaaccatgtgcacaacgctagggtttccccatgaaaggagcccacacatgcacaaatttctagccagcctagctgcgagctgtattatagccagcgcagcccatgccaatgaccccgttatatacgaggtcacagaccagtcctatgatgatatcatgttcggattggaaaacgcattgatcgatgcgggtctggttattagcgaacacaaccacattgccgaaatgttggaacgcaccaaagcagacgtgggcggcaccgaaacagtgtttgttcatgccgatgtgttggggttctgttccgccgatttatcacgcaaagcgatggaggccgatccgctgaacattcgattctgcccctatcagatatttacctatcaacagacagacgacagcccgattattgtgggctatgattccctgcctgatggcgtaatgcaggatgtacagcagtttttggatcagctggcccgcgatgcgattggattggattgaccaccacatcacaaacccatctattctaaccaaaggcccgcgacagtatcgcgggcctttcgtgtatcagacgtatattcgcaggttaatgaataacggcttgatccggcgtatcgcggtccgatgttcccaaacggtcgccgatgatcaaaccatccgcgctggccgtaatgggcagggtatcgccatctttgacctcgccggccaataacatttctgccaagggatcttgcaacgcccgttggatcacccgtttcaatggtcgcgccccgaacacagggtcatatcctgcatcagccaaccaggtgcgtgcatcttgatccaacactagttcgattttgcgtcccgacaggcgtttttgcaaacgcgccaactggatatcgacaatgccccccatatcgttgcgccccaaacggtcaaagatgatgatttcatccaaacggttcaggaattcgggccggaaatgcgtacgaactgcatccatcacatcgcgtttggcatcggcactgtcggccccttcgggcagttggctaagtgcttgcgcgcccagattcgatgtcagaatgatgatggtctgtttgaaatcgacagtgcgcccttggccatcggtcaaaacaccatcatccaaaacctgcaacagcacgttgaacacatctggatgcgccttttcgacttcgtcaaacagcaccacctgataggggcggcggcgcacggcctcggtcaggaccccgccttcgtcatagccgacatagccggggggtgcaccgatcagacgcgcgaccgaatgtttttccatgaattcggacatatcaatgcgcaccatggcgctgtcatcgtcaaacagaaacgatgccaccgct

SEQ ID NO: 427 - DNA, 4000 bp, Escherichia coli
  misc_feature (1965)..(1965): n is a, c, g, or t
  misc_feature (1979)..(1981): n is a, c, g, or t
  misc_feature (1984)..(1985): n is a, c, g, or t
  misc_feature (1992)..(1992): n is a, c, g, or t
  misc_feature (1996)..(1996): n is a, c, g, or t
cctcgtcatcagggagttcgtccttcttggcatcaacaaggtgctcattcagcgactgagaggctgacgtgtgttgttgccgtatctttgacttcacgataagaccaataatcacgctgattacggtgagcacaccgaacgtaagatcgggtgcgctcgacatggagcgcagcgtggcgtatgctgactttcgcaccggtgcgccgagcgctacagatgatggcgtgcgtccgtgaacttgttgcggtgatatgggagactccaactctgactcctctccaagagcagccgtcgtcaaatgacatcgaacgtccgcgtacatgtacacaacacctgcagagttaccagcattatctgtgataccgctgacggtgaccttgtaccgtccttgcgccgggtacgggaactcaatgacccagttaccttcgtcgacgccgttgaagcagttgatattatacgattgcagctgttccggggtcacaagtacgttctgaaccgcaccagtaccgccacattgactgttcacttttttgacagtgacactcgttgaagaacagtcgatgggttcgtaaaacttgactccatagaaacgctcatctgagcttatgcgcatttgctccatgggcttgacagtgtcaacggacagggtgagcctttgatcggaaacaaactcgtgaacgcttgagatggcgagagaaggaccaccaaagcagaaattcttgactcgaacttcataagttccatccttaaaaccgctcatgagtttctcgtactgattgttcaactcccattcaaaagtacacccatcaagtcgagagctgtcacagagcaagtttttcttcttgttctgctcatctgaatcctccgccttggcggtgatccactctcctgcaccaaccttcctatactgcagacgtacaaagcgcaagcgttcattggcattcgcttcttgtgaccctgaagacggccatagattactggcatcaggattgaagacggtgagagggattgcatcctcgggctgtgacactgcggtgaaagcgtggcgagccatcgttgtagcatcaaaggcaactgaggggcactttgattcccaagtcatttcccctagcgcgatcctatcgttgcttggataacgatagagagaagactcaatgtcagcttcacacagagatagtagctcaagttgtgcgtgcttgatgacacctcgagagcttggagagactttgaggtacagcagtgtttccttcactcgttgtttaccagccaaattatctccctctacgagcatgctgacggtcccactcatatctaaactaccaaatccaacagaaaagtctgaattggcaagttcatcgccaacaggcggcgccgtctgcattgcggcagctgctgcgagagcgacatgcaaagcgtcggctccttggcctgcttttttcgcagcttcgtccttgatgcgcattatgtgtgatgacagagatgcctgcccccattcagcggcagtattgttgacgactgaagatactgaaagtccatcagcacttggtcgagcggcttcattgaacacggcttcgtgaagcgccttcatggcgagatctaacccatctctaatgcgcagtccaaactgtccgcgttcacgatacggggattcattgacgactttcagacggaaaaccgcttgctcgtccggatttaagtgtcgcctatgttcgtaatcgagctcaattcgtactccagattggcggtgcattgtgaggggttcacctgggcaaagacttctgccgcccttagtcacaaacacaggagtgccgaaacgcttgtcagtacctaccgatacgacaaacttatccccaaagtcgtcatcagcaagagagtaactggctgtcacagagccctttttgttccaagcaaagactcgttctgtggacagttgacgctcctgcgatgctgccagctcgatcccgnatccgaagacattnnnganntcgacancgancttgaatttattttcagcggagccgtcaaaggacataccgagattccaactttctccgccgagtccttccttggaagtgaacgtgaaatctagcgtttgacctcctccgctgaatgtcaacaaaatgctttcctccgccgattcaggtgacccacgaacatgcatccctgtttttgccgatgatcctgtcaatgaagccatgattcttgacgcatctgttgccgaaagatccctagtttcaccaagactatcgacagcgccatcataaagagagtggttggaaccttcgagttcacccgaaacgcacttcgatcccccacacctctgaatgtcgctagaaaggtcggcggctgcagctgaatttgaacccatctgataaagcacatcgtccgagggcgtgttgaaaatatcattgaaatgtgcatgaacggcgttgtcttttgtgtacgaaatactcaaacctggtacgtcattttcaatgaaacctaccagacgagccatattcaaatacggcaactgaatggcggggaaacccagagccaagaacccgaagtcgagtaactgaatcgcactagttctcatccattcgtttgccaattctgtagcgaggccggcagagtttgcgtccaaagcatcattgtatttagtttcgccagtttggaaatctcgctgatacagggagttttctccgaagtaaggcgttttgattctttccaactgggagaagtcttttgcgtactgcccgtcgacgccaagttcaggaatcagatacacctgcggtgctgaccacgcaagggtcctcacccatgactctatgcgagtctctagttcgttctgccaaccaaatttcatctcttcccgagtacagtgctctgcatctacgcagtcataaactaaacccgaatcgtcgttttctacggcaccagattggaccaacacctgcagtgagcggagatttggtaccacttgcgactcgattgtgtgtacattgaacaggtaggaggttggctttcgagggagccacgatatgcctacgtccgtgtacaagcacggtcggtcaggaacacctagaccaatgtcgtcgcgaagatcaagaacatcagaaagcttgtacacaagttctatgcctccgccaagaataacatcccctggacgaccaggaatcgctgggtccttgctcgacgttatagttcgcgatgtcgtcgttgtaagactccaaccgtcgtctttcttgcctgtcactgtgaatttcggctgttcaagttcttgtgcaaacttaagcttcgcttcgagtttgcctacttctacatcgacgccaaattcagcaatccagccagcgctgatttgcgaatctagtttgaactccagatcagtaccaaactcgcccgtagacttggacccagcgctgaaagctcgccgatctgagactgtaaatgaaatttcgatgtctgtaccagtgttcaacgaagcgtacgagttatcacctggtggatcgtgcacgacggtgtagaccaatccattgattggcactgttgcccaaaattggtcatcgctctcgccacttcctccgcgcaatttagcgccaaggattacaaattcacgacgaccagtgactgtggtggcgaaatatccatcatatcgatccaccatcacactgagcatgcgtctgtggttgccagcaagtcttggcggccctgcagccagcgtaattccggaagttggatcgacttcttcagcttgtggaaccaacaatcgaccatcctcgtctaaattcacctcaaaatcgcaagtttcaccgcctttaccgcggacgtgacacggtgattcagactcagcgccgatatcgtgccttatctgcacctttgtagaacctgtcttgtcttcagtgttcggaaacttttgacagcggaccaaatcacccccaattctgtgcagctcaaaaaccttgacattgacttgacgcgattgtctaacattcacatatgaggactgcgaagagccgag

SEQ ID NO: 428 - DNA, 4000 bp, Escherichia coli
  misc_feature (12)..(12): n is a, c, g, or t
  misc_feature (1990)..(1990): n is a, c, g, or t
  misc_feature (2009)..(2009): n is a, c, g, or t
cttctgtctcanattgcttcagaaatattcaatacaaagccaccagaaataccttcaggaaataaattattagaaatgatatcaaatcattatcttgagatgcttaatttttatggtgaacaacatggcaataaagttgctaggaaacacttgggttggtacatggattatataggtgtaaatcctatcgatcggagagctttacaaacagaaactgatccccaaaaagtattatcaatgatttcttccttatcagcaacggaggataatccatgccaataattgattttgctcacgtttggaatacaattccgttcccggcatttataattaattcagaatttataattattgaaggtaactcagccgctgaacaagttgttcaaacatctcataatcaaatgtctggaaaagcattaagcgtattctttggtataaattctgtagttttagaaactattaaacaagtaaaacgtgaaaattcatctttaagccaatatggtatagaagtttctacgattgatagggtgtcgtttgaatgtaatcttcatattaatccattggataagaataatgagaattatttgttaataatacaaccaaatagttttgcgcaaaaaataaatcaatcttcttcgcatcgcacatcagcaaggtctgtcactgccatggcatcaatgcttgcgcatgaaatcagaaacccgcttgctggaatttctggtgctgctcaacttttagcgatgaatgcaatagatgatgatgtagaactcgccgatatgataggacaggaaacgaaaagaattggtactttagttgatagatttgaagtattttcagacattagaccttcggtaagaaatgcatataatattcatgacgtcttagacagggctatcagatcatcatctgctggttttgcttcttcaataaagtttgaaaaacaatatgatccatcattaccaaatgcctctggggatgcggatcaaatgttgcaagtttttcaaaacatattgaaaaatgcatgtgaagcaatttcaaaagatcgtggaaaaataaaaatttgtacttcctataattctggagtgagatatacaatttctggtgaccaatcagaaatattgccattacaaattgaaataatagacaatggcagtggaattcctgataatattattaatgaaatatttgaaccttttgtatcttcaaaagttaatggcacaggtttaggattagcttttgtatcaaaaataattaccagtcacggagggttaatcgagtgtacctcacataatgctggaactaaatttattttacgtcttcctgtatcgaaaaaatcttcaaaggataaaatataatggatggaactatattagttgccgatgatgatcggacgataagaacagtattaactcaagcacttacacgcgctgggtgcaaagtaagggcaacaggaagtatagaaacattatggcgttggatagacgagggtaatggagatgtagttatatctgatgttaattttcctgatggcgatggattagaaatgttgcctgcaataaagcgcaaacgcaatgatttgccagttataattatttcagcacaaaacactgtaattactgcaataaaagcctctgaattgggtgcttatgattatttaccaaaaccatttgatctgaaaaaattactttccaaagtcaataaagctttattgaaccaaggagcagaaaaaagtgttattccccaaggtggtatagttgaacctgaattaccacttatcggttcatcaccacttatgcaggatgtatatagatttttagcgcggatcttacatactgatctttctactattattacaggtgaaagtggaactggcaaagatctattagctcgtgcaatgcatgacttaggaccacggtcggcaatggatttcgtacgtataaatatttcttcatcaaatattgataagatagagggaaccttagtaggcggnaaagaagatttaaagatanctccagcatcaaaaggggctacaatttattttgatgaaatttctgagatgtctgatgaaattcagttgcaattattagatttattacgttcagattcagttattgataaaaaatatagattaatctcatcatctagattgtcactacagaatttaattagccaaggtgtaattagggaggatttattttataggctaaatgtagtgaatataaaccttcctcctttaagagataggattggggatattcctgatttaacaaagcattttttgcaattatcagttatgttaggtcttcctcaaaaaactatatcaataaaggcaatgcaattattacaaaatgctcaatggatgggaaacatcagagaattagagaatttcattaatagattagtggttttagtgtccgatgatgagataagcgccaaccatgttgaagaaaacttaaatttaatcccatctatgaattcagatgatttagacacaagtaatggaaagctatcctcttctgttgagaggcatataaaaagatatttcgatttgcatggtgagactttaccaccaccaggattatataaccgaataatgaaagaaattgagttaccattgatagcattatcgttgtctgcaacacgtggaaatcaaataaaaacatctgaattacttggtataaatcgcaatacattaagaaagaaaatcaaagatcttgatattgtagttacaagaagtaaaaaaatgatgtaatgatgccacatagtgtagcaaatatagaactataaataattaaggcacatgatacaaaatttacttaacaaaataaaaaaatggcaaaataggcgtaaatttttagtagttatagcttggtctttaattcttcttggaccaattttaactgggctaacggtatctatattacagggagaatttggaagtaagctaagtaatattttgcgcttaatacttcttgttgatggaatttatcttttagtcgttatttcaattgttggttatgcagtaatgaaaatgtttgctgcccgaagagcaaaatctgcaggttcgcgattacacatgcgattaagtagagtttttgcgattgtagcacttattcctacagtccttgtagcagttttcgcagttgttacattaagtattggtgtagagggttggttttccaaaaatgtacaaaatgtggtgagttcgtctttatccgctgctgaagcatataagaatgaacaaagagatgacttaaagatagatttaaattttatggctgtcagattgaatgaatataaaaataccaattcattcgttagtgacagtgatctaagagttcaattaatcttgatccaaaaacttatccaaagaggactaaaagaagcctatattattgatggaaatgcaaacttaagatccagaggtgagttgagctatctatttggttatgaagagccttcggaaaaaaatatggaaattgctgagttaggtgagttgttgattatcgaagactggcccaataatgaatttagaagtttgattagattaaatagttttgaagataaatatttatatatatcaagaacagtagatggaaaaatactgaatttattagataaaacaatggaatctgccatcacatacaacactatggaatctcaacgtgaaaaaatactttggtcatatggactgttatatttaggttttgccacttttgttattctatcgtcaattttgcttggaatgctatttgcagaacgtctttctcggcctgttggacgattagctggagctgcacaaagacttggggcaggagattttgatgttaaggttatagaagaaaaaggcgatgatgagatagctatgttaagtcgtgtgtttaaccacatgacaaaacaagttaaacgtcaacgagatgatttaataacagcaaatgaatacacagaacgccggcgtagattgtttgatagcgttttatcgggtgtaactgctggagta

SEQ ID NO: 429 - DNA, 4000 bp, Escherichia coli
  misc_feature (364)..(368): n is a, c, g, or t
  misc_feature (370)..(381): n is a, c, g, or t
  misc_feature (383)..(384): n is a, c, g, or t
  misc_feature (387)..(399): n is a, c, g, or t
  misc_feature (401)..(402): n is a, c, g, or t
  misc_feature (405)..(407): n is a, c, g, or t
  misc_feature (415)..(415): n is a, c, g, or t
  misc_feature (420)..(420): n is a, c, g, or t
  misc_feature (428)..(429): n is a, c, g, or t
  misc_feature (433)..(433): n is a, c, g, or t
  misc_feature (444)..(444): n is a, c, g, or t
  misc_feature (448)..(448): n is a, c, g, or t
  misc_feature (451)..(451): n is a, c, g, or t
  misc_feature (454)..(457): n is a, c, g, or t
  misc_feature (460)..(461): n is a, c, g, or t
  misc_feature (471)..(471): n is a, c, g, or t
  misc_feature (484)..(486): n is a, c, g, or t
  misc_feature (496)..(496): n is a, c, g, or t
  misc_feature (501)..(501): n is a, c, g, or t
  misc_feature (509)..(509): n is a, c, g, or t
  misc_feature (527)..(527): n is a, c, g, or t
  misc_feature (530)..(530): n is a, c, g, or t
  misc_feature (540)..(540): n is a, c, g, or t
  misc_feature (542)..(542): n is a, c, g, or t
  misc_feature (544)..(545): n is a, c, g, or t
  misc_feature (551)..(551): n is a, c, g, or t
  misc_feature (553)..(553): n is a, c, g, or t
  misc_feature (557)..(557): n is a, c, g, or t
  misc_feature (565)..(565): n is a, c, g, or t
  misc_feature (568)..(568): n is a, c, g, or t
  misc_feature (570)..(575): n is a, c, g, or t
  misc_feature (578)..(578): n is a, c, g, or t
  misc_feature (580)..(581): n is a, c, g, or t
  misc_feature (588)..(588): n is a, c, g, or t
  misc_feature (590)..(591): n is a, c, g, or t
  misc_feature (594)..(594): n is a, c, g, or t
  misc_feature (596)..(596): n is a, c, g, or t
  misc_feature (598)..(598): n is a, c, g, or t
  misc_feature (669)..(669): n is a, c, g, or t
  misc_feature (696)..(696): n is a, c, g, or t
  misc_feature (698)..(698): n is a, c, g, or t
  misc_feature (706)..(706): n is a, c, g, or t
  misc_feature (708)..(708): n is a, c, g, or t
  misc_feature (750)..(751): n is a, c, g, or t
  misc_feature (753)..(753): n is a, c, g, or t
  misc_feature (762)..(762): n is a, c, g, or t
  misc_feature (783)..(783): n is a, c, g, or t
  misc_feature (819)..(819): n is a, c, g, or t
  misc_feature (821)..(821): n is a, c, g, or t
  misc_feature (1061)..(1061): n is a, c, g, or t
  misc_feature (1990)..(1991): n is a, c, g, or t
  misc_feature (2000)..(2000): n is a, c, g, or t
  misc_feature (2005)..(2006): n is a, c, g, or t
  misc_feature (2011)..(2012): n is a, c, g, or t
  misc_feature (2021)..(2021): n is a, c, g, or t
  misc_feature (2029)..(2030): n is a, c, g, or t
  misc_feature (2038)..(2040): n is a, c, g, or t
  misc_feature (2044)..(2044): n is a, c, g, or t
cgaagtgaagcggcgccatcggtcgcgctttgtggtgcaaaaacaccaagccagaagcttgcactacgattttcggttggagcatgaaggcgtcttaaagtcttgggccgcgcccaaaggcgtgccggagcaagctggcgttaaacggttggccatagcggttgaagaccacccggttgattacataaatttttccggtgtgattccggaaggcgagtacggcgcgggcacggtggagatttgggacaaaggcaaatggcagacactggacggtagtttggagcggggtagtatgaaatttaatctggccggtaaaaagttaaaaggggaatacgtgttagtgaaattgaaagacaaaaagaannnnntnnnnnnnnnnnnannatnnnnnnnnnnnnngnnggnnnaaaggggnttggnttttaaannttanccaaccccaancccnccntgnnnnggnnggggtaaatnaaattttcccccnnntaagggggantaaangggggttnattgaaaaaaaataaaanaanaaaaaattancnannaaattngntttnaaaaaaanggncnnnnnnttnannaaaaaanannacntngncggaaaagaaattatggaaagattttttaaaaaatcataaatataaatttactcgccagaaaccgattaanaattatattgttgatttttattgctcngnattagggntngtgattgaagttgacggcacgacacatttggataaaaaaganntnttatacganaaaaaacgaactgccgacttngcaaaatacggtttaaaaattttgcgtttttggaanancgacattttaaacggagcgcatgttgttggagaaataatagataatgaaataaatagaataacccactccagccctcccttgtcagggaggaagtaaacttgtcttttatctaatattaaattaaaaaagctgggaaacttgcttttttattgtttttatgctaatgtattaaattctttccagaggggaaagatcccaaacctcgggtagaggtggacattaaaaatgggcttttagcntgaaaggagcaataaaatggatcatcatcaggtaagtattgaggaagtcgcaagggtggtttacggcatggggtcagaagcattttctaaattagccgggcaattgccgaaagttggcgttaaatttggctggcagaccttgggtcactttgagctcttcttaaaccagctcaatcccgaggagcgagaagcggtgatacgcggcgataggaaactgaccaccgaagaagtgattcgccttctgattgaccaaaacggccgcggcatacctgcgcatctcggcattaagagtgatgcaaaggatgagaatgcaatcttcacgatcaagcagcttacaaacaactacggtgaaattcgcgactcctatgttgaagcatttgccgactttccggagctgaaatttctttcggcgtctgaatttgaggaccggtcggaaaagaaaaaggaaatgctcctcgcggatggactaatctccaacttagtcagacgggcacacatgccgattcctaccccgtattttgtcgtgaacgactacggcaagggcaaggcgctacaggaaatttttctcgcggtactggagaaaatgtataaaaaacattttcccgatcgtaacttcgaaaattataatgtggagctgaaaaaaaaagtacgtattattaaaaatactggctatgataagttcatcgcgatgatggccagcggtcctgacgcggtttggtattttccgcgggctttgcagggtttttcgatcaatgcggaacgtgaagccatgaaaattctcatcggtcgctcgttggctctttcgggagcgatttctacatcgctcgctattactggaaatgtcgtggaaatggtcggaagttttaatactcctggctatgactgcgcggcagtttcttgggggtcatccgactactcgctttacttcnnggccgatgncgacnngctcnngttcagcantactgacnncctcggcnnngcgnatggcggctattccgccggcctggtcttcctcgggtagcgcggtattcgttattcggaattttttccctggattggagttttggttttttggtctttgggaaaaacaactacggagatgtgaattatgtttcattcacatctccttttattttttaggaaattttgttaaactgattttgaaagtaggctaatgtaccataattccaaaaagattatggtcgccgaaattctatgattcttcatagggcatcagaatcttgctatcatgttttctgattaaatcggtcgattgcaagagcgtatgcgaagatcttagacgctacttgtttttttctagcgctcatcaggggcggaataaaattcagttccgcatagattttgcggggcggtgaaacggacggaagaaaacaaatttcttggaagtcatccgactactcgctttacttcaaggccaatgacgacaagctcaagttcaacaatactgacaacctcggcaaagcgaatgacaactattccgccggcctggtcttcctcgggttgagtctatagaagggcttcttaaccaagaagccccgatcttaatttaaagattttttccagccgccaatcatgcgcccgatttcctgaagctggttttgcagagcgatatattttttattatccagcatgccgatatcattagacaggcgaataaatattttcagggtatcaaattttatgctggcccggccgatatgggcagttttttcatttttaggcgcgctaccggccgcgactaagagctcaagcgtctcaataatatacatttcgcatttatttcccagcgtgtatttgtcttttttaggaaacagtttcgcgtaattataaaaagttttataaagctcatagacctttttaattacggggatttcattgttgatatagatattcatatatgagtgataaattatttagccttgatgatatttttacggcctggcgcgaattcaaaaaagacaagcaggccaagtttgatgtgcaaatttttgaaagatttttagaagacaatattttttctattcacgaagagctggaaaataaaacttatcgccataggccatatgaaacatttcatattcgcgatcctaagcatcggataatcagcaaagccgccgtccgggaccggctagtgcatcatctggtgtttagaaaactctatggcatttttaattcaagctttatttttcattcttattcttcaagaaaaaataaaggaactcatctggccgtaaaaaatctttccgattgtttgcgcggggaaagcagaaactacacgcgcccagtttatgttttaaaatgcgacatcaaaaaattttttcaaagcatttctcacaaaaaacttttacagctgattgaacgcaaaatttccgataaaaatttattatggctgattaaggaaataatcggtagtttccgcctgcctgtggaaaattttacagagacagacagagagagagagagttaaaggcagattttttagaaaagacgggcgtgccgatcggcaatatcacctcgcaaatttttgccaatatatatttgaatgaattagattggttcataaaaagagagttaaaaataaaaaattatttccgctatgccgatgattttataatcgcgcattcggacgcgagctatcttagaaaaattttatcactcattgataaatttctcaaagctgagttaaaattagaacttcatcccgataaggtttctatagagaagtttcataatggaatagattttttagggtatgttgttttacctcattataaagtactacggacaaaaaccaaaagaagaatgtttaagaaaataaaagccggcaaggaaaaaatggaaaaagggctggttaaccatgaaacatttaatcaatcgctgcaatcgtattatggaatgcttaaacattgtaatgccca

SEQ ID NO: 430 - DNA, 4000 bp, Escherichia coli
  misc_feature (4)..(6): n is a, c, g, or t
  misc_feature (8)..(8): n is a, c, g, or t
  misc_feature (10)..(11): n is a, c, g, or t
  misc_feature (13)..(13): n is a, c, g, or t
  misc_feature (15)..(19): n is a, c, g, or t
  misc_feature (23)..(23): n is a, c, g, or t
  misc_feature (25)..(28): n is a, c, g, or t
  misc_feature (30)..(30): n is a, c, g, or t
  misc_feature (32)..(40): n is a, c, g, or t
  misc_feature (42)..(45): n is a, c, g, or t
  misc_feature (47)..(49): n is a, c, g, or t
  misc_feature (51)..(53): n is a, c, g, or t
  misc_feature (55)..(55): n is a, c, g, or t
  misc_feature (57)..(63): n is a, c, g, or t
  misc_feature (65)..(65): n is a, c, g, or t
  misc_feature (68)..(69): n is a, c, g, or t
  misc_feature (71)..(72): n is a, c, g, or t
  misc_feature (74)..(76): n is a, c, g, or t
  misc_feature (78)..(81): n is a, c, g, or t
  misc_feature (83)..(86): n is a, c, g, or t
  misc_feature (89)..(89): n is a, c, g, or t
  misc_feature (92)..(97): n is a, c, g, or t
  misc_feature (100)..(105): n is a, c, g, or t
  misc_feature (107)..(107): n is a, c, g, or t
  misc_feature (109)..(110): n is a, c, g, or t
  misc_feature (113)..(124): n is a, c, g, or t
  misc_feature (126)..(128): n is a, c, g, or t
  misc_feature (133)..(135): n is a, c, g, or t
  misc_feature (137)..(141): n is a, c, g, or t
  misc_feature (144)..(145): n is a, c, g, or t
  misc_feature (147)..(153): n is a, c, g, or t
  misc_feature (156)..(157): n is a, c, g, or t
  misc_feature (159)..(162): n is a, c, g, or t
  misc_feature (164)..(164): n is a, c, g, or t
  misc_feature (166)..(172): n is a, c, g, or t
  misc_feature (174)..(181): n is a, c, g, or t
  misc_feature (183)..(184): n is a, c, g, or t
  misc_feature (186)..(190): n is a, c, g, or t
  misc_feature (192)..(192): n is a, c, g, or t
  misc_feature (194)..(194): n is a, c, g, or t
  misc_feature (196)..(196): n is a, c, g, or t
  misc_feature (198)..(199): n is a, c, g, or t
  misc_feature (201)..(206): n is a, c, g, or t
  misc_feature (208)..(216): n is a, c, g, or t
  misc_feature (219)..(227): n is a, c, g, or t
  misc_feature (229)..(234): n is a, c, g, or t
  misc_feature (236)..(238): n is a, c, g, or t
  misc_feature (240)..(247): n is a, c, g, or t
  misc_feature (249)..(255): n is a, c, g, or t
  misc_feature (257)..(259): n is a, c, g, or t
  misc_feature (264)..(265): n is a, c, g, or t
  misc_feature (269)..(276): n is a, c, g, or t
  misc_feature (278)..(290): n is a, c, g, or t
  misc_feature (294)..(294): n is a, c, g, or t
  misc_feature (296)..(297): n is a, c, g, or t
  misc_feature (299)..(301): n is a, c, g, or t
  misc_feature (304)..(308): n is a, c, g, or t
  misc_feature (311)..(312): n is a, c, g, or t
  misc_feature (314)..(314): n is a, c, g, or t
  misc_feature (317)..(318): n is a, c, g, or t
  misc_feature (320)..(320): n is a, c, g, or t
  misc_feature (322)..(327): n is a, c, g, or t
  misc_feature (330)..(332): n is a, c, g, or t
  misc_feature (335)..(341): n is a, c, g, or t
  misc_feature (343)..(344): n is a, c, g, or t
  misc_feature (347)..(349): n is a, c, g, or t
  misc_feature (351)..(353): n is a, c, g, or t
  misc_feature (355)..(359): n is a, c, g, or t
  misc_feature (361)..(363): n is a, c, g, or t
  misc_feature (368)..(368): n is a, c, g, or t
  misc_feature (370)..(370): n is a, c, g, or t
  misc_feature (372)..(372): n is a, c, g, or t
  misc_feature (374)..(376): n is a, c, g, or t
  misc_feature (378)..(380): n is a, c, g, or t
  misc_feature (383)..(386): n is a, c, g, or t
  misc_feature (388)..(399): n is a, c, g, or t
  misc_feature (401)..(405): n is a, c, g, or t
  misc_feature (407)..(409): n is a, c, g, or t
  misc_feature (411)..(412): n is a, c, g, or t
  misc_feature (416)..(423): n is a, c, g, or t
  misc_feature (425)..(437): n is a, c, g, or t
  misc_feature (440)..(440): n is a, c, g, or t
  misc_feature (442)..(447): n is a, c, g, or t
  misc_feature (449)..(450): n is a, c, g, or t
  misc_feature (452)..(454): n is a, c, g, or t
  misc_feature (456)..(469): n is a, c, g, or t
  misc_feature (471)..(473): n is a, c, g, or t
  misc_feature (476)..(478): n is a, c, g, or t
  misc_feature (481)..(481): n is a, c, g, or t
  misc_feature (483)..(490): n is a, c, g, or t
  misc_feature (494)..(495): n is a, c, g, or t
  misc_feature (497)..(497): n is a, c, g, or t
  misc_feature (499)..(503): n is a, c, g, or t
  misc_feature (505)..(520): n is a, c, g, or t
  misc_feature (522)..(522): n is a, c, g, or t
  misc_feature (524)..(525): n is a, c, g, or t
  misc_feature (527)..(530): n is a, c, g, or t
  misc_feature (532)..(533): n is a, c, g, or t
  misc_feature (535)..(535): n is a, c, g, or t
  misc_feature (537)..(538): n is a, c, g, or t
  misc_feature (540)..(540): n is a, c, g, or t
  misc_feature (543)..(546): n is a, c, g, or t
  misc_feature (548)..(548): n is a, c, g, or t
  misc_feature (550)..(550): n is a, c, g, or t
  misc_feature (552)..(557): n is a, c, g, or t
  misc_feature (559)..(566): n is a, c, g, or t
  misc_feature (569)..(569): n is a, c, g, or t
  misc_feature (572)..(572): n is a, c, g, or t
  misc_feature (574)..(577): n is a, c, g, or t
  misc_feature (579)..(580): n is a, c, g, or t
  misc_feature (582)..(590): n is a, c, g, or t
  misc_feature (593)..(593): n is a, c, g, or t
  misc_feature (595)..(600): n is a, c, g, or t
  misc_feature (602)..(603): n is a, c, g, or t
  misc_feature (605)..(605): n is a, c, g, or t
  misc_feature (607)..(609): n is a, c, g, or t
  misc_feature (611)..(612): n is a, c, g, or t
  misc_feature (614)..(620): n is a, c, g, or t
  misc_feature (622)..(629): n is a, c, g, or t
  misc_feature (631)..(631): n is a, c, g, or t
  misc_feature (633)..(644): n is a, c, g, or t
  misc_feature (646)..(647): n is a, c, g, or t
  misc_feature (649)..(650): n is a, c, g, or t
  misc_feature (652)..(654): n is a, c, g, or t
  misc_feature (656)..(657): n is a, c, g, or t
  misc_feature (659)..(659): n is a, c, g, or t
  misc_feature (661)..(663): n is a, c, g, or t
  misc_feature (666)..(671): n is a, c, g, or t
  misc_feature (674)..(675): n is a, c, g, or t
  misc_feature (677)..(687): n is a, c, g, or t
  misc_feature (689)..(699): n is a, c, g, or t
  misc_feature (701)..(712): n is a, c, g, or t
  misc_feature (714)..(717): n is a, c, g, or t
  misc_feature (719)..(722): n is a, c, g, or t
  misc_feature (724)..(725): n is a, c, g, or t
  misc_feature (727)..(732): n is a, c, g, or t
  misc_feature (735)..(736): n is a, c, g, or t
  misc_feature (739)..(740): n is a, c, g, or t
  misc_feature (742)..(746): n is a, c, g, or t
  misc_feature (748)..(750): n is a, c, g, or t
  misc_feature (752)..(754): n is a, c, g, or t
  misc_feature (756)..(758): n is a, c, g, or t
  misc_feature (761)..(765): n is a, c, g, or t
  misc_feature (768)..(772): n is a, c, g, or t
  misc_feature (774)..(775): n is a, c, g, or t
  misc_feature (777)..(779): n is a, c, g, or t
  misc_feature (782)..(783): n is a, c, g, or t
  misc_feature (785)..(786): n is a, c, g, or t
  misc_feature (788)..(789): n is a, c, g, or t
  misc_feature (791)..(795): n is a, c, g, or t
  misc_feature (797)..(797): n is a, c, g, or t
  misc_feature (801)..(801): n is a, c, g, or t
  misc_feature (803)..(804): n is a, c, g, or t
  misc_feature (806)..(812): n is a, c, g, or t
  misc_feature (815)..(815): n is a, c, g, or t
  misc_feature (818)..(819): n is a, c, g, or t
  misc_feature (822)..(831): n is a, c, g, or t
  misc_feature (833)..(834): n is a, c, g, or t
  misc_feature (836)..(837): n is a, c, g, or t
  misc_feature (839)..(840): n is a, c, g, or t
  misc_feature (842)..(846): n is a, c, g, or t
  misc_feature (848)..(849): n is a, c, g, or t
  misc_feature (853)..(858): n is a, c, g, or t
  misc_feature (861)..(871): n is a, c, g, or t
  misc_feature (873)..(873): n is a, c, g, or t
  misc_feature (875)..(876): n is a, c, g, or t
  misc_feature (878)..(881): n is a, c, g, or t
  misc_feature (883)..(885): n is a, c, g, or t
  misc_feature (887)..(887): n is a, c, g, or t
  misc_feature (890)..(891): n is a, c, g, or t
  misc_feature (893)..(896): n is a, c, g, or t
  misc_feature (898)..(900): n is a, c, g, or t
  misc_feature (902)..(903): n is a, c, g, or t
  misc_feature (905)..(906): n is a, c, g, or t
  misc_feature (909)..(910): n is a, c, g, or t
  misc_feature (912)..(918): n is a, c, g, or t
  misc_feature (921)..(921): n is a, c, g, or t
  misc_feature (923)..(928): n is a, c, g, or t
  misc_feature (930)..(932): n is a, c, g, or t
  misc_feature (935)..(942): n is a, c, g, or t
  misc_feature (945)..(945): n is a, c, g, or t
  misc_feature (947)..(948): n is a, c, g, or t
  misc_feature (950)..(951): n is a, c, g, or t
  misc_feature (953)..(953): n is a, c, g, or t
  misc_feature (955)..(957): n is a, c, g, or t
  misc_feature (959)..(962): n is a, c, g, or t
  misc_feature (965)..(966): n is a, c, g, or t
  misc_feature (968)..(975): n is a, c, g, or t
  misc_feature (977)..(978): n is a, c, g, or t
  misc_feature (981)..(981): n is a, c, g, or t
  misc_feature (983)..(985): n is a, c, g, or t
  misc_feature (987)..(987): n is a, c, g, or t
  misc_feature (989)..(992): n is a, c, g, or t
  misc_feature (994)..(997): n is a, c, g, or t
  misc_feature (999)..(999): n is a, c, g, or t
  misc_feature (1001)..(1002): n is a, c, g, or t
  misc_feature (1004)..(1005): n is a, c, g, or t
  misc_feature (1007)..(1017): n is a, c, g, or t
  misc_feature (1019)..(1023): n is a, c, g, or t
  misc_feature (1025)..(1028): n is a, c, g, or t
  misc_feature (1030)..(1039): n is a, c, g, or t
  misc_feature (1041)..(1046): n is a, c, g, or t
  misc_feature (1049)..(1049): n is a, c, g, or t
  misc_feature (1051)..(1053): n is a, c, g, or t
  misc_feature (1055)..(1065): n is a, c, g, or t
  misc_feature (1067)..(1070): n is a, c, g, or t
  misc_feature (1072)..(1076): n is a, c, g, or t
  misc_feature (1079)..(1081): n is a, c, g, or t
  misc_feature (1083)..(1083): n is a, c, g, or t
  misc_feature (1085)..(1092): n is a, c, g, or t
  misc_feature (1095)..(1097): n is a, c, g, or t
  misc_feature (1099)..(1101): n is a, c, g, or t
  misc_feature (1103)..(1105): n is a, c, g, or t
  misc_feature (1107)..(1110): n is a, c, g, or t
  misc_feature (1112)..(1123): n is a, c, g, or t
  misc_feature (1125)..(1125): n is a, c, g, or t
  misc_feature (1127)..(1127): n is a, c, g, or t
  misc_feature (1129)..(1132): n is a, c, g, or t
  misc_feature (1134)..(1134): n is a, c, g, or t
  misc_feature (1137)..(1140): n is a, c, g, or t
  misc_feature (1142)..(1148): n is a, c, g, or t
  misc_feature (1150)..(1157): n is a, c, g, or t
  misc_feature (1159)..(1177): n is a, c, g, or t
  misc_feature (1179)..(1181): n is a, c, g, or t
  misc_feature (1187)..(1187): n is a, c, g, or t
  misc_feature (1189)..(1190): n is a, c, g, or t
  misc_feature (1194)..(1196): n is a, c, g, or t
  misc_feature (1198)..(1198): n is a, c, g, or t
  misc_feature (1200)..(1200): n is a, c, g, or t
  misc_feature (1202)..(1203): n is a, c, g, or t
  misc_feature (1206)..(1207): n is a, c, g, or t
  misc_feature (1209)..(1210): n is a, c, g, or t
  misc_feature (1212)..(1213): n is a, c, g, or t
  misc_feature (1215)..(1216): n is a, c, g, or t
  misc_feature (1218)..(1221): n is a, c, g, or t
  misc_feature (1224)..(1224): n is a, c, g, or t
  misc_feature (1226)..(1228): n is a, c, g, or t
  misc_feature (1231)..(1233): n is a, c, g, or t
  misc_feature (1235)..(1239): n is a, c, g, or t
  misc_feature (1242)..(1266): n is a, c, g, or t
  misc_feature (1268)..(1275): n is a, c, g, or t
  misc_feature (1277)..(1278): n is a, c, g, or t
  misc_feature (1280)..(1285): n is a, c, g, or t
  misc_feature (1287)..(1288): n is a, c, g, or t
  misc_feature (1290)..(1290): n is a, c, g, or t
  misc_feature (1292)..(1292): n is a, c, g, or t
  misc_feature (1294)..(1309): n is a, c, g, or t
  misc_feature (1311)..(1312): n is a, c, g, or t
  misc_feature (1315)..(1319): n is a, c, g, or t
  misc_feature (1322)..(1323): n is a, c, g, or t
  misc_feature (1325)..(1327): n is a, c, g, or t
  misc_feature (1329)..(1338): n is a, c, g, or t
  misc_feature (1342)..(1342): n is a, c, g, or t
  misc_feature (1345)..(1345): n is a, c, g, or t
  misc_feature (1348)..(1348): n is a, c, g, or t
  misc_feature (1350)..(1351): n is a, c, g, or t
  misc_feature (1353)..(1354): n is a, c, g, or t
  misc_feature (1356)..(1356): n is a, c, g, or t
  misc_feature (1359)..(1359): n is a, c, g, or t
  misc_feature (1361)..(1361): n is a, c, g, or t
  misc_feature (1364)..(1365): n is a, c, g, or t
  misc_feature (1367)..(1369): n is a, c, g, or t
  misc_feature (1371)..(1371): n is a, c, g, or t
  misc_feature (1373)..(1376): n is a, c, g, or t
  misc_feature (1378)..(1379): n is a, c, g, or t
  misc_feature (1381)..(1381): n is a, c, g, or t
  misc_feature (1383)..(1384): n is a, c, g, or t
  misc_feature (1386)..(1388): n is a, c, g, or t
  misc_feature (1390)..(1390): n is a, c, g, or t
  misc_feature (1393)..(1395): n is a, c, g, or t
  misc_feature (1397)..(1400): n is a, c, g, or t
  misc_feature (1404)..(1418): n is a, c, g, or t
  misc_feature (1420)..(1422): n is a, c, g, or t
  misc_feature (1424)..(1432): n is a, c, g, or t
  misc_feature (1435)..(1436): n is a, c, g, or t
  misc_feature (1439)..(1439): n is a, c, g, or t
  misc_feature (1442)..(1442): n is a, c, g, or t
  misc_feature (1444)..(1445): n is a, c, g, or t
  misc_feature (1447)..(1449): n is a, c, g, or t
  misc_feature (1452)..(1453): n is a, c, g, or t
  misc_feature (1455)..(1456): n is a, c, g, or t
  misc_feature (1458)..(1460): n is a, c, g, or t
  misc_feature (1462)..(1466): n is a, c, g, or t
  misc_feature (1470)..(1479): n is a, c, g, or t
  misc_feature (1484)..(1485): n is a, c, g, or t
  misc_feature (1487)..(1489): n is a, c, g, or t
  misc_feature (1492)..(1494): n is a, c, g, or t
  misc_feature (1496)..(1500): n is a, c, g, or t
  misc_feature (1502)..(1506): n is a, c, g, or t
  misc_feature (1508)..(1509): n is a, c, g, or t
  misc_feature (1511)..(1512): n is a, c, g, or t
  misc_feature (1515)..(1515): n is a, c, g, or t
  misc_feature (1517)..(1520): n is a, c, g, or t
  misc_feature (1523)..(1523): n is a, c, g, or t
  misc_feature (1528)..(1528): n is a, c, g, or t
  misc_feature (1530)..(1531): n is a, c, g, or t
  misc_feature (1539)..(1540): n is a, c, g, or t
  misc_feature (1817)..(1817): n is a, c, g, or t
  misc_feature (1822)..(1822): n is a, c, g, or t
  misc_feature (1843)..(1843): n is a, c, g, or t
  misc_feature (1854)..(1854): n is a, c, g, or t
  misc_feature (1864)..(1864): n is a, c, g, or t
  misc_feature (1990)..(1992): n is a, c, g, or t
  misc_feature (2820)..(2820): n is a, c, g, or t
  misc_feature (3460)..(3460): n is a, c, g, or t
  misc_feature (3930)..(3930): n is a, c, g, or t
aaannntncnncntnnnnnaaangnnnntncnnnnnnnnngnnnnannntnnngncnnnnnnncnaannanncnnntnnnncnnnnaanccnnnnnnccnnnnnncnannggnnnnnnnnnnnntnnnaaaannntnnnnnaannannnnnnnaannannnntngnnnnnnnannnnnnnngnntnnnnntncngnannannnnnngnnnnnnnnnaannnnnnnnntnnnnnncnnntnnnnnnnncnnnnnnntnnnaaaanncttnnnnnnnncnnnnnnnnnnnnntttnannannnaannnnnaanncnttnngntnnnnnnaannnaannnnnnnannccnnnannntnnnnntnnnaaaangnangnnntnnnaannnnannnnnnnnnnnngnnnnngnnnanngggnnnnnnnntnnnnnnnnnnnnnaangnnnnnngnntnnnannnnnnnnnnnnnnannnaannnttncnnnnnnnnaaanncntnnnnntnnnnnnnnnnnnnnnncntnngnnnnanngntnnanggnnnncntncnnnnnnannnnnnnnggnaangnnnntnntnnnnnnnnnccnannnnnncnngntnnntnngnnnnnnnannnnnnnngncnnnnnnnnnnnnannannannncnnantnnnaannnnnnttnngnnnnnnnnnnnannnnnnnnnnntnnnnnnnnnnnntnnnngnnnngnngnnnnnnaannaanngnnnnngnnngnnnannnccnnnnnaannnnntnncnnnttnngnngnngnnnnnantttngnngnnnnnnnttnccnnttnnnnnnnnnnanntnntnnannnnnannaaannnnnnttnnnnnnnnnnnancnnannnntnnncnaanntnnnnannngnnannttnnannnnnnnttngnnnnnnannnggnnnnnnnnccntnntnncnannntnnnnttnngnnnnnnnntnnaancnnncnannnncnnnncngnngnntnnnnnnnnnnngnnnnngnnnnannnnnnnnnnannnnnnaangnnngnnnnnnnnnnngnnnngnnnnnccnnnantnnnnnnnnttnnngnnngnnntnnnntnnnnnnnnnnnnangnannnntnccnnnncnnnnnnntnnnnnnnnannnnnnnnnnnnnnnnnnnannnaaaaangnnaaannngnangnnaannannanntnntnnnnttnannnttnnngnnnnnggnnnnnnnnnnnnnnnnnnnnnnnnnannnnnnnnanngnnnnnntnngnantnnnnnnnnnnnnnnnnannaannnnnaannannntnnnnnnnnnncccnaantanannanngnaantnggnntnnntncnnnntnngngnncnnnanttnnntnnnntttnnnnnnnnnnnnnnncnnnannnnnnnnnaannttnaangnnannnttnnanntnnnannnnnaaannnnnnnnnntcccnntnnnttnnngnnnnnannnnnannannaangnnnnttntcctntnngctttccnngtatacaataaaatacaaggtactaagagaacaactcagaacttgaatattacgaaatgataaagtaaatttacagatttaagaatataaggatgaattaagggataggaaatgatttctaaatagttttgtaacacatacattatcaagcaattagaaacaggctcttaaaagggcgtcttttacattgcaaaagggcgtcttttacacttcaaaagggcatcttttgcaattcaaaagagcaccttttagaaggcaaaagagcacctattaaaanccaanagagaatttgttttacaaaangaagttctaantcaccatacnatcattaagaaacagatttcgttttcatttgaatcgacttgattccagatgagagatcatcttctaaaagactcgcatcaggaataaaattctcaaagtatacagtataaaaaaagtctggcaggnnncctgccagactttttttctttatttctcatccccctattctactcgcttgtagtgcagcacctattgctgtacagtactcggaatacttaggaataataaaccttacatcataaatcttctccattactgggaaaagaagctcacattggggcaataatgtaagattaccaatgagaacaaagtccctgatattgctgtttaatgcacttaatatagttgcagaaccaatagattgtagcactaaacctatcaatcctaaagcaatatcttcacggctagcattaccttgggcatttgcaaaaagagaagcagttgcatccattggcaaaccaggcaaaggattagttgatatatccttaatctgaagattgatacgcgagatatcacctttcatagctaaagctataatctcttttatatcatctgtcttcaacaagaggcgggacaagccactaagcgtacctcccccaataccaataccaccaatatgccgtatctcattaccatcacaaagtactagagacgtacctgtacccatagagacaacgatcattcgttgtagctttgattcatattgggcacctaagccatctgcaagaaactcatcagcttttgacgtcggaagcccataaacgggtttatcaatatagtgagcaccgacccctgtaagcataacttgctctacatcagacagatcaatcctattatcatagagatactttccaaaagctccatatagagatgttatagggtctgtagccttgatacgcataggcttcacaacctttccatcccttattccaactattttcgtcgttgaaataccnacatctattcctatggctatcttcatataccttatatattattaggtcgcaaaggtacgaaaaagttgagagttaagaatagaagcaaacagtttttgcaaaaaaagacaaaaacatttctctattaagctgaaaatgagtatctttgcactccgttatgaagagagaataaagatataaacatcaataaagaacaaaacgaaatgacgaaagcagatatcattaatgagattgcgacatctactggcatcgccaagaaggacgtttcagctgtggttgaatcttttatggacgctatcaaaaacagcttattagacaaaaaagagaacgtatacctgcgcggatttggtagctttatcgtaaagcatcgtgcagaaaagactgctcgtaacatctcaaagaatacgactattacaattccagcacatgactttccaagctttaagcctgcaaagacattcatcgaggatatgaagaaataattaaatataaatacaataacaacttaaaacattaaaagctatgccaaacggtaagaagaaaaagggacacaagatggctacgcacaagcgtaaaaagagattaagaaagaacagacataagagcaagtaagcccccattaaggctgaaagaacttatnaacagactttcaaaacatgacggggcgtgtcatcgcagaaagcttctttccctggaagtgcgacgacaggttccgttttttattacctataagtatcgtttagtattactatctatggcagatagataggcttatatcaacagatagtacggctatcaataaccattagagaagctatctgatatttatattaaaagaagaagatgacaagcgaagtaattattgatgcccaaccgaaagagatttcgatagcactacttgaggacaaacgcctggtagaatatcagcgtgaaccaagggaggctagtttctcggttggaaacatctatgtggcaaagattaaaaagcttatgccagggcttaatgcctgtttcgtagatgtaggttatgagcgtgacgcctttcttcattatctcgacttaggaagtcaattcaactcctatgcaaagtatctgaaacaggttcagagngatcgcaagaaactttatcccatacaaaaagccagtcatcagcctgatctacagaaagatggtactgtcc

SEQ ID NO: 431 - DNA, 4000 bp, Escherichia coli
  misc_feature (167)..(167): n is a, c, g, or t
  misc_feature (212)..(213): n is a, c, g, or t
  misc_feature (310)..(310): n is a, c, g, or t
  misc_feature (321)..(321): n is a, c, g, or t
  misc_feature (569)..(569): n is a, c, g, or t
  misc_feature (587)..(587): n is a, c, g, or t
  misc_feature (613)..(614): n is a, c, g, or t
  misc_feature (3200)..(3200): n is a, c, g, or t
  misc_feature (3212)..(3212): n is a, c, g, or t
  misc_feature (3930)..(3930): n is a, c, g, or t
  misc_feature (3945)..(3945): n is a, c, g, or t
  misc_feature (3996)..(3996): n is a, c, g, or t
ttcgaccccgcgagagcatcgagtgcacccgtcgccttgttcgcgaggcgggaatcttcgccggcatctcttcgggtgcatcattggccggcgcgttgaaggtggcgagtgaatggcccagcgattcagagcaagaagcggtgatcgtgttcatcgtctgcgacggnggctggaagtatctttcgacgggcgcctacaccgacgacttgganncggccgaagcccaggcggaaaaaattatctatttttagccgtcagtctttggccgtcaacgaccggcgatcagcacgatcaagccgacgacgacganggttgcacaancgagccggcgacgatggtcgtcttctttgagatatttccagccggccaaggcggcgattacgacgctcaactcgcgcaatgtggcgacaaaaccgacgggtgccaaagaaaacgcgtagaccacgagcgagtagctgacgaaagacatcagcccgcccgaaacagaagacttccatgaggcgacccaaaacgggcgaagttcgcgggcacgggtgaaaagcgcccatgcggtgatcgcgaccgcgccnctgacgaaggtgctgaangcaaacgcgacggcgttcgagtttcnngccccgtatgcgtcgatgaccgaatagatcccgattgtcaaaccgacaccgagcgccggcgagaggttggtgatcggctgactggtggccagaaaccacagaccaaagatcacgattgcgatgccggccatgctcaaagtcgagaggtcgtcgttcaaaatgagcaagccaaaaatcgccgcgcataatgcgcctgatccgcgagcgatcggatatgtcaccgagaaatcatttttttcataggcgcgggccagcaacaaaacatatggcaggtggatgcacccgctgatcgacgaccaaagccacgcgatgttcggcgtgccgtcgaccagcgaccaaacggtcaaggtcgtcgtggcgattaccccggccgaaacataaaggccccacaacgccatgaatcgatcgcctttctgtttgacggcgatgttccaactcgcgtgcagtacggcagcgacaagcgccaaaccggtagcgacaagcaccaggcgagtttaaagcatcaagcggtttatccccggatgtcggcatcgggtcgaggccacggcgtagcgttgagtcgatgaatgcgagtggcgatcgtgcgatcggcatgttcgactcgggttttggcggcttgaccgtggcgagggccgtgatcgatctgatgcccgacgagaaactcatatatataggtgacacggcgcgctacccgtacggcccgaagccggccaaagatgtgcgcgggtatgcgatcgaattggccacgagtcttgtgcacgactttgatgtcaaggtgatcgtcgtcgcctgcaacaccgccgcttcggtggccctcgaagaattgcagcggtctctggccgtgccggtaatcggcgtcgtcgcacctggcgcaaaagccttgctcgggcaaaccagaaacaggcgagtcggcgtgattggcaccacgggcactatcgactcgggagcctacgacgcggcgataaaaagtgcggcgagcgaaactggcgagtcgatcgacttggtgacgatggcgtgccccggtttcgtcgagttcgtcgagcgcgacgaaacttccgggccggcagtcacagaacttgcgcaacgactgctgaccccgatgcgcgaggccgaagtcgacgcgttgctgttgggatgcacgcattatccgtatctgcgcgatgtgatcggtcaggtcatggggtctggagtgcggcttgttgatggtgccgtcgccacggcgatcgccgttcgccagatgctttctgatcgcaaacttctcagggtcgcctcgcgcgacgaagcggcgaccagagatttttattcatccggagatgccgcgcattttgccgcattgggtcgaagattcttgggccccgaactcacgacagccaaggcgtggccgatttgaaaccgaatagatttgtcgagatacgaaagacggcagaaacatgacacgaccagacggaagacaggccgacgaattgcgcaaactcggcttcgaacgcgacttcacggagatggcggctggctcggtgttggtttcgttcggcaagaccagggtgttgtgcacggcgtcgatcgacgaagatgtgcccaggtggatgaaaggcaagggcaaaggttgggtcaccgccgaatattcgatgttgccgggtgcgacgcccgagcgcgccgatcgtgaggcggcaaagggcaagcagggcggtcgaacgatagagatacaacgtctgatcggcaggtcgttgcgttcgtgttgcgacatggcgctgctgggtgaacgacaggtgatcgtcgactgtgatgtcttgcaagccgacggcggcacccgcaccgcgagcatttgtggcgcctacattgcgttgcacgacgccctgacacgtttgcaacagaacaatttgatcgcccagcatccgctgcactcgttgtgcgccgcggtcagcgtgggcatccacaacgggcgaccgatactcgacctgccctacatcgaagacagtgccgccgaggtcgacatgaatgtggtgatgttgcagccgcacgcgggcggcgaggcgaagttcgtcgaggtgcagggcaccgccgagggtgcggccttcagccaggacgaactggcgcaactcttgggtttggcgaaagccggattgcgcgagatcttcgcgatgcagacgaaactgttggccacaaaacctgcgtcgcgaccgcaggcgaaataatttgctgcgcgtagtttgcgcctcggcgaacccgcacaaggtcgccgaaatcgcagacctggtgcgcggtctggtcgacctggttgcgcgaccgatcgatttgcacgacgtggccgagaccgaatcgacgctcatcggcaacgcgcggctgaaggcgaccgcggtttgcgaggcgacgaatcaacccgccttggccgacgacaccgggctcgaagtcgacgcgttgcacggcgagcccggcgtgttcaccgcccgtttcgccggggcaaacgcgactgatgccgagaacagggccaaacttttgctcgcacttcatggcgagaagaatcgatcggcgcgttttcgaaccgtcgccttgttggcctggcccgacggtcgcgagatcgtctgccanggtgtctgcganggtttgatcgccgaaagcgaacagggcgagcgcggctttggttacgacccggtgtttattccggctttgggtgacggacgaaccttcgcccagatgagcgtcgcagaaaagcactcgttttcgcatcgcggcatggcgtttcgcgacttgctgcgtcgactgggcgaatcaccaaccgcgtaggtcgatcgaccaacggtcgatgatttcttctccgcgcacgagccacgcgttttcgtgcatcgccattgtcgggtcgatgtgcgcgggaaccacgcgcagtttgtcgccgacggaaacattgttcgtggtcgaatctttggcgggggcgagcgtcgtgtgttcatccgagcagaacagcacgtcgaagccggccacgctcgggttgccgtggtccatgcccaatgccttcaaaccgacgtcgacgaccagccacttctggctgatcgaaatgaccgtgcccaaaacaaaacacccttgttcgaacggcagacccagtcgcgcatagtgggtgtccatcaacgcgtaagagccggcctgcaattcgttgatgcccgtttcgtcgtgcaggtcgaaggtgccggtgccgccggctgaaattatttcgccgccgacggtctttgccgcatcgacgagcagatgcatcgactcggccacgagttttcttcgtttgtcgcgaccgtcgatcatcatcaggtgaccctcgtaacccatcacncctcgcacggtcaancctgcgtgacgcgccgcgtcggcgagtcggcccgcttgttcgggcgcgacnccac

SEQ ID NO: 432 - DNA, 4000 bp, Escherichia coli
  misc_feature (1985)..(1985): n is a, c, g, or t
  misc_feature (1989)..(1989): n is a, c, g, or t
  misc_feature (2002)..(2002): n is a, c, g, or t
attcttgggatcactggtaaaatcagcatcagtataggcaataatttcctcctgttctttacatgcaattttataatttttttgtataattcaattattttataatatttattaccatcttccaatctggttttcaaaatttcttgaagcttttccttcagcaaaagtgatgtctagatgagtgcatctagccagatagattaatgaacctacagcactcttaccaatagatttgttagtggtttcatttaattgaagtttccctgtacaaagagttttggttttcttatatttgtaatgttaaatttttgttaattaattgtgtttgataaatagtataatttgtttttttctttcaatattaatacctaaaatatagtttattttatcacattttgatactttaaagttatctttaattttattaatgatattataaatatgatattttatacatttaatcaatataccatcaacataaacatcatttatataaacaactctatctccctccattttcttaaaaattttaggttctaaaataagttgaatgaaattattatttttaaggaaattggtgaaatgttgattccactaacggccggattgtttaaaactgtacaaagatttattgagtagctagtattcttttctgaagttttttgacacctggaatgtagattttcttttccaaaggagcgttctaatagacagctttattatcaattccagatggaattttgaagctaaagaaataactaattttgaactatagagactaagagtttgatagtatgtgaaatcataattaataccttttgttttaggagaagcctctagcaacgtgacgagcttcgaattttaccatatttctttcacccgtccaatagaaaagggtttaacgtcacttgataaattcttcacaaaagtcatgacatcattgtcatggaaattttgtatttcagccttcatagcattctttcaaattcttttatactaacatgcaattgttttgcttgtatgtaataggaatatcaataatagtattactattaccattagaaaatttaaaagaacagacaatatatttacagttatttattcgttcaacattttcaagaattaattttgaatttttaccattttcttgttcaataggattagctaaccttttttattaatataattaaatatattatagttaacactttcatcataataaggtgtttcattttatgtaatactgttatggcttgtttttaatattacttattctttcagtatcgaaagtataattttatgaaatataattgtcgttatatttcattatactttttaggtttgctgttttaacctcacatctttaatgcagaagaagtttgttcttcaaacacaacttcattatccaaattaatagtataattaaatttgtccataatgatatagcaatgtgattcattgttaaaacctaataatacgcctggaatacccttagtaatgaatttaactcttttctgagaatagtctttgtagtacgcaatacatccaaaaactttcagatatttacgatcaacactctttcaagagaatatttcaattaaaattctaaaatttatacctttaagaggtacgatattatataaaatgttgtctatttgtgcccattctgatgaagttcttatgctgcttgcaatgatatagttaaaacgttcaaccaatccgaggggaggaagttttaacaattcaatatattttgtcgattttcatccattcctaaaattagaaccgtatttttcccaaattaaatacaaaaatttgcatccatctaatagactttatggtattgttgttcattccggatttagtgctcaatctggccattatattatatgtaatagaagaaaaataggtgactgattctatgttaatgataagagtatcagactatctgattaggatgaaataaaaaaaaaaaaaaaagtgtnattnatatttattattntatgaaaaaataaaataaagaaaatcaattataaactcttaataataatatatattattttttttccttatatttggagtaagtgatatttaatatcaaaattttatcgaatttatatgcaataattatttcaattattgtatcaagattatgtaattaaatttatttattaatatttattattaaaaaatttaatttataaactatgtgataaattttatattataaaaagtatttatattttttcttattcataaatttacttatttattaatttattaaaaaataatttaaattttatttaataaattaatgagatgattgtcataaataaataatattaataattataataattttaataataaccaaataataatataaaacagatacaaaaattaaaaaaaaaaaaaaaaaaattaattatagaaaacatttcatttatttgccatctaattccattaaaacttttctagcagtttcctttggagcatcataaatacctaattttttttctaattcataacgttttatcatttcttcatcttgactaaaagaatgttttttctttggttttgaagtcaatttagcttttctttgttttgtacgacaatcaataattaaaccccaaagcttcaaataaaaaagttttgctcttttctctgttatatttttcgaaagaaggcatcgtcttataaattccatttctggaatattacataattgtacaccattttctttgtttggtactaaaaattctggattaatagccccatttgatgctttttctatccattgcacaacatgtttatattcccaacttgatggatcttttggatcatattctttctttttcaatggatcataactgcttttttgtgtaacttttaaggatgatgcataacgaatggtatttaaagtatgagaatagtctatacagtttgatgatacatttgcaataaaaatagttgtgcaaggacgtgtgcatgattcaatatcaaatgtttcttttaataatgttgttattttgctatttctaaaaggtatatgaatatgcttcctcagtcccatagttgatagagttcttgctctaatacattcttttaacgttaataaagaactattgatttcctttgtttcttttagtctttctttgtcatgaaattttgaatctatatttttataatacaaaaatttaatacaatcaaatttttacttcataaaaatgataaattacaaaaataattaaataaaaattaacaaacctgcatgtctttcagaacccgctaaatccactaaatatataataccatcatttgcttgattaataacagtattatgaattctaatttggcaaattgcatgacttcttgatgaagtatcattcttcaacgtagcatgtgtttttctatgagaaaatccaatattaatatatttcaataaatcgtcagaagttaagcaatcaaattcttgtacaccttttatagtcatatttctaaatttatcttcaagaataaatatttcttctttattatttaataaatcataacatcgattaccaagaatttcaaaaaatgaaacttttatttcaaatggcctattattatatgtttctaaagtatttagttgcatgtcattaataattctatccatctttttaaatagatccactgctaaatattcttcaataccagtaattgtaaatgtcttaattttatttaattttcaatttaatatagtaaatttatataaaataaagtttaaaataaaatattttaattattattattattattattattatattattattattattattttattattattatttttagtatacattttattatatactattattattaattacaaattactcttaataattattttttattaattattcgactatttattattaattattgttattattattattattattattattataaattatttctaaaaagtacctttcccgaaccagtt

SEQ ID NO: 433 - DNA, 4000 bp, Escherichia coli
  misc_feature (1959)..(1972): n is a, c, g, or t
  misc_feature (1974)..(1986): n is a, c, g, or t
  misc_feature (1988)..(1988): n is a, c, g, or t
  misc_feature (2036)..(2065): n is a, c, g, or t
  misc_feature (2113)..(2139): n is a, c, g, or t
  misc_feature (2141)..(2142): n is a, c, g, or t
  misc_feature (2190)..(2205): n is a, c, g, or t
  misc_feature (2207)..(2208): n is a, c, g, or t
  misc_feature (2210)..(2212): n is a, c, g, or t
  misc_feature (2214)..(2219): n is a, c, g, or t
  misc_feature (2267)..(2286): n is a, c, g, or t
  misc_feature (2288)..(2296): n is a, c, g, or t
  misc_feature (2344)..(2345): n is a, c, g, or t
  misc_feature (2347)..(2372): n is a, c, g, or t
  misc_feature (2421)..(2440): n is a, c, g, or t
  misc_feature (2442)..(2449): n is a, c, g, or t
  misc_feature (2451)..(2453): n is a, c, g, or t
  misc_feature (2461)..(2461): n is a, c, g, or t
  misc_feature (2464)..(2466): n is a, c, g, or t
  misc_feature (2470)..(2470): n is a, c, g, or t
  misc_feature (2473)..(2475): n is a, c, g, or t
  misc_feature (2480)..(2481): n is a, c, g, or t
  misc_feature (2485)..(2486): n is a, c, g, or t
  misc_feature (2490)..(2493): n is a, c, g, or t
  misc_feature (2497)..(2517): n is a, c, g, or t
  misc_feature (2519)..(2528): n is a, c, g, or t
  misc_feature (2530)..(2530): n is a, c, g, or t
  misc_feature (2538)..(2538): n is a, c, g, or t
  misc_feature (2542)..(2543): n is a, c, g, or t
  misc_feature (2547)..(2547): n is a, c, g, or t
  misc_feature (2550)..(2552): n is a, c, g, or t
  misc_feature (2557)..(2558): n is a, c, g, or t
  misc_feature (2562)..(2563): n is a, c, g, or t
  misc_feature (2567)..(2567): n is a, c, g, or t
  misc_feature (2570)..(2570): n is a, c, g, or t
  misc_feature (2573)..(2575): n is a, c, g, or t
  misc_feature (2577)..(2579): n is a, c, g, or t
  misc_feature (2581)..(2606): n is a, c, g, or t
  misc_feature (2610)..(2610): n is a, c, g, or t
  misc_feature (2614)..(2615): n is a, c, g, or t
  misc_feature (2617)..(2620): n is a, c, g, or t
  misc_feature (2623)..(2623): n is a, c, g, or t
  misc_feature (2626)..(2629): n is a, c, g, or t
  misc_feature (2633)..(2634): n is a, c, g, or t
  misc_feature (2638)..(2639): n is a, c, g, or t
  misc_feature (2643)..(2646): n is a, c, g, or t
  misc_feature (2649)..(2658): n is a, c, g, or t
  misc_feature (2660)..(2676): n is a, c, g, or t
  misc_feature (2678)..(2683): n is a, c, g, or t
  misc_feature (2688)..(2688): n is a, c, g, or t
  misc_feature (2690)..(2691): n is a, c, g, or t
  misc_feature (2693)..(2695): n is a, c, g, or t
  misc_feature (2700)..(2700): n is a, c, g, or t
  misc_feature (2702)..(2705): n is a, c, g, or t
  misc_feature (2710)..(2711): n is a, c, g, or t
  misc_feature (2715)..(2716): n is a, c, g, or t
  misc_feature (2720)..(2722): n is a, c, g, or t
  misc_feature (2726)..(2744): n is a, c, g, or t
  misc_feature (2746)..(2759): n is a, c, g, or t
  misc_feature (2763)..(2763): n is a, c, g, or t
  misc_feature (2765)..(2765): n is a, c, g, or t
  misc_feature (2767)..(2768): n is a, c, g, or t
  misc_feature (2770)..(2773): n is a, c, g, or t
  misc_feature (2777)..(2777): n is a, c, g, or t
  misc_feature (2779)..(2782): n is a, c, g, or t
  misc_feature (2786)..(2788): n is a, c, g, or t
  misc_feature (2791)..(2793): n is a, c, g, or t
  misc_feature (2796)..(2800): n is a, c, g, or t
  misc_feature (2802)..(2815): n is a, c, g, or t
  misc_feature (2817)..(2817): n is a, c, g, or t
  misc_feature (2819)..(2837): n is a, c, g, or t
  misc_feature (2840)..(2840): n is a, c, g, or t
  misc_feature (2842)..(2842): n is a, c, g, or t
  misc_feature (2844)..(2845): n is a, c, g, or t
  misc_feature (2847)..(2850): n is a, c, g, or t
  misc_feature (2853)..(2854): n is a, c, g, or t
  misc_feature (2856)..(2858): n is a, c, g, or t
  misc_feature (2863)..(2865): n is a, c, g, or t
  misc_feature (2868)..(2869): n is a, c, g, or t
  misc_feature (2873)..(2876): n is a, c, g, or t
  misc_feature (2879)..(2882): n is a, c, g, or t
  misc_feature (2884)..(2895): n is a, c, g, or t
  misc_feature (2897)..(2913): n is a, c, g, or t
  misc_feature (2917)..(2927): n is a, c, g, or t
  misc_feature (2930)..(2935): n is a, c, g, or t
  misc_feature (2940)..(2941): n is a, c, g, or t
  misc_feature (2945)..(2946): n is a, c, g, or t
  misc_feature (2949)..(2953): n is a, c, g, or t
  misc_feature (2956)..(2976): n is a, c, g, or t
  misc_feature (2978)..(2986): n is a, c, g, or t
  misc_feature (2988)..(2989): n is a, c, g, or t
  misc_feature (2991)..(3013): n is a, c, g, or t
  misc_feature (3015)..(3016): n is a, c, g, or t
  misc_feature (3018)..(3021): n is a, c, g, or t
  misc_feature (3023)..(3023): n is a, c, g, or t
  misc_feature (3025)..(3026): n is a, c, g, or t
  misc_feature (3028)..(3029): n is a, c, g, or t
  misc_feature (3031)..(3068): n is a, c, g, or t
  misc_feature (3070)..(3090): n is a, c, g, or t
  misc_feature (3092)..(3100): n is a, c, g, or t
  misc_feature (3102)..(3149): n is a, c, g, or t
  misc_feature (3151)..(3152): n is a, c, g, or t
  misc_feature (3154)..(3165): n is a, c, g, or t
  misc_feature (3167)..(3172): n is a, c, g, or t
  misc_feature (3175)..(3175): n is a, c, g, or t
  misc_feature (3178)..(3189): n is a, c, g, or t
  misc_feature (3191)..(3202): n is a, c, g, or t
  misc_feature (3204)..(3249): n is a, c, g, or t
  misc_feature (3251)..(3288): n is a, c, g, or t
  misc_feature (3290)..(3290): n is a, c, g, or t
  misc_feature (3292)..(3310): n is a, c, g, or t
  misc_feature (3312)..(3331): n is a, c, g, or t
  misc_feature (3333)..(3341): n is a, c, g, or t
  misc_feature (3343)..(3357): n is a, c, g, or t
  misc_feature (3359)..(3362): n is a, c, g, or t
  misc_feature (3364)..(3462): n is a, c, g, or t
  misc_feature (3464)..(3495): n is a, c, g, or t
  misc_feature (3497)..(3556): n is a, c, g, or t
  misc_feature (3558)..(3607): n is a, c, g, or t
  misc_feature (3609)..(3619): n is a, c, g, or t
  misc_feature (3621)..(3651): n is a, c, g, or t
  misc_feature (3653)..(3653): n is a, c, g, or t
  misc_feature (3655)..(3680): n is a, c, g, or t
  misc_feature (3682)..(3698): n is a, c, g, or t
  misc_feature (3700)..(3701): n is a, c, g, or t
  misc_feature (3704)..(3711): n is a, c, g, or t
  misc_feature (3713)..(3722): n is a, c, g, or t
  misc_feature (3725)..(3727): n is a, c, g, or t
  misc_feature (3729)..(3732): n is a, c, g, or t
  misc_feature (3734)..(3744): n is a, c, g, or t
  misc_feature (3747)..(3775): n is a, c, g, or t
  misc_feature (3777)..(3778): n is a, c, g, or t
  misc_feature (3781)..(3787): n is a, c, g, or t
  misc_feature (3789)..(3815): n is a, c, g, or t
  misc_feature (3817)..(3851): n is a, c, g, or t
  misc_feature (3853)..(3857): n is a, c, g, or t
  misc_feature (3859)..(3863): n is a, c, g, or t
  misc_feature (3865)..(3873): n is a, c, g, or t
  misc_feature (3875)..(3878): n is a, c, g, or t
  misc_feature (3880)..(3882): n is a, c, g, or t
  misc_feature (3884)..(3927): n is a, c, g, or t
  misc_feature (3929)..(3952): n is a, c, g, or t
  misc_feature (3954)..(3963): n is a, c, g, or t
  misc_feature (3965)..(3967): n is a, c, g, or t
  misc_feature (3969)..(3986): n is a, c, g, or t
  misc_feature (3988)..(4000): n is a, c, g, or t
gacgaggtggttgtccccttctttgaggctgtaacacgggctaatttaggacttcctattattgataaggattacagaaaaagtgaaggttggcaatttttgtttagcatgaagcagaatgaatatttcgtgttcccgaatgaaaagacaggcttcaatccgaaggaggtggatttgttgaatccggataattatgcaatgattagtccgaatttatttagggtgcagactatgtcaaaagttatgtatggaaataatgttgttcgagattataaatttagacatcatttggaaacaacagtgaaagatatgaaagagttgaaagatattgcttataaacaatataaaacactttcttttggtaatagtgttgtcaagatccgaattaaccacattggacaaatagtatcagtgggagaatattaatagtatctattagaaattgaaataaatagggtgtatgctattctcaaaaaggttgtaccctttttagaaacagacttttatactgattaatagtaatttaaaatctaactgcttatgatcaagaaaaccctttattttggaaaccccgtttatctgtctctgaaaaatgctcagttgatgataaaattaccggaggtagtcaggaatgatacgttacctgaaagtttcaaacgaacttcagaagtgacgaaacccattgaggatattggagttgtggtactggatcacaagcagatcaccatctcttcgggcgtgttggaagctttacttgaaaataattgtgctgtcattacatgtaacagtaaaagtatgccggttggtttgatgcttcctctgtatgggaacacgacgcaaaacgaaagattccggcaacagttggatgcctctctaccgttaaagaaacagctttggcagcagaccataaagacgaagattgaaaatcaggcagccgtattgaaagaatgttctggcgcagaagtgaaatgtatgtacgcatgggcttcggatgtgaaaagcggagatacgagtaacctggaagcccgagcggctgcttattattggaagaatttgttttggatagaaggtttcacaagagacagggagggcattccgcctaacaatttgttgaattatggatatgctattctgcgggcggttgttgctcgtagcttggtggcaagtgggcttttgcctactttaggaatccaccatcataatcgttataatgcttattgcttggcagatgacatcatggagccttatcgtccgtatgtggatcaattggtctgtggtatcataaagcagggagtggattatgcggaactaacgagagagttgaaagcgcagctgcttactattcctgtgctagaaacttatatgtcaggaaaacgtagtccgttgatggtggctgtcgggcaaactacggcttctctgtataagtgctttagtggcgaattgcgtagaatctcctatccggaaatgtaatatggatcggtttagcgaatatcgtgttatgtgggtacttgtgttgtttgatttgcctaccgagacgaagaaggagaaaaaggcgtatgtggatttcaggaaaaatctacaaagagatggatttacgatgtttcagttttctatttatgtccgccattgtgctagtagcgagaatgcggccgtacatgtaaaaagagttaaatcttttcttccggagcatgggaatgtcggaatcatgtgtattacggataagcagtttgggaatattgaacttttttatggaaagaaaacggtggaagtgaatactcctggacagcaattggagttgttctaaaagaaaaatcccgctgtcaagcgggatttttaatggaaacaatatctgttttttttattctgatgtgctttgtaatccattgattaatagtttttaatagataatatgctgtttccaatggctcaaagttactaaaatgaaagcaaatcacaacnnnnnnnnnnnnnntnnnnnnnnnnnnnangctgtttccaatggctcaaagttactaaaatgaaagcaaatcacaacnnnnnnnnnnnnnnnnnnnnnnnnnnnnnngctgtttccaatggctcaaagttactaaaatgaaagcaaatcacaacnnnnnnnnnnnnnnnnnnnnnnnnnnngnngctgtttccaatggctcaaagttactaaaatgaaagcaaatcacaacnnnnnnnnnnnnnnnntnnannnannnnnngctgtttccaatggctcaaagttactaaaatgaaagcaaatcacaacnnnnnnnnnnnnnnnnnnnnannnnnnnnngctgtttccaatggctcaaagttactaaaatgaaagcaaatcacaacnntnnnnnnnnnnnnnnnnnnnnnnnnnngctgtttccaatggctcaaagttactaaaatgaaagcaaatcacaaccnnnnnnnnnnnnnnnnnnnnannnnnnnngnnntttccaanggnnnaaanttnnnaaaannaaannaaannnnaacnnnnnnnnnnnnnnnnnnnnntnnnnnnnnnntntttccaanggcnnaaanttnnnaaaannaaannaaancanaannnannntnnnnnnnnnnnnnnnnnnnnnnnnnntttncaanngnnnnaanttnnnnaaannaaannaaannnnaannnnnnnnnncnnnnnnnnnnnnnnnnntnnnnnntttcnanngnnncaaantnnnnaaaannaaannaaannncaannnnnnnnnnnnnnnnnnnannnnnnnnnnnnnntttncnanngnnnnaaantnnnnaaannnaannnaannnnnannnnnnnnnnnnnntnannnnnnnnnnnnnnnnnnnttncnanngnnnnaanntnnnaaaannnaannaaannnnaannnnannnnnnnnnnnnannnnnnnnnnnnnnnnntttnnnnnnnnnnnaannnnnnaaaannaaannaannnnnaannnnnnnnnnnnnnnnnnnnnannnnnnnnntnntnnnnnnnnnnnnnnnnnnnnnnnannannnnanannannannnnnnnnnnnnnnnnnnnnnnnnnnnnnnnnnnnnnntnnnnnnnnnnnnnnnnnnnnnannnnnnnnnannnnnnnnnnnnnnnnnnnnnnnnnnnnnnnnnnnnnnnnnnnnnnnntnngnnnnnnnnnnnnannnnnnaanaannnnnnnnnnnntnnnnnnnnnnnnannnnnnnnnnnnnnnnnnnnnnnnnnnnnnnnnnnnnnnnnnnnnnannnnnnnnnnnnnnnnnnnnnnnnnnnnnnnnnnnnnntntnnnnnnnnnnnnnnnnnnntnnnnnnnnnnnnnnnnnnnnannnnnnnnngnnnnnnnnnnnnnnntnnnntnnnnnnnnnnnnnnnnnnnnnnnnnnnnnnnnnnnnnnnnnnnnnnnnnnnnnnnnnnnnnnnnnnnnnnnnnnnnnnnnnnnnnnnnnnnnnnnnnnntnnnnnnnnnnnnnnnnnnnnnnnnnnnnnnnnannnnnnnnnnnnnnnnnnnnnnnnnnnnnnnnnnnnnnnnnnnnnnnnnnnnnnnnnnnnannnnnnnnnnnnnnnnnnnnnnnnnnnnnnnnnnnnnnnnnnnnnnnnnntnnnnnnnnnnntnnnnnnnnnnnnnnnnnnnnnnnnnnnnnnntntnnnnnnnnnnnnnnnnnnnnnnnnnntnnnnnnnnnnnnnnnnntnnttnnnnnnnnannnnnnnnnnttnnntnnnntnnnnnnnnnnngtnnnnnnnnnnnnnnnnnnnnnnnnnnnnntnntgnnnnnnntnnnnnnnnnnnnnnnnnnnnnnnnnnntnnnnnnnnnnnnnnnnnnnnnnnnnnnnnnnnnnntnnnnntnnnnnannnnnnnnntnnnntnnnannnnnnnnnnnnnnnnnnnnnnnnnnnnnnnnnnnnnnnnnnnntnnnnnnnnnnnnnnnnnnnnnnnntnnnnnnnnnnannntnnnnnnnnnnnnnnnnnntnnnnnnnnnnnnn

SEQ ID NO: 434 - DNA, 4000 bp, Escherichia coli
  misc_feature (651)..(651): n is a, c, g, or t
caaactcgaatacacaggctatggatacgttctcgtcagcgtcgtcaatgacaacgagtcagttcatggaacaggctcaatatacttcagcgatagaggctgagctgtcgaaaagcattgtgcagatttcatcgatacaatcagctcgtgttcacctcgctgcacctaggcagagctcttatgtgcgcaaccgcgagccagctaaagcctcagtcgtcgtggttgctcaccccggtagatctgttacccaggctcaagtgcaagctgtggtcagccttgtcgcttctagtgtgccttacttgtcgatcgaagatgtttcggttgtggatcaacaaggcagtttattgaccaacgctgtgtctgctggtcttgccatcgccgacgagcaagccgaatttaagcgttcgatagaaacagcatacaaaaataaaatagtcgatcttctgacacctatttacggccgcgacaatatccagtctgatgtagacgtagtaatggatttttccgaattcgaggcaacaaacgaaattttcgatcgtgacggctctggccctaaagcggtatctgagatacttgtcctcgatacaagctcgaatacacctgcgtctggtgtgcctggtgcgcagtcaaatatcgcgccgaatgacactntcctcaccgacggagacggaatgcaaggtggtgctgcgggtttgacaggtgtgcgtagcagtcaaaccacacgtaattatgagatagatcgaacgattcaatatgagaagaaaccaacgggtataatcacacgaatgtctgtcgcagtagtcatcaacgaagaggcttttggtatcaaagcaagcggcgaagacggagaagaagctggcgtaacagccgacactatagatacctcgaggatacaaaatcttgtggctagcgctgtaggctttgatcaagctcgaggtgattctgttgctgttttggtctcaactttcagagccgaagagctaatcgaaaatccgatgaaatggtatgagaatccaatgattttcggcttcgcaaagatgggccttatcgcattctcattcgcagtagtggtcgtctttgttgtccagccgctcattaaatcgtttgctggaccaccgccaccaccgcctgcaagtgttgaggacttaatgctattagatgagacgatttcaaaagaagatgttgaagatctagaactcgaaggttacgagacgcttgaacagatcaaggcgaaactcaaacctaagaaatcttcaatctcagctgacatgctagatacggcaaactcttatgacgacaaagtcgcgttggtgagaatgttagttggtgaagactctggtcgagtagcaaaagtgttaaagaagttggttgcaacgaccacaacaggctaacgactatactcgaaatttattatgaaccgccatagttaatatggcgctgttaatagaaaggaacgtgatcatggctgaagctgaagatgccaaagaagaagcgcgaaaactaagagattcgatgctcagcgaagaggctcgcaatcaattacaaatattaaccggaacgcagagagcagcggttatattgttattggtcggagaagaacaggcagccgacatcatctcgtttatgtctcctcgtgaagttcaagcactcggcgctaacatggtggctgtagcagaactgtctcaagaggcagtcaacgtggtgttggacgatttcatcacaactattaagagtcagacaaatcttggtcttggctctgacgagtacgtaagatcggtgtttaagaaagcgttgggtgaagacaaagccgcgactgtacttggccgaataatgccgacttcttcaagcaaagggcttgaaatacttaagtggatggacgctcgttcaataggcgacatggttatcgaagaacatccacaggttattgcgatcattctatcggtactcgaatttgatattgcagcagatgttcttaaatatattccggaagatattcgtgccgaagtcattcaaagaatcgcttcactcgaaactatccatccgagcgcgatggccgaactcgagcgagtaatgatgaagcagtttacgagttctagcgcgaaatcttcgagttttggcggcgtaaaaactgctgcgaaaattatgaacttcacgaagaccgacatggagtcggcgataatctccggtgtgacgaatcttgatgaagagttggcactgaaaattcaagacaatatgtttacattcgaaaacctatctggccttgacaaccgaagtattcaaactttaatgcgttcgatcgaaaccgacttattgatggtcgcactgaaagcgtgtgatgaacttacccgagagaagttcctagacaatatgtcacagcgagcgaaactcatgttcctcgatgagatggaagcgaaaggtccggtgcgtatgacagatgtagaagatgcgcagaaagatattctccgcatagcgcgtagattgtcagacgcaggcgatatcgtgttagcaggtagaggtgatgattttgtctagtcgacatagccctgacaattctgtcgaattttcggcatggctagcgccgaaaattgaaagtgatttggtttttgaaccaggttttgatatcgcctctggctccgatggcgcacataaagttgataacatagagacttcgagcgagcccggcgagtttgttgtatggcggccaggtatggttgacgaaggtctcttactccagaccgaagcgctaactgcagaaagcaccatcgaagaaatcgagaatactgaaagcggagagagtgaaccttcagcccaatatactcagttagagctacaggaatacggagagaatcaggtccagctcgcgcttgcacaagtgcgagctgatgaagcagccgtgctcagcgggacaaaattacgcttagaggcgttaatcgcgacgataagcgagcagcgtgttgattcgacttcgttttacgatccgctaaaaaaactcttagtaaaaagtgtcgaggccgttctgatgacgccgctcgttgagagtaaagcgtcaatagagtcagtacttgctcgattactcaaagaggtagattcagaaaatgaaggtgaacctgcagggatgcgtctttatttgaaccctgctgatgtagcgctgctcgaagcagagcatatagccgttcgagatgatattaaaatcctcagcgatccgaggctttcgcaaggctctgtgcgggcgttaatgcaagattcaatcatcgaagacttaagtgaaatacgcattcagcaaatcactcaacaactattgagtggattagataagaaagcagacgagacccagctagtcgatagtgacaccactattactgaaacatcgctcgagcaggcttcggatgaagcgttgctcggtgaactcgactcatgaatgacgagaatagattcgccgccgaattggaaaagcttggtgcaaagagtttttctacacgtacagagcgatttggtcgcgtaacgagagtggtcggacttaccgtcgaggcgacaggcattaccgcagagatcggcgctcagtgtgtgattgaaacaagcagagatgagccgcctattgaagcggaagtcgttggtttcgatggaaagcacctctacctaatgcccatccactatctcgaagggataaaagccggcagccttgttcgattcaagcaagcacaatcattagtcggtgttggcgagagtatgcttggccgcgtgataaatggtttaggcgagccgattgatggcaagggatcgatttccttcgatgctcaggttgcgctcgatgctagagcggttaatccgatgcaaagaggcgctgtaaaagacacgcttgatactggcataaaagccattaacggctgccttacttttggtaaagggcaacgaatgggggtgatcgcgggttcaggtgttggtaagagtgttctaatgggcatgcttactagaaatacggccgccgatgttgttgtgatag

SEQ ID NO: 435 - DNA, 4000 bp, Escherichia coli
  misc_feature (3765)..(3766): n is a, c, g, or t
  misc_feature (3834)..(3834): n is a, c, g, or t
  misc_feature (3843)..(3843): n is a, c, g, or t
  misc_feature (3849)..(3849): n is a, c, g, or t
atctgatcatggatttatcattcatgatgatgttcatttactcgatgaaccaggtcaaatcgaattatttaacacgtacaataagtgcaaagactctaaacaaaatatgttggtaacagggctttattctccccgccaaatgaaattaagggatgacttagcaacaagacttgcttggggcgtcacttatgaagtaataggtctgtctgatgaagaaaaaaaattggcacttttgaaacatgctgaagagagaggcatgaagcttaacatggacattattgattattgcctaaaatatctaaaaagggatatgccaaatttattttctatactagaagctttagataaatggtctttaacttacaaaagacctatcacacttccattacttaaagagattatagaagctaataagatctagcttattgacgaataaggtaatcgaaagcaccaagagaagctcttgctccctcccccatcgcaataataatttgcttataaggtacagttgttacatcacctgcagcaaacaaacctggcaatgaagactgattgtgattatctactataatttcaccaaatcttgagaggtctacaatgtttttaacaaaatccgtatttggcaataatccgatctgaataaaaataccctcgagctcaatcgttttcttttcatttgatttacgatctaaataaatcatgccacttactttatctgtaccaatcacttcggtagtttgtgcatctaaaatgacatcgacattggataagctataaagtcttttctgtaaaatatgatcagccttaagttcagatgcaaattcaaaaagggtgacatgtcctacaatatttgcaagatcaattgcagcttcaacaccagaatttcctcctcctataactgcaacatgtttacctttgaatagagggccgtcacagtgagggcaatatgcgacacccttacctttaaattctttttcaccagggacatttaattctctccatcttgcacctgttgcaacaatcactgatttacttttaagttttccaccattttcaagttctatttcaaataatgaatttaaatcatttttttgaacactttttgcacgttgcaaattcataatatcaacttcatattcttttacgtgctcttcaagtgctgtaactaattttggtccctcagttgcttttacagaaataaaattttctatgcctaaagtatccatcacttggccgccaaatcgttcggcaataacacctgtgcgtatgccttttcgagcactataaattgcagctgatgcccctgctggtcctccaccaattactaaaacatcataagtctcttttttagatattttttcagcttcttttagacttgcacttgaatcaattttattgactatttcatcaagttccattcgaccctgtccaaagggctttccattaagataaatagttggtacagccataatctgcttatcttcaacttctttttggaacaatgcgccatcaatcattacatgcgaaatatttggattaatgatagacattacatttaatgcctgcacaacatccggacaattgtggcaacttagtgaaatataagtttcgaaatgaaacttatctttaatatttttaatttgttctattttttcggcatctatttttacagggtacccactagcttgaagaagtgctaatacaaaagatgtaaattcgtgtcctgatggaatacctgcaaaagtgatacctgtaatttctttttctctattaatttcaaacgaaggaattctttttgaaacatccgcttctttgcttaaagtaattttttctgacaaagatgcgacttcctctagcatctctatcatttcgttagatgaggaattttcatcaacataagctacaagcttgattggattcacaagcctagtcatatattcttgaagttgatttttaattgctaaatctagagccattatatttccttgaccatttatctcgaaatgaaacccccaggccaatatgtggcctgggattcattttgtatttagatcttacctacgaggtctaatgatggagcaattgttttagctccttcttgccattttgctgggcaaacttgacctggattgttagctacgtattgtgcagcttttaatttacgcaatgtttctttcacatctcgtgcaattgcattgtcatgaacttccattgttttgatttcaccttttggattaataataaaagtaccgcgcaatgctaaaccttcttcatcaatatgcacttcaaatgctcgtgttaattgatgtgtaggatcaccaattaatggaaattttgccttgctcactgctggtgaagtttcatgccagactttatgcgaaaaatgtgtatcagttgtaacgatataaacttccgcaccagctttttgaaattctgcataatgatctgcagcatcttcaacttctgttggacagttaaatgtaaatgccgctggcataaaaatcactactgaccattttcctttaagatttgcttctgtaacgtcaatgaacttgccattgtgaaatgctgttgctttaaacggttttacttcagtattgactaatgaagacatcgttttctccttttttggttggtttaaaaatgatgattataggtaagtcattttaatatgtataatcaattgttattatatttatgatttattttacttatcatttaatatgacaaaaaataaagctaaatttaataaaaatcaggggttattttttatctttgacgtcttcgagactattctcaaatttcaattgctttaaacgagactccacaatcgatttttgataaaaattaccgtctttagatttaaccgcaaattccatctgctcaattgctctcggcaaattaaatttacggtagtatgcttcagattgggcttgatattgaagtaattctttaccttgttttgcataagctctagaaagtaactcataaaaataactatcatctggataaatattcaatttgtcattaataagtttgatcgatctctcaggctcattggtcattaaataatgctctgctaatccataaattaacgctcgataattaggataaatatttaacgcttttagatatagatttagcgcttgtgttggttgatttgttgcgacttctaatttacatgcgagggtttcaataagaacatctttttttgcatttgtttttaaccattcaacctcttgtcgagctctaacaaaatcgctttttctcatgtaggctattgcaagaccataccgctcggcggattcatttatatatcgcttgtctttgatgctcccctcaaactcatcaaccgcagactgaggggtgccatttgttgccctcaattttgatttgatgtacataaagtccggattatcaggaatttgcctataacgactttctttgactctatttgaaatatcactgatacgttcagctgtaatagggtgagttctcaaaaagctaggggccgcaccttctgaaaagcgtgagcctctttgaagtgtattgaagaatgaaaccattgctcggccatcaaaaccagcatcagtcaaaatttgaaaacctacccgatctgcttctttttcgtgatctcttgtatagtccaattgtttctgaacgcccatagctgaagctgcagtcatagttccagcagataactggggatttgcccttgctacaagaagagctaaagcaatgcctaggacagttttaattgaatcnntcttctgctgagcaatcattcttggcagatgtctttgcgttacgtgtgcaatttcatggcctaatacnctagcaacntctgantcattatttgatgcaagaagtaatcctgtatgaacgcctatcacccctccgatcattgcaaaagcgttaattgaagactcattcactacaaaaaaattaaattgttgccttttattgggactataagcaactaatctatcacctaaatttt

SEQ ID NO: 436 - DNA, 4000 bp, Escherichia coli
  misc_feature (485)..(485): n is a, c, g, or t
  misc_feature (489)..(489): n is a, c, g, or t
  misc_feature (498)..(498): n is a, c, g, or t
  misc_feature (598)..(598): n is a, c, g, or t
  misc_feature (1160)..(1160): n is a, c, g, or t
  misc_feature (1333)..(1333): n is a, c, g, or t
  misc_feature (1931)..(1931): n is a, c, g, or t
  misc_feature (2168)..(2172): n is a, c, g, or t
  misc_feature (2174)..(2174): n is a, c, g, or t
  misc_feature (2176)..(2176): n is a, c, g, or t
  misc_feature (2180)..(2180): n is a, c, g, or t
  misc_feature (2182)..(2183): n is a, c, g, or t
  misc_feature (2185)..(2187): n is a, c, g, or t
  misc_feature (2190)..(2191): n is a, c, g, or t
  misc_feature (2193)..(2193): n is a, c, g, or t
  misc_feature (2195)..(2196): n is a, c, g, or t
  misc_feature (2199)..(2210): n is a, c, g, or t
  misc_feature (2212)..(2216): n is a, c, g, or t
  misc_feature (2218)..(2219): n is a, c, g, or t
  misc_feature (2221)..(2221): n is a, c, g, or t
  misc_feature (2224)..(2226): n is a, c, g, or t
  misc_feature (2229)..(2233): n is a, c, g, or t
  misc_feature (2237)..(2239): n is a, c, g, or t
  misc_feature (2243)..(2245): n is a, c, g, or t
  misc_feature (2247)..(2252): n is a, c, g, or t
  misc_feature (2255)..(2257): n is a, c, g, or t
  misc_feature (2259)..(2269): n is a, c, g, or t
  misc_feature (2271)..(2272): n is a, c, g, or t
  misc_feature (2274)..(2275): n is a, c, g, or t
  misc_feature (2277)..(2279): n is a, c, g, or t
  misc_feature (2281)..(2281): n is a, c, g, or t
  misc_feature (2283)..(2286): n is a, c, g, or t
  misc_feature (2289)..(2292): n is a, c, g, or t
  misc_feature (2294)..(2299): n is a, c, g, or t
  misc_feature (2301)..(2301): n is a, c, g, or t
  misc_feature (2303)..(2309): n is a, c, g, or t
  misc_feature (2311)..(2311): n is a, c, g, or t
  misc_feature (2313)..(2313): n is a, c, g, or t
  misc_feature (2316)..(2317): n is a, c, g, or t
  misc_feature (2319)..(2320): n is a, c, g, or t
  misc_feature (2322)..(2322): n is a, c, g, or t
  misc_feature (2324)..(2324): n is a, c, g, or t
  misc_feature (2326)..(2326): n is a, c, g, or t
  misc_feature (2328)..(2329): n is a, c, g, or t
  misc_feature (2331)..(2331): n is a, c, g, or t
  misc_feature (2333)..(2333): n is a, c, g, or t
  misc_feature (2337)..(2343): n is a, c, g, or t
  misc_feature (2345)..(2345): n is a, c, g, or t
  misc_feature (2347)..(2348): n is a, c, g, or t
  misc_feature (2350)..(2355): n is a, c, g, or t
  misc_feature (2357)..(2360): n is a, c, g, or t
  misc_feature (2364)..(2364): n is a, c, g, or t
  misc_feature (2366)..(2367): n is a, c, g, or t
  misc_feature (2369)..(2373): n is a, c, g, or t
  misc_feature (2377)..(2379): n is a, c, g, or t
  misc_feature (2383)..(2385): n is a, c, g, or t
  misc_feature (2387)..(2390): n is a, c, g, or t
  misc_feature (2392)..(2397): n is a, c, g, or t
  misc_feature (2399)..(2405): n is a, c, g, or t
  misc_feature (2407)..(2416): n is a, c, g, or t
  misc_feature (2418)..(2418): n is a, c, g, or t
  misc_feature (2420)..(2423): n is a, c, g, or t
  misc_feature (2426)..(2428): n is a, c, g, or t
  misc_feature (2430)..(2430): n is a, c, g, or t
  misc_feature (2432)..(2438): n is a, c, g, or t
  misc_feature (2445)..(2445): n is a, c, g, or t
  misc_feature (2449)..(2452): n is a, c, g, or t
  misc_feature (2455)..(2457): n is a, c, g, or t
  misc_feature (2459)..(2464): n is a, c, g, or t
  misc_feature (2467)..(2468): n is a, c, g, or t
  misc_feature (2470)..(2471): n is a, c, g, or t
  misc_feature (2475)..(2476): n is a, c, g, or t
  misc_feature (2479)..(2480): n is a, c, g, or t
  misc_feature (2483)..(2483): n is a, c, g, or t
  misc_feature (2486)..(2488): n is a, c, g, or t
  misc_feature (2490)..(2493): n is a, c, g, or t
  misc_feature (2495)..(2495): n is a, c, g, or t
  misc_feature (2497)..(2499): n is a, c, g, or t
  misc_feature (2501)..(2502): n is a, c, g, or t
  misc_feature (2505)..(2510): n is a, c, g, or t
  misc_feature (2513)..(2514): n is a, c, g, or t
  misc_feature (2516)..(2520): n is a, c, g, or t
  misc_feature (2522)..(2523): n is a, c, g, or t
  misc_feature (2526)..(2526): n is a, c, g, or t
  misc_feature (2528)..(2530): n is a, c, g, or t
  misc_feature (2532)..(2532): n is a, c, g, or t
  misc_feature (2535)..(2547): n is a, c, g, or t
  misc_feature (2549)..(2551): n is a, c, g, or t
  misc_feature (2553)..(2558): n is a, c, g, or t
  misc_feature (2560)..(2565): n is a, c, g, or t
  misc_feature (2567)..(2567): n is a, c, g, or t
  misc_feature (2569)..(2572): n is a, c, g, or t
  misc_feature (2574)..(2574): n is a, c, g, or t
  misc_feature (2576)..(2577): n is a, c, g, or t
  misc_feature (2579)..(2581): n is a, c, g, or t
  misc_feature (2584)..(2587): n is a, c, g, or t
  misc_feature (2590)..(2590): n is a, c, g, or t
  misc_feature (2593)..(2594): n is a, c, g, or t
  misc_feature (2597)..(2597): n is a, c, g, or t
  misc_feature (2600)..(2601): n is a, c, g, or t
  misc_feature (2604)..(2604): n is a, c, g, or t
  misc_feature (2608)..(2611): n is a, c, g, or t
  misc_feature (2613)..(2617): n is a, c, g, or t
  misc_feature (2619)..(2619): n is a, c, g, or t
  misc_feature (2621)..(2623): n is a, c, g, or t
  misc_feature (2625)..(2627): n is a, c, g, or t
  misc_feature (2629)..(2633): n is a, c, g, or t
  misc_feature (2635)..(2636): n is a, c, g, or t
  misc_feature (2639)..(2639): n is a, c, g, or t
  misc_feature (2641)..(2643): n is a, c, g, or t
  misc_feature (2645)..(2645): n is a, c, g, or t
  misc_feature (2647)..(2647): n is a, c, g, or t
  misc_feature (2649)..(2652): n is a, c, g, or t
  misc_feature (2654)..(2656): n is a, c, g, or t
  misc_feature (2659)..(2667): n is a, c, g, or t
  misc_feature (2669)..(2670): n is a, c, g, or t
  misc_feature (2673)..(2678): n is a, c, g, or t
  misc_feature (2680)..(2680): n is a, c, g, or t
  misc_feature (2683)..(2688): n is a, c, g, or t
  misc_feature (2690)..(2693): n is a, c, g, or t
  misc_feature (2695)..(2696): n is a, c, g, or t
  misc_feature (2699)..(2703): n is a, c, g, or t
  misc_feature (2705)..(2707): n is a, c, g, or t
  misc_feature (2710)..(2710): n is a, c, g, or t
  misc_feature (2712)..(2727): n is a, c, g, or t
  misc_feature (2729)..(2730): n is a, c, g, or t
  misc_feature (2732)..(2733): n is a, c, g, or t
  misc_feature (2737)..(2738): n is a, c, g, or t
  misc_feature (2740)..(2744): n is a, c, g, or t
  misc_feature (2750)..(2752): n is a, c, g, or t
  misc_feature (2754)..(2758): n is a, c, g, or t
  misc_feature (2761)..(2763): n is a, c, g, or t
  misc_feature (2766)..(2771): n is a, c, g, or t
  misc_feature (2773)..(2774): n is a, c, g, or t
  misc_feature (2778)..(2781): n is a, c, g, or t
  misc_feature (2783)..(2783): n is a, c, g, or t
  misc_feature (2785)..(2785): n is a, c, g, or t
  misc_feature (2788)..(2788): n is a, c, g, or t
  misc_feature (2792)..(2793): n is a, c, g, or t
  misc_feature (2795)..(2796): n is a, c, g, or t
  misc_feature (2798)..(2799): n is a, c, g, or t
  misc_feature (2801)..(2801): n is a, c, g, or t
  misc_feature (2807)..(2809): n is a, c, g, or t
  misc_feature (2811)..(2816): n is a, c, g, or t
  misc_feature (2819)..(2819): n is a, c, g, or t
  misc_feature (2821)..(2821): n is a, c, g, or t
  misc_feature (2823)..(2824): n is a, c, g, or t
  misc_feature (2826)..(2827): n is a, c, g, or t
  misc_feature (2831)..(2833): n is a, c, g, or t
  misc_feature (2835)..(2837): n is a, c, g, or t
  misc_feature (2840)..(2841): n is a, c, g, or t
  misc_feature (2843)..(2844): n is a, c, g, or t
  misc_feature (2848)..(2849): n is a, c, g, or t
  misc_feature (2851)..(2856): n is a, c, g, or t
  misc_feature (2860)..(2869): n is a, c, g, or t
  misc_feature (2872)..(2873): n is a, c, g, or t
  misc_feature (2876)..(2876): n is a, c, g, or t
  misc_feature (2878)..(2879): n is a, c, g, or t
  misc_feature (2881)..(2884): n is a, c, g, or t
  misc_feature (2886)..(2888): n is a, c, g, or t
  misc_feature (2891)..(2905): n is a, c, g, or t
  misc_feature (2907)..(2907): n is a, c, g, or t
  misc_feature (2909)..(2909): n is a, c, g, or t
  misc_feature (2911)..(2913): n is a, c, g, or t
  misc_feature (2915)..(2917): n is a, c, g, or t
  misc_feature (2920)..(2921): n is a, c, g, or t
  misc_feature (2923)..(2923): n is a, c, g, or t
  misc_feature (2925)..(2926): n is a, c, g, or t
  misc_feature (2929)..(2931): n is a, c, g, or t
  misc_feature (2933)..(2936): n is a, c, g, or t
  misc_feature (2938)..(2940): n is a, c, g, or t
  misc_feature (2942)..(2945): n is a, c, g, or t
  misc_feature (2947)..(2947): n is a, c, g, or t
  misc_feature (2949)..(2949): n is a, c, g, or t
  misc_feature (2951)..(2951): n is a, c, g, or t
  misc_feature (2954)..(2955): n is a, c, g, or t
  misc_feature (2957)..(2964): n is a, c, g, or t
  misc_feature (2966)..(2966): n is a, c, g, or t
  misc_feature (2968)..(2974): n is a, c, g, or t
  misc_feature (2976)..(2976): n is a, c, g, or t
  misc_feature (2978)..(2979): n is a, c, g, or t
  misc_feature (2981)..(2981): n is a, c, g, or t
  misc_feature (2984)..(2984): n is a, c, g, or t
  misc_feature (2987)..(2994): n is a, c, g, or t
  misc_feature (2997)..(2998): n is a, c, g, or t
  misc_feature (3000)..(3001): n is a, c, g, or t
  misc_feature (3003)..(3013): n is a, c, g, or t
  misc_feature (3016)..(3016): n is a, c, g, or t
  misc_feature (3018)..(3020): n is a, c, g, or t
  misc_feature (3022)..(3022): n is a, c, g, or t
  misc_feature (3024)..(3024): n is a, c, g, or t
  misc_feature (3027)..(3028): n is a, c, g, or t
  misc_feature (3030)..(3030): n is a, c, g, or t
  misc_feature (3032)..(3034): n is a, c, g, or t
  misc_feature (3037)..(3037): n is a, c, g, or t
  misc_feature (3040)..(3040): n is a, c, g, or t
  misc_feature (3042)..(3043): n is a, c, g, or t
  misc_feature (3045)..(3046): n is a, c, g, or t
  misc_feature (3049)..(3056): n is a, c, g, or t
  misc_feature (3060)..(3066): n is a, c, g, or t
  misc_feature (3069)..(3070): n is a, c, g, or t
  misc_feature (3072)..(3072): n is a, c, g, or t
  misc_feature (3076)..(3076): n is a, c, g, or t
  misc_feature (3078)..(3083): n is a, c, g, or t
  misc_feature (3085)..(3085): n is a, c, g, or t
  misc_feature (3087)..(3091): n is a, c, g, or t
  misc_feature (3094)..(3096): n is a, c, g, or t
  misc_feature (3098)..(3099): n is a, c, g, or t
  misc_feature (3101)..(3102): n is a, c, g, or t
  misc_feature (3104)..(3106): n is a, c, g, or t
  misc_feature (3108)..(3108): n is a, c, g, or t
  misc_feature (3111)..(3113): n is a, c, g, or t
  misc_feature (3115)..(3115): n is a, c, g, or t
  misc_feature (3118)..(3119): n is a, c, g, or t
  misc_feature (3121)..(3122): n is a, c, g, or t
  misc_feature (3124)..(3128): n is a, c, g, or t
  misc_feature (3130)..(3132): n is a, c, g, or t
  misc_feature (3134)..(3145): n is a, c, g, or t
  misc_feature (3147)..(3147): n is a, c, g, or t
  misc_feature (3150)..(3151): n is a, c, g, or t
  misc_feature (3153)..(3157): n is a, c, g, or t
  misc_feature (3160)..(3161): n is a, c, g, or t
  misc_feature (3163)..(3166): n is a, c, g, or t
  misc_feature (3168)..(3170): n is a, c, g, or t
  misc_feature (3172)..(3172): n is a, c, g, or t
  misc_feature (3174)..(3175): n is a, c, g, or t
  misc_feature (3178)..(3179): n is a, c, g, or t
  misc_feature (3181)..(3181): n is a, c, g, or t
  misc_feature (3184)..(3184): n is a, c, g, or t
  misc_feature (3187)..(3188): n is a, c, g, or t
  misc_feature (3191)..(3193): n is a, c, g, or t
  misc_feature (3195)..(3197): n is a, c, g, or t
  misc_feature (3199)..(3200): n is a, c, g, or t
  misc_feature (3203)..(3206): n is a, c, g, or t
  misc_feature (3208)..(3209): n is a, c, g, or t
  misc_feature (3211)..(3213): n is a, c, g, or t
  misc_feature (3217)..(3217): n is a, c, g, or t
  misc_feature (3220)..(3220): n is a, c, g, or t
  misc_feature (3223)..(3224): n is a, c, g, or t
  misc_feature (3226)..(3227): n is a, c, g, or t
  misc_feature (3229)..(3230): n is a, c, g, or t
  misc_feature (3232)..(3232): n is a, c, g, or t
  misc_feature (3234)..(3234): n is a, c, g, or t
  misc_feature (3238)..(3239): n is a, c, g, or t
  misc_feature (3242)..(3243): n is a, c, g, or t
  misc_feature (3246)..(3248): n is a, c, g, or t
  misc_feature (3252)..(3252): n is a, c, g, or t
  misc_feature (3254)..(3255): n is a, c, g, or t
  misc_feature (3259)..(3260): n is a, c, g, or t
  misc_feature (3262)..(3264): n is a, c, g, or t
  misc_feature (3266)..(3266): n is a, c, g, or t
  misc_feature (3268)..(3269): n is a, c, g, or t
  misc_feature (3271)..(3271): n is a, c, g, or t
  misc_feature (3274)..(3274): n is a, c, g, or t
  misc_feature (3277)..(3278): n is a, c, g, or t
  misc_feature (3280)..(3283): n is a, c, g, or t
  misc_feature (3285)..(3288): n is a, c, g, or t
  misc_feature (3292)..(3295): n is a, c, g, or t
  misc_feature (3297)..(3307): n is a, c, g, or t
  misc_feature (3309)..(3309): n is a, c, g, or t
  misc_feature (3311)..(3312): n is a, c, g, or t
  misc_feature (3315)..(3318): n is a, c, g, or t
  misc_feature (3320)..(3321): n is a, c, g, or t
  misc_feature (3323)..(3323): n is a, c, g, or t
  misc_feature (3326)..(3328): n is a, c, g, or t
  misc_feature (3334)..(3334): n is a, c, g, or t
  misc_feature (3337)..(3337): n is a, c, g, or t
  misc_feature (3340)..(3346): n is a, c, g, or t
  misc_feature (3348)..(3352): n is a, c, g, or t
  misc_feature (3354)..(3361): n is a, c, g, or t
  misc_feature (3363)..(3369): n is a, c, g, or t
  misc_feature (3373)..(3374): n is a, c, g, or t
  misc_feature (3378)..(3380): n is a, c, g, or t
  misc_feature (3382)..(3383): n is a, c, g, or t
  misc_feature (3385)..(3385): n is a, c, g, or t
  misc_feature (3387)..(3390): n is a, c, g, or t
  misc_feature (3392)..(3394): n is a, c, g, or t
  misc_feature (3396)..(3399): n is a, c, g, or t
  misc_feature (3402)..(3403): n is a, c, g, or t
  misc_feature (3405)..(3405): n is a, c, g, or t
  misc_feature (3407)..(3407): n is a, c, g, or t
  misc_feature (3410)..(3410): n is a, c, g, or t
  misc_feature (3412)..(3412): n is a, c, g, or t
  misc_feature (3414)..(3416): n is a, c, g, or t
  misc_feature (3418)..(3421): n is a, c, g, or t
  misc_feature (3423)..(3424): n is a, c, g, or t
  misc_feature (3427)..(3427): n is a, c, g, or t
  misc_feature (3429)..(3434): n is a, c, g, or t
  misc_feature (3436)..(3448): n is a, c, g, or t
  misc_feature (3450)..(3450): n is a, c, g, or t
  misc_feature (3452)..(3453): n is a, c, g, or t
  misc_feature (3455)..(3456): n is a, c, g, or t
  misc_feature (3458)..(3469): n is a, c, g, or t
  misc_feature (3472)..(3472): n is a, c, g, or t
  misc_feature (3474)..(3476): n is a, c, g, or t
  misc_feature (3479)..(3479): n is a, c, g, or t
  misc_feature (3483)..(3483): n is a, c, g, or t
  misc_feature (3486)..(3487): n is a, c, g, or t
  misc_feature (3490)..(3490): n is a, c, g, or t
  misc_feature (3493)..(3493): n is a, c, g, or t
  misc_feature (3496)..(3502): n is a, c, g, or t
  misc_feature (3505)..(3506): n is a, c, g, or t
  misc_feature (3508)..(3512): n is a, c, g, or t
  misc_feature (3514)..(3517): n is a, c, g, or t
  misc_feature (3520)..(3524): n is a, c, g, or t
  misc_feature (3527)..(3528): n is a, c, g, or t
  misc_feature (3530)..(3530): n is a, c, g, or t
  misc_feature (3532)..(3534): n is a, c, g, or t
  misc_feature (3536)..(3536): n is a, c, g, or t
  misc_feature (3538)..(3540): n is a, c, g, or t
  misc_feature (3543)..(3546): n is a, c, g, or t
  misc_feature (3549)..(3550): n is a, c, g, or t
  misc_feature (3553)..(3559): n is a, c, g, or t
  misc_feature (3561)..(3561): n is a, c, g, or t
  misc_feature (3563)..(3563): n is a, c, g, or t
  misc_feature (3565)..(3565): n is a, c, g, or t
  misc_feature (3567)..(3567): n is a, c, g, or t
  misc_feature (3569)..(3569): n is a, c, g, or t
  misc_feature (3571)..(3571): n is a, c, g, or t
  misc_feature (3573)..(3574): n is a, c, g, or t
  misc_feature (3576)..(3576): n is a, c, g, or t
  misc_feature (3583)..(3583): n is a, c, g, or t
  misc_feature (3585)..(3586): n is a, c, g, or t
  misc_feature (3589)..(3589): n is a, c, g, or t
  misc_feature (3593)..(3595): n is a, c, g, or t
  misc_feature (3598)..(3606): n is a, c, g, or t
  misc_feature (3608)..(3612): n is a, c, g, or t
  misc_feature (3615)..(3616): n is a, c, g, or t
  misc_feature (3618)..(3618): n is a, c, g, or t
  misc_feature (3620)..(3623): n is a, c, g, or t
  misc_feature (3627)..(3628): n is a, c, g, or t
  misc_feature (3631)..(3632): n is a, c, g, or t
  misc_feature (3634)..(3634): n is a, c, g, or t
  misc_feature (3636)..(3637): n is a, c, g, or t
  misc_feature (3639)..(3640): n is a, c, g, or t
  misc_feature (3642)..(3647): n is a, c, g, or t
  misc_feature (3649)..(3651): n is a, c, g, or t
  misc_feature (3654)..(3654): n is a, c, g, or t
  misc_feature (3657)..(3659): n is a, c, g, or t
  misc_feature (3662)..(3662): n is a, c, g, or t
  misc_feature (3664)..(3664): n is a, c, g, or t
  misc_feature (3666)..(3666): n is a, c, g, or t
  misc_feature (3669)..(3669): n is a, c, g, or t
  misc_feature (3671)..(3673): n is a, c, g, or t
  misc_feature (3675)..(3676): n is a, c, g, or t
  misc_feature (3678)..(3683): n is a, c, g, or t
  misc_feature (3685)..(3685): n is a, c, g, or t
  misc_feature (3687)..(3688): n is a, c, g, or t
  misc_feature (3691)..(3691): n is a, c, g, or t
  misc_feature (3693)..(3695): n is a, c, g, or t
  misc_feature (3697)..(3699): n is a, c, g, or t
  misc_feature (3702)..(3705): n is a, c, g, or t
  misc_feature (3707)..(3712): n is a, c, g, or t
  misc_feature (3714)..(3714): n is a, c, g, or t
  misc_feature (3717)..(3723): n is a, c, g, or t
  misc_feature (3726)..(3728): n is a, c, g, or t
  misc_feature (3730)..(3732): n is a, c, g, or t
  misc_feature (3735)..(3735): n is a, c, g, or t
  misc_feature (3739)..(3741): n is a, c, g, or t
  misc_feature (3743)..(3743): n is a, c, g, or t
  misc_feature (3746)..(3748): n is a, c, g, or t
  misc_feature (3756)..(3756): n is a, c, g, or t
  misc_feature (3758)..(3766): n is a, c, g, or t
  misc_feature (3770)..(3774): n is a, c, g, or t
  misc_feature (3777)..(3777): n is a, c, g, or t
  misc_feature (3779)..(3779): n is a, c, g, or t
  misc_feature (3781)..(3781): n is a, c, g, or t
  misc_feature (3784)..(3784): n is a, c, g, or t
  misc_feature (3786)..(3786): n is a, c, g, or t
  misc_feature (3789)..(3790): n is a, c, g, or t
  misc_feature (3792)..(3792): n is a, c, g, or t
  misc_feature (3794)..(3795): n is a, c, g, or t
  misc_feature (3800)..(3800): n is a, c, g, or t
  misc_feature (3802)..(3803): n is a, c, g, or t
  misc_feature (3806)..(3806): n is a, c, g, or t
  misc_feature (3809)..(3809): n is a, c, g, or t
  misc_feature (3816)..(3816): n is a, c, g, or t
  misc_feature (3820)..(3820): n is a, c, g, or t
  misc_feature (3823)..(3823): n is a, c, g, or t
  misc_feature (3826)..(3826): n is a, c, g, or t
  misc_feature (3829)..(3829): n is a, c, g, or t
  misc_feature (3831)..(3831): n is a, c, g, or t
  misc_feature (3833)..(3833): n is a, c, g, or t
  misc_feature (3835)..(3836): n is a, c, g, or t
  misc_feature (3838)..(3840): n is a, c, g, or t
  misc_feature (3846)..(3852): n is a, c, g, or t
  misc_feature (3855)..(3856): n is a, c, g, or t
  misc_feature (3860)..(3863): n is a, c, g, or t
  misc_feature (3867)..(3868): n is a, c, g, or t
  misc_feature (3870)..(3874): n is a, c, g, or t
  misc_feature (3880)..(3883): n is a, c, g, or t
  misc_feature (3887)..(3889): n is a, c, g, or t
  misc_feature (3891)..(3891): n is a, c, g, or t
  misc_feature (3893)..(3894): n is a, c, g, or t
  misc_feature (3896)..(3897): n is a, c, g, or t
  misc_feature (3901)..(3903): n is a, c, g, or t
  misc_feature (3907)..(3907): n is a, c, g, or t
  misc_feature (3909)..(3909): n is a, c, g, or t
  misc_feature (3911)..(3915): n is a, c, g, or t
  misc_feature (3918)..(3918): n is a, c, g, or t
  misc_feature (3921)..(3925): n is a, c, g, or t
  misc_feature (3927)..(3931): n is a, c, g, or t
  misc_feature (3933)..(3933): n is a, c, g, or t
  misc_feature (3937)..(3938): n is a, c, g, or t
  misc_feature (3941)..(3943): n is a, c, g, or t
  misc_feature (3946)..(3947): n is a, c, g, or t
  misc_feature (3949)..(3949): n is a, c, g, or t
  misc_feature (3953)..(3956): n is a, c, g, or t
  misc_feature (3958)..(3958): n is a, c, g, or t
  misc_feature (3960)..(3962): n is a, c, g, or t
  misc_feature (3965)..(3965): n is a, c, g, or t
  misc_feature (3969)..(3970): n is a, c, g, or t
  misc_feature (3973)..(3974): n is a, c, g, or t
  misc_feature (3977)..(3979): n is a, c, g, or t
  misc_feature (3981)..(3983): n is a, c, g, or t
  misc_feature (3985)..(3985): n is a, c, g, or t
  misc_feature (3987)..(3987): n is a, c, g, or t
  misc_feature (3990)..(3990): n is a, c, g, or t
  misc_feature (3994)..(3994): n is a, c, g, or t
  misc_feature (3997)..(3998): n is a, c, g, or t
  misc_feature (4000)..(4000): n is a, c, g, or t
ggtgataaggtccatggtcaaaagggaaacagcccagatcatcagataaggtcccaaaatttacgctaagtggaaaaggatgtggagacgcgcaaacagctaggaggttggctcagaagcagccatccttcaaagagtgcgtaacagctcactagtcgagtatctctgcgccgaaaattaaccggggctaagcgtaataccgaatctatggatttatacttaggtataagtggtaggggagcgttccatacagcattgaaggtataccgtaaggagtgctggagcgtatggaagtgagaatgccggtgtgagtagcgagatgtgggtgagaatcccacacaccgaacaaccaaggtttccaggggaaggttcgtccgccctgggtaagtcgggacctaaggccaggccgaaaggcgtagtcgatggacagcaggttgatattcctgcacccgcgagtaaagtgatggagtgacagatagggttancccnagtccttantggattgggcaaggcaagcaggagagtggcgtaggcaaatccgcgccggatactcaaaggcttgactcaagcgaacgcgcgagcaagtagtgaagagggngataccaggtctcaagaaaagcttctagcgataatttactagcggcccgtaccaaaaccgacacaggtggttgaggcgagtagcctaaggtgagcgagagaactgttgccaaggaactcggcaaattgaccccgtacgttagcaataaggggtgctcgaaagagccgcagtgaataggccctagcaactgtttaactaaaacatagctctctgcgaagtcgcaagacgaagtatagggggtgacacctgcccggtgctggaaggtcaaggggatttgtcagacgcaagtcgaagcattgaaccgaagccccagtgaacggcggccgtaactataacggtcctaaggtagcgaaattccttgtcaggtaagttctgacccgcacgaaaggtgtaatgatttgggcactgtctcggcagcagactcggtgaaatcttagtacctgtgaagatgcaggttacccgcaactagacggaaagaccccatggagctttactgtagtctgctattgagtttcggttaagtatgcacaggataggtgggagacgatgagactggtctttngggatcagaggagtcactgttgggataccactcttacttaattgaaattctaactctaagccgtgatccggctagaggaccgtggcagatgggcagtttgactggggcggtcgcctcccaaagagtaacggaggcgcacaaaggtactctcagaatggttggaaatcattcancgagcgcaaacgcagaagagtgcttgactgcgagacaaacaagtcgagcagggacgaaagtcggtgttagtgatccggcggtgcagaatggaatggccgtcgcttaacggataaaagctaccctggggataacaggctgatctcgcccaagagttcacatcgacggcgaggtttggcacctcgatgtcggctcatcgcatcctggaggtgaattcgcttccaagggttgggctgtccgcccattaaagcggtacgcgagctgggttcagaacgtcgtgagacagttcggtccctatctgttgtgggcgttggaaatttgaggagagctgcccctagtacgagaggaccagggtggacgttcctacggtgcaccagttgtcacgccagtggcatagctggatagctgagaacggaccggataaacgctgaaggcatctaagcgtgaaaccgactccaagattagatttcccatcatttcaaatgaataagaccccttgaagacgacgaggttgataggtcagagatgtaagtgtagcgatacattcagttgactgatactaataggtcgaagatttattcacgagagaacgcacacacnactgtttgagaaagacaaagtcagaaactgttatttagttttcagggaacagagtaccctaaagaagcaagatccggtgatgatggcgcagtggccacacctgtacccatcccgaacacagaagttaagcactgtagcggcgaaaatagcgcaagcaaatctagcacgttgccgggtcatcgagagcatggttttccatcgctctccctttttttatactttttatgggtttagatnnnnnantnttancnntnnnaannananntannnnnnnnnnnngnnnnngnntnctnnntgnnnnntttnnnattnnntnnnnnntcnnntnnnnnnnnnnnannanntnnntntnnnntannnnannnnnntnannnnnnnangnttnncnngntngntnntnanttannnnnnngnannannnnnntnnnncagngnntnnnnnaagnnntagnnntnnnncnnnnnntnnnnnnncnnnnnnnnnnantnnnnaannnanannnnnnncgactantgtnnnntcnnntnnnnnnatnncnnatannagnnatncannngnnnntngnnntnnacnnnnnnatnnannnnnanngantnnnanttnnnnnnnnnnnnnannntnnnnnngnnnnnntncnnnngnannannnaannnnttnganncanctnntanagannnnannnnntnannntnnntnnnnngnnatngnnnanangnnnnannnctnnnnnnnnntnntannnnnntnacnnnnnntnnnnanncannnnntnnntantnnnnnnnnnnnnnnnntnntnntgannannnnnttggtnnngnnnnngannnatnnnnnnannatcnnnntnanganattnntnntnnanttgaannnannnnnncanancnntnnttannnannnatnntnntgannannnnnntatnnnnnnnnnnccnngtngnnannnngnnnttnnnnnnnnnnnnnnnantncnnngnnnttnngntnnatnnntnnnnannnannnnanananttnntnnnnnnnngntnnnnnnngnanngnatnatnnnnnnnntgnntnngnnnnnnnnnnnaancnnntntntanntntnnntanaananngnnaannnnnnnnaagnnnnnnnagnngnatanannnnnnancnnnnnaannnannanntnnngnaannntnatnngnnannnnnannnannnnnnnnnnnnanatnntnnnnnaanntnnnnannnantnnttnntnttnaannatnnntnnnannaannnnannannngcanttngtnntnncnnantntttnnagnnatnnnatgnanntaanntnnntnannantgnttnnannnntnnnngaannnnannnnnnnnnnntngnngannnngnnantannngttttncanaannnnnnngnnnnntnnnnnnnntnnnnnnngaanntttnnnanntncnnnntnnnannnnttnntntntgnanannntnnnncnnttntnnnnnntnnnnnnnnnnnnntnanntnngnnnnnnnnnnnnttncnnntantgcngtnngtnctncannnnnnnaannannnnntnnnnaannnnnatnnantnnngntnnncannnngcnnttnnnnnnnantntnanantntnncnttggaantnngtntatnnnatnnnnnnnnnannnnnttnnangnnnnaaannggnntntnncnntnnnnnntnnnaanaannnttntnangangnnnannannnnnntntnntgntnnnannnttnnnngnnnnnnanatnnnnnnnatnnnannnttngaannnanctnnnatgaaacngnnnnnnnnnttannnnngangnanaananatnntntnnaatancnnatnatnacagatnaatnttnatncanantntnntnnngttgtnnnnnnngtnnctannnntatnnannnnnaaaatnnnncaannntnanngnngaannnttananannnnnaanctnnnnntnnnnnanattnntgnnnttnnanatannnnangnnntgntttnnttnnttnnntnnntntnggngtanaannan

SEQ ID NO: 437 - DNA, 4000 bp, Escherichia coli
  misc_feature (1988)..(1988): n is a, c, g, or t
aagatagatcaacaaacaccgtatatagtaccaaaacagaaaatgtttatagagatgaagatggtaattcgacatttgtagatgatatgggcgaagaagtcacctatgatgaattagcacaggatgacccaagatgggcaggtgtaacaaaaagaacagaaaccacgataacatcacatgatgagttagtttcagaagcagatgatcctaatttatattttgatgaaggggatggtgaatataaaccagtggacgaaatggcattggatgatccaagaagggaaccaaaactatccccagaagatgatcctaatatggtatatgatgatgccactggtgaatatgaacctattggcgatcaaccagacaattgggataatggcgaacctgaaccgttattgcctgaaaatgatcctaatatggtatacgatgatgatttgggtgaatatgtaccaaaagacgatataccagccaattgggataatggtgaacctataccacccgaagtggatgctgatgggtgtgaagttgggtattattggtctgaagaagatttgtcatgtgtgccaaacacattagatatgactgaatttggctgcacaaaggatgagagatatgatgatgaggctggttattgcgtgcggaaagacaaatctggggaagattatcaagaaccacctcctgcccctataccaaaagatgtatattcagcaaggcgtgcaaaagcaagcaacaaatcaaccaatgattggcgtgttagactgagtttagcaccacaagcagaatacctttacaataaagctggggatgctggtatattagaaccattgagggctacggatggtgttatattcccatatgtccctaaaattgatacaatttatcatgctacatacaatcagtatgatttaacacatagcaattaccgaggatatttctaccaaaatagttatcctggtgaaatgctgattaatgcaacattcacagcacaagataccaaagaagcaaactatatattggcagtaatccattttttaagatcatgtactaagatgttctatggacaagacgctggaaacccaaacagaggttcaccacctccattggtgtttttaagaggattaggggaacatcagtttaacgaacacccgtgtgttgtgtcgcttatgaactataacttacctgatgatgtagattatatcaaggcaagcgttggtggacgactaggtgcggatacagacccatttacgatgaataatgagtcaaaacctacaggacatcaatcatggagtagtaaaatctctaggttatggcaagctgatctagaacctggtgctacaccgacagcaatggacagtgggggtggtactatgacaataaagggtaggagaagaggaaatcaaggtgtatcaagggttcctactaaattggaggtatcatttaacttattgcctatacaaacaagagatcaagtaagtaatcagtatagtatggacaaatatggcactggtgaattattaaagagaggattctattaatgtataacacaacaagcctgtattttgataccccaataagaggaaatcatttggatatgctagtaaatagaccaattcccaaaagaccagatgataggttgtttgagatcaatgagacttataatttaagacctgatttattggcatatgatttatacaatgattcagaactgtggtgggtattcgcacaaagaaatccaaatacattaaaagacccgttatttgattttaaacagggcactagtataagattgccacaattgacaatattaaaagagacattgggattctaatatgtcagttttgaatagcgcaggtaagatagtattcgatgcacagaaagcgttgttagataaggcgaatacacaaaagccagaactcccacccaaacagatatcagatgcattggctaagttgcctggcacaggaatgaaaattgaacttccgttnaatggaaggttctcttcaaacgcaaacatccccaatatagataatgcaatcccaccatcctctactatgaatgtagatggggccggaactagtaatacaggcactgaatcacctactataccaaataaagaagaacctgtgtcggttaaagatgagacaactgctaatgggacagtgatagctggtgagtttaaagaaaaaatatcagcaaaagagaacccatttaagaaatttggatcatatacttactccgtcagtatgtatatgatgggtgcacaagaatatgcacaaatgatatccacagggaagaaatcagtaaagggattgcctttaatattacagagtggtggaataaacaatactgacccaaccagtaatttcggcgcagtaagaagttcagcgtttgatttggatttttatgtggatgatattgaattcaaagggttagtatctggcacatctactggttcagcgcataatacctttgagatgagttttaaaattactgaacccaatgggttatcattcttggatcggttgcataagatggttcaagattataacattgtcaagggtgttagtgtggatagaattaattatgcatcgcaaaactacttaatggtggttaggttttacgggtatgatgaacaagggaatgcattaagtgcaaaggatttaggaatggccactgatactactgattcgtcaacggtgtcagagaaattcataccattccaatttactgagattaaatttgctattaataatgggttagttgattatcaatgtagggctgtgtgtccacaaacacatttgccaaataatgttgctaacgctagtatattgtttaatgttgagttagaagggcaaacactaaaccaattgtttggtggtgataccttattagttgctgatgcattaaatggcaattcaacaaccccgcccgtgaaagcgacagataaaattgtgacacgagggttagttggtgcattgaatgcagagcagaagcgactagttgaaacaatggtggttgaacatgctaacgtttatgaaataaaatttgaagagacgggtgatggatattcaatagctaatgaatcggtggcaaacctgggggggctagaaaatacaccgatgcagaataattattataatgaacgtgcaattgacaagtatatggagtctaagaagtttgtaaataacgacaaaaaagtattctcagtcccagctgggatgaagattgctgaattcattgacctagcagttagaacaagcacatatatatctaatcaacaaactgttataattgacgaggaaggaaaagcattaaaacaaaaaccaggtggggtatttcagtggttcaaaattagaacacagatagttccattggaatatgataacaaacggcatgattatgcatacaagataacatatgttgttactcgatattttgtaaatgatataaaagcagaaaacttctcgccctctacctatagaggagttcataaatcgtatgattattggtttactggtaaaaatacagaagtattaaactttgaacaggaatacaattatttgtattttcaaacgatgggtgcacaagaaccagttgtagtacgccagaataatgcaagggaattgacaaaacggtactatttacctggtgatgcagaaggttctattggtggcaaaggtggaagtaataaatcagcagataatgcagcaagtattttgtatagtcctagtgaccaagcaaatgcgaagatagatatagttggtgatccagattggattgcccaaagtgaagttttttatagtccacatgtagcattagaagaggttggtttaggcccatttatgcaagatggatcagtgaactatgatgcatcggaagtattattttccataaattacaacaccaatactgactataatgcaatgaatgggttggcagaggtaggcaaggataactatggtaggcaggtaggaagtggtattcctggtgaaagtag

SEQ ID NO: 438 - DNA, 4000 bp, Escherichia coli
  misc_feature (1193)..(1193): n is a, c, g, or t
  misc_feature (1209)..(1210): n is a, c, g, or t
  misc_feature (1214)..(1214): n is a, c, g, or t
  misc_feature (1216)..(1216): n is a, c, g, or t
  misc_feature (1315)..(1315): n is a, c, g, or t
  misc_feature (1327)..(1327): n is a, c, g, or t
  misc_feature (1355)..(1355): n is a, c, g, or t
  misc_feature (1597)..(1597): n is a, c, g, or t
  misc_feature (1933)..(1933): n is a, c, g, or t
  misc_feature (2029)..(2029): n is a, c, g, or t
  misc_feature (2071)..(2071): n is a, c, g, or t
  misc_feature (2122)..(2122): n is a, c, g, or t
  misc_feature (2335)..(2335): n is a, c, g, or t
  misc_feature (2833)..(2833): n is a, c, g, or t
  misc_feature (2840)..(2840): n is a, c, g, or t
  misc_feature (2876)..(2876): n is a, c, g, or t
  misc_feature (2902)..(2902): n is a, c, g, or t
  misc_feature (3664)..(3664): n is a, c, g, or t
tacggatcttgtgaagagtgcagtttcttcctaccattgtaatggggtaaactctattgatgaaacaaagtggtaccagcttgttgtctctgaagaaggagataaagaaggcgaacaagctaatcacgtagacggcactggggcaaacatgacagtgctgacaatggaacgtgattacactaccggaaatttgactttgaccgtaaaaaaaatcgaagaagcagcattgactcattctttatggaagatcacaacggttagagataacgtgaactctcgcgacctgtttgcttatgaaaacatggaaactggctataagctgactttcgatgaattcaacgctttggatctaaatggaagttcagatgcaacaactgttgttaaagaggtagaggctactatcctgaacggttgtacggataattggagatggtatactcacaaggctcaaacgagtgacttcgcacagaaaactgtcttctcttttttccatggcaaagactctgtgatggctatggctttgaatcagaacaacgaagtcgttttggtaaaggagagtgcggtaaaggctgaagacgaagcaaaaagtattaagggactgcttgctgttcgtccgatcattgccggtgcaaaggttttgaatgcggctgaaatcaattcgatgatcgatgctgatggttcttataagaattttattgatatcgctaacaataacacctctgagaatgttacgttaggaggaacgaaagtcaatttcaagttcagcaagacattagataaaaatccgctgaccgaaacttacaaggctgtggcaagcccttatcgtttgttggaccgtgataagtggaatgaaaatactaatgaagtttattccggttacgacatccttcttcaaaacgtaaagacaggtaaatacctgatggtgtctcctgatcgttttgaaaaaccgactgctccaggtgtgtatggcggtttgctgttgaaggatgctgattatcagaagttgaatagtaaaacaaatccgaccgcattggtgaatgccgatccaacaatcttgccggatgtcatcggtaatttggatgctcatcaagctcgttatcatttcaaattcacttattatcctacaaacgacagtttggtgatcgaaccgttgaatgcttctgtaaaagaaagtgaagagatcgactatttgnagagtgacttggtgcnnaaananggtgatgctgtaaagatggtagattacttcaatacggttaatgccggtatcgcttataataatggctcttggggaaatgtcttgtttaacaaggctgcnggtgttccggtngctttaggtgccatcaacaatggaacgngcacttctgatgcaagcgaaatcctgacagtttcagttccttctaacattgcagctgcccaggctaaatataagactttgtgcaaggaagaatttgcttgttcgaaaagttcagttgccggaaatcctgcttatgtgactaattattgtgttaatcatgtaggtgataaaggcactgttgagtacttggcaaacatgggcgtgaagataagctttgacaacttccgcactccattggtacgnacgactgtcaaatccggtctgtatttcattcagttgtctacaactgttcaggatgatcctacttatacggaaaaacgtcataacggttcttatatcgtagctgatatggctggccatttggtttatgatgttaaagatgctaatcaggactttactcatatgcctgccactcagtgggttgttgaagaactgaattgtgatgtgtatgataacgatgtgaatacgaacgaagctgctttagtcaagattactaaccgtgagtatggtatcgaaggtttcgtaggtcagttgtattctgccggtaaggatgccaatgggcaggataagtactatttnatcaatcataagtattctgacggaatgtggaatgaaggtacagatatccattactggggagagaaattcgcatgtcacgatacgttgactttcacngccgtagatccgaagactacttttggttatgaagtgatttcngatgatgtattaaaagaaaacgtctatgcattgcagcagttggtaaacggngaagcagcatggtatctgggtattagtgcagatagcaagaacttaggtttgttgaaagaagatccgactatgttcgaattgcacttgatcggtgaagctacggattatggttatactccggcacaaaagactactcaaccgggcttggctggcattgacactttgaagagagctgtttacgctgttaaggtaaaagatacaaacaaaataganaacgatcatacttatgtagccttggatcatatgcaccgctacgtagttgctgacgaaaaagatatccaggctggtaaggatggtttgacttgggctttgttctatctgaagaacaataatcacgtaggtgaagatcattattactctttggtaaatgcagtaggggtagaaaccggatctttgaaaaatgtcaataccatagctggaaagttggtagtagaagcatctactttcttgacgaaggttgacaacttgtgcagcacatcatctgatgtattcaaattggcaggagatcctcgtcctttgtatgcaaatctggaaggtgacgacgtaatcggagcagcttatagcaatttggtaaacaacaaagaaaaaggcttgaaattaggtgtggatcgcacaggcggttatttgtatgaagatgaaactccgggcctgaactatctgtctcatgaaaacttgaacacaggtgcagacaagagctattctttctatgtngacaaanttgcaaaatccaatgcacgcatgccgcagtatttgnttgtaacagcagcagatagcgtaccngcttacacatattgcattacagaaaaacacggtatcaatccgggatgtgaccatgctgtttcttatccgggttatgtaagcggtcgtttcttggttaacttgaacgattctgttcgtacttctatcgataaagtttctgctacagacaagtttatgtctgacggctatgtaagactggcatttgttgaggctgttcatcgcggtgattctctctatgtgctgaaagctccttacacgttggcttctatctctgttaaggatgtggatggtacatcgtacgttcttcctccttatctgtcaaaagacagtttgggcgttgtttatgacattgtcgatctgaatggcgaacacaacaatgctgcattctctttgagatatgtcggcgatacggaaaatgacggtttcttgctggaatctttcgattatggaatgaaaaatgaagaagatggtacgattgaacatctttctggtatcggttcattcgaaggtgcatgggtgaaattacagaatggtgttcctgttttggctcagatttctgacgatacagataagggcgaccacaatacaggtgacaaccttgctggttcggagtactatgataagatgagttggagtgaagtattgaaccaggctgctatctttggtttgactgaaggtgtaaacggtggtgatgctactgcaaacgaagacgtagaagtatcttctgtaacagtcatcgccggtaacggtcagatcacagttgcaggtgctgccggcaagaangtggttatcactaacatcttaggccagacagtcgctaatacagtggttacttctgataatgctactatcgctgctcctgctggtgtagttgtagttgctattgaaggtgaagacgctgtaaaagcaattgtaaagtaatctcagaataataacattacaattataatcaaataattctaaataagatcgtgcgccgtagagatgcacggcggtgcatctctacaaataacggcaattatcctgcgacaggtgaacaagcgatcgtattattaatactaaagtattgaaataaagttcttctgccagtagcctgtgaaggtcgaaggcagttaaaaa

SEQ ID NO: 439 - DNA, 4000 bp, Escherichia coli
  misc_feature (15)..(15): n is a, c, g, or t
  misc_feature (41)..(41): n is a, c, g, or t
  misc_feature (134)..(134): n is a, c, g, or t
  misc_feature (448)..(448): n is a, c, g, or t
  misc_feature (757)..(758): n is a, c, g, or t
  misc_feature (853)..(853): n is a, c, g, or t
  misc_feature (1272)..(1272): n is a, c, g, or t
  misc_feature (1364)..(1364): n is a, c, g, or t
  misc_feature (1416)..(1416): n is a, c, g, or t
  misc_feature (1458)..(1458): n is a, c, g, or t
  misc_feature (1494)..(1494): n is a, c, g, or t
  misc_feature (1650)..(1650): n is a, c, g, or t
  misc_feature (1791)..(1791): n is a, c, g, or t
  misc_feature (1983)..(1983): n is a, c, g, or t
  misc_feature (1991)..(1991): n is a, c, g, or t
  misc_feature (2481)..(2481): n is a, c, g, or t
  misc_feature (2754)..(2754): n is a, c, g, or t
  misc_feature (2769)..(2769): n is a, c, g, or t
  misc_feature (2874)..(2874): n is a, c, g, or t
  misc_feature (3432)..(3432): n is a, c, g, or t
  misc_feature (3447)..(3447): n is a, c, g, or t
  misc_feature (3510)..(3510): n is a, c, g, or t
  misc_feature (3522)..(3522): n is a, c, g, or t
  misc_feature (3573)..(3573): n is a, c, g, or t
  misc_feature (3705)..(3708): n is a, c, g, or t
  misc_feature (3712)..(3725): n is a, c, g, or t
  misc_feature (3728)..(3728): n is a, c, g, or t
  misc_feature (3731)..(3736): n is a, c, g, or t
  misc_feature (3738)..(3738): n is a, c, g, or t
  misc_feature (3740)..(3747): n is a, c, g, or t
  misc_feature (3749)..(3751): n is a, c, g, or t
  misc_feature (3753)..(3754): n is a, c, g, or t
  misc_feature (3756)..(3756): n is a, c, g, or t
  misc_feature (3758)..(3758): n is a, c, g, or t
  misc_feature (3761)..(3763): n is a, c, g, or t
  misc_feature (3765)..(3766): n is a, c, g, or t
  misc_feature (3768)..(3770): n is a, c, g, or t
  misc_feature (3773)..(3773): n is a, c, g, or t
  misc_feature (3775)..(3776): n is a, c, g, or t
  misc_feature (3778)..(3784): n is a, c, g, or t
  misc_feature (3787)..(3788): n is a, c, g, or t
  misc_feature (3790)..(3790): n is a, c, g, or t
  misc_feature (3792)..(3796): n is a, c, g, or t
  misc_feature (3798)..(3800): n is a, c, g, or t
  misc_feature (3803)..(3806): n is a, c, g, or t
  misc_feature (3809)..(3809): n is a, c, g, or t
  misc_feature (3811)..(3811): n is a, c, g, or t
  misc_feature (3814)..(3815): n is a, c, g, or t
  misc_feature (3817)..(3817): n is a, c, g, or t
  misc_feature (3819)..(3819): n is a, c, g, or t
  misc_feature (3821)..(3821): n is a, c, g, or t
  misc_feature (3824)..(3824): n is a, c, g, or t
  misc_feature (3831)..(3833): n is a, c, g, or t
  misc_feature (3836)..(3836): n is a, c, g, or t
  misc_feature (3838)..(3839): n is a, c, g, or t
  misc_feature (3841)..(3841): n is a, c, g, or t
  misc_feature (3844)..(3846): n is a, c, g, or t
  misc_feature (3848)..(3848): n is a, c, g, or t
  misc_feature (3850)..(3850): n is a, c, g, or t
  misc_feature (3853)..(3853): n is a, c, g, or t
  misc_feature (3855)..(3861): n is a, c, g, or t
  misc_feature (3863)..(3864): n is a, c, g, or t
  misc_feature (3866)..(3882): n is a, c, g, or t
  misc_feature (3884)..(3891): n is a, c, g, or t
  misc_feature (3893)..(3901): n is a, c, g, or t
  misc_feature (3903)..(3909): n is a, c, g, or t
  misc_feature (3911)..(3922): n is a, c, g, or t
  misc_feature (3924)..(3928): n is a, c, g, or t
  misc_feature (3932)..(3938): n is a, c, g, or t
  misc_feature (3940)..(3942): n is a, c, g, or t
  misc_feature (3944)..(3947): n is a, c, g, or t
  misc_feature (3949)..(3949): n is a, c, g, or t
  misc_feature (3951)..(3958): n is a, c, g, or t
  misc_feature (3960)..(3985): n is a, c, g, or t
  misc_feature (3988)..(4000): n is a, c, g, or t
caatgcccggcttgngcaggaatgtcgcttcccgtgccgcnccgacggttccggacacatacaccgacatgccgacgttgtagcccaaattgatgccgctgatgacggcgtccgcgtccggcgcaaggttcatngctccgatgcggcagctgtccaccggcgtaccgaaaattgcccacgcttcatccgcatcgggcacttcgcgcttctccgccagaatcggctgctcgatgctgaatgcatgtgcctttgcgctctgctgcgtcgctggcacgcagaccgtcacccgatgcccggcacgcttgaccgcctgcgtcagaatcggcagaaacgggctgttgatgccgtcatcgttcacaatcagaaagtgcatggttattctccttccgcaggggtcagcgcgaccaagagcgtctgcatgttctcgcgcatccgatcctcatagtangtcagcggcacgtcggtttccgggccggtcacaacggggtcaagcgtgtaaatcggcgcgcccgtctcgcgggaaatcgtctgcgccgccatatcatcgtactgcggctcggtgaacagcggcggattgttcagctcacggatagtgcgcaccagctccgccaattgcgcgggggacagcgcgtcgcccggctcgtggttgacgacggcggcgactgtcaagccatacgcccgcgcaaaatacgggaatgcctcgtggaaggtgacgatgttcttgttcggcacggctgcaagcgtctctttcagctcnncatccagcgccgtcaagcgcgacacataatccgcgcggttttgctcaatctgcgcttcgtactgcggcatggcgctgataagcccgtctgccagnttgtccaccatctggatggcgttctgcgcatcaagccagatatgggcgttcgcttcgcccgcgtggtgatgcccgtggtcgtcggcgtcttcctcctcgtggtcatggtcatggtcgtccacatactcgtccatgccgtcctcggtcagcagcgtgatgccggcggacgcatccaccacgggcagcttcgggaacgtgtccatcacgcgggtgaggtagctttccatgcccgcgccgttgatgaggaatacatccgccttgttcagcaccttcatatcgccggtggaaagctgataatcatgcagacagccggtgttcggcgcggcgaggttgcggatggtgatgccgtcgatgccctgcgtgaggttgagggcgaagaggtagatgggatagaacgacgtgacgacggtttccgccgncgcgaaggtgggggagaggaagatgagcagcgtcaaaagggctgcaagcagctttttggttttcatgtgatgatgattccttcctaaaacantggttgattgggggatgcagtggctgcctgcggcgcattttcccgaaggatncgctccagcagcgctttttccgccgatgacagcgggtaaaantgcatcagcgtccgcatagcgcacaggctgccggangtcatggcgaacgccatcagcgtgtccttcggcattccggttgtgccgagggattcaaagaggacggcaagcagctcatccgccagcaggggaaactcctccatgcggaaacggcgggttcgtccgtccggcatggaaacgcgcatctgcgggccnagaatggcgtataaatcgcggaacaagccatcgcgaagcgcttcgcacaaggcggaaaggtcgtcgcccacgcggtagtgccgcagccgttctgccgcatgtgttccgaccccggaatgcgccagcgctgtcccgattcgnatcgccagcacctgctgcacccggtcaagcggaattgcaatcgccatagcctgtcctcctttgggggagatgcagaatccccgcccttttcatttcgacatccaaaggcaaaatcccttgtttccaaactttttttgcactttttttcgggcggtaattcccagaaaaatatgcaggattcagcataaaatncgccgccncatgaaattatccacaggaacttgtggagaacatagcttctttccacaagattttgttccgccgggctgcaaaacggcatgggtcatgcacaaaaatgacggaatcggaatgcttgcgattttggcgaacctgtggtatgatacaaaaggatgcgaatggacatgaatgcaaaagcatcacaggctcacggccgcaggtcggtcgtgcgcctttttcgcccccttgcgtccccaacgcggacaaaaaagccggtcggacaatgcgtccgcgcaaagaatacggaggaatcccctgatggacatggaagagctgtggtcaaagacacgcgaggtgcttcgcgcggaagtcaacgccgtagtgtacaattctctgctgggcagcaacaacctcgttccggcgctgcttgacggcgatacgcttgtgcttcgcgtggtgatggacaatctgaagctgctgattaccaaccagtggtattcgacgattgtccgngcgctcagccaggtggcgggccatcagatggatgtggaaatcctgacgcaggaggaaatcgaggcgcgtccgcagctgaagcagaaggcggtggaggagcaggagacggtgctggaaagctcggtcgccctgaacccgaagtacaccttcgagacgttcgtcgtcggcagcggcaaccgttttgcccatgccgccgcgctgtccgtcgccactgacccggctcattcctacaacccgctgtttatctacggcggtgtaggccttggcaaaacncacctcatgcacgcngtcggcaacttcatccgcgagcatgaccccagcaaacgcatcctctatatccccggtgaaaccttcaccaacgagttgatttccgctatccagcaggggcggaanattcagttccgcaaccgcttccgcagcgttgatgtgctgatggtggacgatattcagttcatcgccggcaaagaatccacacaggaagaattcttccacaccttcaacaccctgcataccgccggaaagcagattatcctcacatccgaccgtccgccgcaggaaattgcccgccttgaggatcgcctgaagagccgctttgcgtgggggctgacctgcgatatcaagaaaccggacgtggaaacacgaatcgccatcctgcgcgaaaaggcacggcaggaaaacatcacgatggatgaggacgtgtacgaggccattgcgacgcgcgtcgaatccaacatccgtgaactggaaggcagcctgacccgccttgtcgcctatgcgcagctgacgaatcgcccgattaccgtgcagctgtgcgaagaggcgctgcacgacattttcgccaagaaggtgcgcaaggaagtgacggcgcaggttatcatgcaggcggtggcgaactactactccatcacggtggatgacctgattcgccccacgcgccgccgcgaaattgcngttccgcgccaaatngcgatgtacatcacgcgcgacctgacgaacctctccctgccgcagattgggcaggtgttcggnaaccgcgaccanacgacggtgctgcatggctgcaaccagattgccaacgccatcaagaacganccgtcgatggcgagcgtggtgaatgatttgaaggaaatcattgtggacaacaagtgattgcatcaatatgtatattccccctcgtgctgtgttaatacaggcgagggggaattttttatgcggcttgatttnnnncggnnnnnnnnnnnnnngcntcnnnnnngnannnnnnnntnnntnnananacnnncnngnnntgnannannnnnnnacnnantnnnnngnnnggnnnngtnanggnngnancnccnttgcggnnnccngnngnagnnncncnggngnnnnnnngnngnnnnnnnnnnnnnnnnncnnnnnnnncnnnnnnnnnannnnnnngnnnnnnnnnnnngnnnnncccnnnnnnncnnncnnnncncnnnnnnnncnnnnnnnnnnnnnnnnnnnnnnnnnnggnnnnnnnnnnnnn

SEQ ID NO: 440 - DNA, 4000 bp, Escherichia coli
  misc_feature (3)..(51): n is a, c, g, or t
  misc_feature (53)..(60): n is a, c, g, or t
  misc_feature (62)..(69): n is a, c, g, or t
  misc_feature (71)..(82): n is a, c, g, or t
  misc_feature (84)..(97): n is a, c, g, or t
  misc_feature (99)..(99): n is a, c, g, or t
  misc_feature (101)..(217): n is a, c, g, or t
  misc_feature (219)..(241): n is a, c, g, or t
  misc_feature (243)..(246): n is a, c, g, or t
  misc_feature (248)..(260): n is a, c, g, or t
  misc_feature (262)..(264): n is a, c, g, or t
  misc_feature (266)..(316): n is a, c, g, or t
  misc_feature (318)..(357): n is a, c, g, or t
  misc_feature (359)..(417): n is a, c, g, or t
  misc_feature (419)..(421): n is a, c, g, or t
  misc_feature (423)..(509): n is a, c, g, or t
  misc_feature (511)..(536): n is a, c, g, or t
  misc_feature (538)..(551): n is a, c, g, or t
  misc_feature (553)..(560): n is a, c, g, or t
  misc_feature (562)..(568): n is a, c, g, or t
  misc_feature (570)..(580): n is a, c, g, or t
  misc_feature (582)..(609): n is a, c, g, or t
  misc_feature (611)..(612): n is a, c, g, or t
  misc_feature (614)..(649): n is a, c, g, or t
  misc_feature (651)..(665): n is a, c, g, or t
  misc_feature (667)..(672): n is a, c, g, or t
  misc_feature (674)..(690): n is a, c, g, or t
  misc_feature (692)..(702): n is a, c, g, or t
  misc_feature (704)..(722): n is a, c, g, or t
  misc_feature (724)..(727): n is a, c, g, or t
  misc_feature (729)..(729): n is a, c, g, or t
  misc_feature (731)..(733): n is a, c, g, or t
  misc_feature (735)..(739): n is a, c, g, or t
  misc_feature (741)..(741): n is a, c, g, or t
  misc_feature (743)..(773): n is a, c, g, or t
  misc_feature (775)..(815): n is a, c, g, or t
  misc_feature (817)..(837): n is a, c, g, or t
  misc_feature (839)..(840): n is a, c, g, or t
  misc_feature (843)..(913): n is a, c, g, or t
  misc_feature (915)..(938): n is a, c, g, or t
  misc_feature (940)..(950): n is a, c, g, or t
  misc_feature (952)..(963): n is a, c, g, or t
  misc_feature (965)..(981): n is a, c, g, or t
  misc_feature (983)..(984): n is a, c, g, or t
  misc_feature (986)..(986): n is a, c, g, or t
  misc_feature (988)..(1017): n is a, c, g, or t
  misc_feature (1019)..(1046): n is a, c, g, or t
  misc_feature (1048)..(1049): n is a, c, g, or t
  misc_feature (1052)..(1064): n is a, c, g, or t
  misc_feature (1066)..(1070): n is a, c, g, or t
  misc_feature (1072)..(1093): n is a, c, g, or t
  misc_feature (1095)..(1124): n is a, c, g, or t
  misc_feature (1126)..(1177): n is a, c, g, or t
  misc_feature (1179)..(1182): n is a, c, g, or t
  misc_feature (1184)..(1203): n is a, c, g, or t
  misc_feature (1205)..(1237): n is a, c, g, or t
  misc_feature (1239)..(1241): n is a, c, g, or t
  misc_feature (1243)..(1294): n is a, c, g, or t
  misc_feature (1296)..(1296): n is a, c, g, or t
  misc_feature (1298)..(1307): n is a, c, g, or t
  misc_feature (1309)..(1332): n is a, c, g, or t
  misc_feature (1334)..(1346): n is a, c, g, or t
  misc_feature (1348)..(1383): n is a, c, g, or t
  misc_feature (1385)..(1396): n is a, c, g, or t
  misc_feature (1398)..(1402): n is a, c, g, or t
  misc_feature (1404)..(1414): n is a, c, g, or t
  misc_feature (1416)..(1417): n is a, c, g, or t
  misc_feature (1419)..(1429): n is a, c, g, or t
  misc_feature (1432)..(1443): n is a, c, g, or t
  misc_feature (1445)..(1449): n is a, c, g, or t
  misc_feature (1452)..(1468): n is a, c, g, or t
  misc_feature (1470)..(1471): n is a, c, g, or t
  misc_feature (1474)..(1474): n is a, c, g, or t
  misc_feature (1476)..(1478): n is a, c, g, or t
  misc_feature (1485)..(1485): n is a, c, g, or t
  misc_feature (1487)..(1492): n is a, c, g, or t
  misc_feature (1496)..(1497): n is a, c, g, or t
  misc_feature (1499)..(1499): n is a, c, g, or t
  misc_feature (1507)..(1507): n is a, c, g, or t
  misc_feature (1509)..(1510): n is a, c, g, or t
  misc_feature (1512)..(1512): n is a, c, g, or t
  misc_feature (1525)..(1526): n is a, c, g, or t
  misc_feature (1529)..(1529): n is a, c, g, or t
  misc_feature (2237)..(2237): n is a, c, g, or t
  misc_feature (2240)..(2240): n is a, c, g, or t
  misc_feature (2246)..(2248): n is a, c, g, or t
  misc_feature (2251)..(2251): n is a, c, g, or t
  misc_feature (2253)..(2256): n is a, c, g, or t
  misc_feature (2258)..(2269): n is a, c, g, or t
  misc_feature (2272)..(2272): n is a, c, g, or t
  misc_feature (2274)..(2276): n is a, c, g, or t
  misc_feature (2278)..(2279): n is a, c, g, or t
  misc_feature (2282)..(2288): n is a, c, g, or t
  misc_feature (2290)..(2291): n is a, c, g, or t
  misc_feature (2293)..(2297): n is a, c, g, or t
  misc_feature (2299)..(2302): n is a, c, g, or t
  misc_feature (2304)..(2305): n is a, c, g, or t
  misc_feature (2308)..(2308): n is a, c, g, or t
  misc_feature (2310)..(2311): n is a, c, g, or t
  misc_feature (2313)..(2317): n is a, c, g, or t
  misc_feature (2323)..(2323): n is a, c, g, or t
  misc_feature (2325)..(2325): n is a, c, g, or t
  misc_feature (2327)..(2335): n is a, c, g, or t
  misc_feature (2338)..(2343): n is a, c, g, or t
  misc_feature (2345)..(2346): n is a, c, g, or t
  misc_feature (2348)..(2351): n is a, c, g, or t
  misc_feature (2355)..(2358): n is a, c, g, or t
  misc_feature (2360)..(2370): n is a, c, g, or t
  misc_feature (2372)..(2374): n is a, c, g, or t
  misc_feature (2376)..(2376): n is a, c, g, or t
  misc_feature (2378)..(2388): n is a, c, g, or t
  misc_feature (2390)..(2398): n is a, c, g, or t
  misc_feature (2403)..(2405): n is a, c, g, or t
  misc_feature (2407)..(2418): n is a, c, g, or t
  misc_feature (2420)..(2421): n is a, c, g, or t
  misc_feature (2424)..(2431): n is a, c, g, or t
  misc_feature (2433)..(2440): n is a, c, g, or t
  misc_feature (2442)..(2446): n is a, c, g, or t
  misc_feature (2448)..(2448): n is a, c, g, or t
  misc_feature (2450)..(2452): n is a, c, g, or t
  misc_feature (2454)..(2471): n is a, c, g, or t
  misc_feature (2473)..(2505): n is a, c, g, or t
  misc_feature (2508)..(2533): n is a, c, g, or t
  misc_feature (2535)..(2539): n is a, c, g, or t
  misc_feature (2541)..(2542): n is a, c, g, or t
  misc_feature (2544)..(2545): n is a, c, g, or t
  misc_feature (2547)..(2556): n is a, c, g, or t
  misc_feature (2558)..(2575): n is a, c, g, or t
  misc_feature (2577)..(2579): n is a, c, g, or t
  misc_feature (2581)..(2583): n is a, c, g, or t
  misc_feature (2585)..(2596): n is a, c, g, or t
  misc_feature (2599)..(2601): n is a, c, g, or t
  misc_feature (2603)..(2645): n is a, c, g, or t
  misc_feature (2647)..(2657): n is a, c, g, or t
  misc_feature (2660)..(2661): n is a, c, g, or t
  misc_feature (2663)..(2668): n is a, c, g, or t
  misc_feature (2670)..(2796): n is a, c, g, or t
  misc_feature (2798)..(2804): n is a, c, g, or t
  misc_feature (2806)..(2828): n is a, c, g, or t
  misc_feature (2830)..(2891): n is a, c, g, or t
  misc_feature (2893)..(2957): n is a, c, g, or t
  misc_feature (2959)..(2982): n is a, c, g, or t
  misc_feature (2984)..(2991): n is a, c, g, or t
  misc_feature (2993)..(3020): n is a, c, g, or t
  misc_feature (3022)..(3026): n is a, c, g, or t
  misc_feature (3028)..(3044): n is a, c, g, or t
  misc_feature (3046)..(3052): n is a, c, g, or t
  misc_feature (3054)..(3149): n is a, c, g, or t
  misc_feature (3151)..(3182): n is a, c, g, or t
  misc_feature (3184)..(3202): n is a, c, g, or t
  misc_feature (3204)..(3411): n is a, c, g, or t
  misc_feature (3413)..(3444): n is a, c, g, or t
  misc_feature (3446)..(3651): n is a, c, g, or t
  misc_feature (3653)..(3951): n is a, c, g, or t
  misc_feature (3953)..(3961): n is a, c, g, or t
  misc_feature (3963)..(3968): n is a, c, g, or t
  misc_feature (3970)..(4000): n is a, c, g, or t
atnnnnnnnnnnnnnnnnnnnnnnnnnnnnnnnnnnnnnnnnnnnnnnnnnannnnnnnntnnnnnnnntnnnnnnnnnnnntnnnnnnnnnnnnnntnannnnnnnnnnnnnnnnnnnnnnnnnnnnnnnnnnnnnnnnnnnnnnnnnnnnnnnnnnnnnnnnnnnnnnnnnnnnnnnnnnnnnnnnnnnnnnnnnnnnnnnnnnnnnnnnnnnnntnnnnnnnnnnnnnnnnnnnnnnntnnnntnnnnnnnnnnnnntnnnannnnnnnnnnnnnnnnnnnnnnnnnnnnnnnnnnnnnnnnnnnnnnnnnnngnnnnnnnnnnnnnnnnnnnnnnnnnnnnnnnnnnnnnnnntnnnnnnnnnnnnnnnnnnnnnnnnnnnnnnnnnnnnnnnnnnnnnnnnnnnnnnnnnnntnnnannnnnnnnnnnnnnnnnnnnnnnnnnnnnnnnnnnnnnnnnnnnnnnnnnnnnnnnnnnnnnnnnnnnnnnnnnnnnnnnnnnnnnnannnnnnnnnnnnnnnnnnnnnnnnnntnnnnnnnnnnnnnnannnnnnnntnnnnnnnannnnnnnnnnnannnnnnnnnnnnnnnnnnnnnnnnnnnntnntnnnnnnnnnnnnnnnnnnnnnnnnnnnnnnnnnnnngnnnnnnnnnnnnnnntnnnnnnannnnnnnnnnnnnnnnntnnnnnnnnnnntnnnnnnnnnnnnnnnnnnnannnntntnnntnnnnntntnnnnnnnnnnnnnnnnnnnnnnnnnnnnnnnannnnnnnnnnnnnnnnnnnnnnnnnnnnnnnnnnnnnnnnnannnnnnnnnnnnnnnnnnnnngnnaannnnnnnnnnnnnnnnnnnnnnnnnnnnnnnnnnnnnnnnnnnnnnnnnnnnnnnnnnnnnnnnnnnnnnntnnnnnnnnnnnnnnnnnnnnnnnntnnnnnnnnnnngnnnnnnnnnnnnannnnnnnnnnnnnnnnnannanannnnnnnnnnnnnnnnnnnnnnnnnnnnnntnnnnnnnnnnnnnnnnnnnnnnnnnnnngnnaannnnnnnnnnnnnannnnntnnnnnnnnnnnnnnnnnnnnnnannnnnnnnnnnnnnnnnnnnnnnnnnnnnntnnnnnnnnnnnnnnnnnnnnnnnnnnnnnnnnnnnnnnnnnnnnnnnnnnnnannnntnnnnnnnnnnnnnnnnnnnntnnnnnnnnnnnnnnnnnnnnnnnnnnnnnnnnntnnntnnnnnnnnnnnnnnnnnnnnnnnnnnnnnnnnnnnnnnnnnnnnnnnnnnnntntnnnnnnnnnntnnnnnnnnnnnnnnnnnnnnnnnntnnnnnnnnnnnnntnnnnnnnnnnnnnnnnnnnnnnnnnnnnnnnnnnnnannnnnnnnnnnntnnnnntnnnnnnnnnnntnnannnnnnnnnnngannnnnnnnnnnntnnnnnatnnnnnnnnnnnnnnnnntnnagntnnnaaatatntnnnnnntagnnanatttttantnnanttattttcatagnnagntttaacccgcgtaatttttaccatttgcaaccacctgttttgttgcgttttaccaaatcaagacagattttatgaatggaatcattttgcatttgtggaattttatccaatgctaatacaatggaatctatacatacaaagtccgtatagctcatatctcctcttataattcctaatagaaataaatcacctgatattgacaaattatatacaggaaaagattctggatcatattctccactatttctgactttcaagtatttaaattctattaaacgacctattatcgtttttatcttataacttgaaatatcttctatatttagtttagaaaaataataacttaaactttcttttccttctttcttatctgctatcctcaaattaacaatctcttctatttttttataaatctcttctttacttaaaatagtatctttttgggtttctattttttcagaaaagacaataccttttttaggtgtattaaaacaacttaaaaaacatatacctattagtaagctatatagaaatattttctggatcataatcttttataattttaattacgtctatttttttacctaaatccgtaacacgagtttctactatttctgtattagtgtggggttcactattttcaggaatgacagtaattttatagagtttttctatttttttgaaaacaccatcggtttttacttttcnttnaaaaannnatnannnntnnnnnnnnnnnnacnannnannagnnnnnnntnngnnnnnannnngnnatntnntnnnnntataantntnnnnnnnnntcnnnnnnannannnntttnnnnannnnnnnnnnntnnntntnnnnnnnnnnnannnnnnnnnttatnnntnnnnnnnnnnnnannaannnnnnnntnnnnnnnnannnnntnannntnnnnnnnnnnnnnnnnnnannnnnnnnnnnnnnnnnnnnnnnnnnnnnnnnntannnnnnnnnnnnnnnnnnnnnnnnnntnnnnntnntnntnnnnnnnnnnannnnnnnnnnnnnnnnnntnnnannnannnnnnnnnnnnaannnannnnnnnnnnnnnnnnnnnnnnnnnnnnnnnnnnnnnnnnnnntnnnnnnnnnnnttnntnnnnnntnnnnnnnnnnnnnnnnnnnnnnnnnnnnnnnnnnnnnnnnnnnnnnnnnnnnnnnnnnnnnnnnnnnnnnnnnnnnnnnnnnnnnnnnnnnnnnnnnnnnnnnnnnnnnnnnnnnnnnnnnnnnnnntnnnnnnntnnnnnnnnnnnnnnnnnnnnnnnannnnnnnnnnnnnnnnnnnnnnnnnnnnnnnnnnnnnnnnnnnnnnnnnnnnnnnnnnnnnntnnnnnnnnnnnnnnnnnnnnnnnnnnnnnnnnnnnnnnnnnnnnnnnnnnnnnnnnnnnnnnnnntnnnnnnnnnnnnnnnnnnnnnnnntnnnnnnnntnnnnnnnnnnnnnnnnnnnnnnnnnnnntnnnnnannnnnnnnnnnnnnnnntnnnnnnnannnnnnnnnnnnnnnnnnnnnnnnnnnnnnnnnnnnnnnnnnnnnnnnnnnnnnnnnnnnnnnnnnnnnnnnnnnnnnnnnnnnnnnnnnnnnnnntnnnnnnnnnnnnnnnnnnnnnnnnnnnnnnnnannnnnnnnnnnnnnnnnnntnnnnnnnnnnnnnnnnnnnnnnnnnnnnnnnnnnnnnnnnnnnnnnnnnnnnnnnnnnnnnnnnnnnnnnnnnnnnnnnnnnnnnnnnnnnnnnnnnnnnnnnnnnnnnnnnnnnnnnnnnnnnnnnnnnnnnnnnnnnnnnnnnnnnnnnnnnnnnnnnnnnnnnnnnnnnnnnnnnnnnnnnnnnnnnnnnnnnnnnnnnnnnnnntnnnnnnnnnnnnnnnnnnnnnnnnnnnnnnnntnnnnnnnnnnnnnnnnnnnnnnnnnnnnnnnnnnnnnnnnnnnnnnnnnnnnnnnnnnnnnnnnnnnnnnnnnnnnnnnnnnnnnnnnnnnnnnnnnnnnnnnnnnnnnnnnnnnnnnnnnnnnnnnnnnnnnnnnnnnnnnnnnnnnnnnnnnnnnnnnnnnnnnnnnnnnnnnnnnnnnnnnnnnnnnnnnnnnnnnnnnnnnntnnnnnnnnnnnnnnnnnnnnnnnnnnnnnnnnnnnnnnnnnnnnnnnnnnnnnnnnnnnnnnnnnnnnnnnnnnnnnnnnnnnnnnnnnnnnnnnnnnnnnnnnnnnnnnnnnnnnnnnnnnnnnnnnnnnnnnnnnnnnnnnnnnnnnnnnnnnnnnnnnnnnnnnnnnnnnnnnnnnnnnnnnnnnnnnnnnnnnnnnnnnnnnnnnnnnnnnnnnnnnnnnnnnnnnnnnnnnnnnnnnnnnnnnnnnnnnnnnnnnnnnnnnnnnnnnnnnnnnnnnnnnnnnnnnnnnnnnnnnannnnnnnnntnnnnnntnnnnnnnnnnnnnnnnnnnnnnnnnnnnnnn

SEQ ID NO: 441 - DNA, 4000 bp, Escherichia coli
  misc_feature (805)..(805): n is a, c, g, or t
  misc_feature (1066)..(1066): n is a, c, g, or t
  misc_feature (1072)..(1072): n is a, c, g, or t
  misc_feature (1279)..(1279): n is a, c, g, or t
  misc_feature (1364)..(1364): n is a, c, g, or t
  misc_feature (1513)..(1513): n is a, c, g, or t
  misc_feature (1590)..(1590): n is a, c, g, or t
  misc_feature (1989)..(1989): n is a, c, g, or t
  misc_feature (1991)..(1991): n is a, c, g, or t
  misc_feature (2002)..(2002): n is a, c, g, or t
  misc_feature (3024)..(3024): n is a, c, g, or t
  misc_feature (3354)..(3354): n is a, c, g, or t
aaacacgatgacaaacaccacaaggaaagtgtacatagccataaaaggcgtagagaacacatacgtttcaatcactccacctcgtgaaactcgtccttctgtgctttcgacgcgaccaagcgaaggttctatggtatgaactggagctgcagctttctcgacggaaagtggaccgactacagccttctcctcctcggtcgcttcacgctgcacgtcgggcttctgatcggctaaaaagctctttttgaactcgcatttggatccacctccatgcttcaatttgcaatggtactcaaagtgttccttgaacgtgtttggtgccaacttgccaggaattttcatcgcttcgtccaaaacatcctgaactaacttgccatccaaccttaaattcgccgccttacctttcgttaacgagagagagaccgcccagctgtataacatttctgtcacgtcaatttctgagtcatctgaataatgcgttgccgttttcctcgagacaaagagcggcggcgtagccagttggaaattttcatccaacttgacaccgtcagacaacaaacactcttcaaactccacgcacgtcatcgagcacacatcgatcttctcagtcggcgttcggtacgcacgtactaatctcttcattcctcgtcgacttatcaagtacgcctgcgtccctcgaagcgacctggaaccctttggcagcgtcggcaggctccagcccggcgagagccgcctcttgcgctgccagtcgaaaaataatttctcaaccgtctcggcagatcccgaggcggaaagctgagccacngtccaaccctctggcaagctatcgacgtagcttcctaacgtcttcgtccacgtcggcagcaaatctggcgtgacgccgtcttctaagatgagcgcaacctccgctcccgaatcaaaggctgtgtagatcgctcctaagtgcgacagagacgtccctaacgctcgtagatacctatcgctaaatctctgagccactttatcaccgtaatagctctcgggccagctctttcgactgcacgtactagtatctaaagtcttgcgnagagtngacgctctcgtggcgtccaccgtcaacaccctcgttaacttcccgaaagcggcgaacgatctctccatctcgaggctcgacgcgccatccgctctgctattcaaataataaacgtttgacatgagcttttcccgtccactcgcgctcacgctcggctcgcccgcggcgacgatccccgagaacaccaaaccgatcgcgcagcttaanaacatcatcgcgagcctgcctctcccgtcgcgctcacgcccgcgtcggcggtatctggcgttcgagcgcgctcgcgacgcgtccnacatgatacctccgccttcttgcggggtttcgtccgtcgtctcgtcccgatgtcgtcgcgctctgacgctcgcgcgacgcacgtgtcggcggctccgaattcggattcgtctttcgagtcttcacgaatgacgaatcattactcgtcancacgagcgtttggaaaagccaccagaaaacacggcttaggcggcagagttcgttacgcgttgacctcgtctcgtctngtctcgctcgctcgctcaccggggcgatggatgaggacgacgatctcacggacttctcgcgcacgatgtcgtcctcgggcccgtcgtcgtcgtcgtcgtcgtcggaatctggtgaggacgacgaggacagtcgcggacgaagggcagtatcggagcgtctcggtgagccagacatggagccagatatggacatcgacgagcttcgcgagcgacgctggaggttgcgatgggaaaagaattggctcggtaacgacgcctacgtggattggtacgcgggtttacccttgacagtgaagcagacgctcgaagtcaaggctgacttcgaacgtttccaagcgtgtgttcgcgttgcagaagaacgcgtgcggaactacagccgaggtgagcggtctggcctgngntggggggcggnagagggccagaaaggtaggaaatatgagcactttgcgacgaccaaagctggtgcccctccaatcgtgatgagtagcgattcaattcttcaggccctcggtggtttggttccgggagaaagattctacgctccggtccagcaagttgatgaattgactcgtcaatggccggcggatgtttccgagtattcaggaatagagtttccattgggatttcaggctacgcattcagaggatgcgctgagaggctttgttcgtcagcagcacctcgtaacatatgcgagaggtccagacgcaggtttctcattggaaggtctgcgcgaaggagaggatcccgagtggtgttttagaggcggagagctcgagatggtcgatgggaccacttttaaaacaggactcgtcgtcttcatgagagatcccacacgcctgatggacatggctgtcttggaaaaacgtgtctgtcttggaacaaagcacggcggcatcggcactctggttcagtggatagctagaaatgaagacggctcgcccacaagtttggaagataactaccccgcaccagcttgtcacgctaaaaatatgatcgagttccgagctattagcatagtttggtgcgagttaccatccggattcgatctgaaggccgctcagcaaacctatttcctgcacctcttgagatcaagaggagacaggtgctttgccgactgttggtacggcaaaaacataccagactggaagatatactctctagggatctattcgcgccaagattctcgggtgcgtgacagtcgtaaagtgatgactaagattttagaaaagcttcgcagtgttactcacaaatttacagaacacgtcctttggcctgagcagacgtgggaagaaactgaaaactcgctaccaaaatttgctctacatccatcaggcttttcatactgggtgctcaatcaaataccttgtttccattccaagttccgctggcttgtcatgtccgtagatgacacatgttcacgtctcaacctcattntggcgtatctgagtcttcaggaccgaatgcctcagaacaacattccagtgacacacatttgcggacacgttttgacttcaacgagaatgttgcgcccattctcgaacacgttcggtttccttacgtcacacagggaagaagatcatgtgttcccgccgaaagtgatgagtcgtatacttttcaatcccagcggcgactacggtcgatatagcatcgtggcatccgccccgatagacagaaatcacgcggcgcaaccggtcgacgcgtacgaaatgatgacgcaagacgctgcaactgacgtgttcgtgtttactaatcaagcgagtacgnactatacgtggtttgaaggctttggatgggacgcagttcaatgtcctcggtgtgcctggccagccggctttagattcacgccacaaccgcagtcttcggtcaattctgatgaaaacgcgcaacaggccaaattttggtgtctgcatgaaattgatgtcaactggggaggggctatcaagagcgaattgttcacattcctactcggtggcgataccatgaacaatggtttgtacctgccgcaccagttcgacgcggcgtcgcatgcacgtattttcggggcgagacatattacgctgaggcaccaagcttttcctacaggccaagttccttatttaccaacctagatcattttttcgtagttttagcgcagtcgagccacgcggaacacatctggcgcgcaacacgaggatttcgagcaatgcttagggtacacagctcgcgtcaactatccattttgtgaatcatctacgccgcacgcgcatcacacgttgcctcgtcacgcgctgcaaacgccccgggaggtagtacaagtgcgtcttaaatcaccccggtgctccctttcgcttggactggttcgaggcgcgcgtgctcatcgtctaaacgtcactcatgtcgctctctggcggcgttttggttggaacgtccc

SEQ ID NO: 442 - DNA, 4000 bp, Escherichia coli
  misc_feature (374)..(375): n is a, c, g, or t
  misc_feature (377)..(378): n is a, c, g, or t
  misc_feature (380)..(381): n is a, c, g, or t
  misc_feature (385)..(387): n is a, c, g, or t
  misc_feature (389)..(391): n is a, c, g, or t
  misc_feature (393)..(393): n is a, c, g, or t
  misc_feature (396)..(396): n is a, c, g, or t
  misc_feature (398)..(404): n is a, c, g, or t
  misc_feature (406)..(406): n is a, c, g, or t
  misc_feature (410)..(418): n is a, c, g, or t
  misc_feature (420)..(421): n is a, c, g, or t
  misc_feature (423)..(424): n is a, c, g, or t
  misc_feature (428)..(428): n is a, c, g, or t
  misc_feature (431)..(431): n is a, c, g, or t
  misc_feature (434)..(436): n is a, c, g, or t
  misc_feature (438)..(438): n is a, c, g, or t
  misc_feature (440)..(448): n is a, c, g, or t
  misc_feature (450)..(455): n is a, c, g, or t
  misc_feature (458)..(458): n is a, c, g, or t
  misc_feature (462)..(464): n is a, c, g, or t
  misc_feature (468)..(469): n is a, c, g, or t
  misc_feature (471)..(472): n is a, c, g, or t
  misc_feature (474)..(480): n is a, c, g, or t
  misc_feature (483)..(487): n is a, c, g, or t
  misc_feature (490)..(490): n is a, c, g, or t
  misc_feature (492)..(495): n is a, c, g, or t
  misc_feature (497)..(503): n is a, c, g, or t
  misc_feature (505)..(507): n is a, c, g, or t
  misc_feature (509)..(510): n is a, c, g, or t
  misc_feature (513)..(513): n is a, c, g, or t
  misc_feature (515)..(515): n is a, c, g, or t
  misc_feature (517)..(520): n is a, c, g, or t
  misc_feature (523)..(523): n is a, c, g, or t
  misc_feature (527)..(529): n is a, c, g, or t
  misc_feature (531)..(536): n is a, c, g, or t
  misc_feature (539)..(544): n is a, c, g, or t
  misc_feature (546)..(550): n is a, c, g, or t
  misc_feature (553)..(555): n is a, c, g, or t
  misc_feature (558)..(558): n is a, c, g, or t
  misc_feature (560)..(560): n is a, c, g, or t
  misc_feature (562)..(568): n is a, c, g, or t
  misc_feature (571)..(572): n is a, c, g, or t
  misc_feature (575)..(575): n is a, c, g, or t
  misc_feature (577)..(577): n is a, c, g, or t
  misc_feature (579)..(580): n is a, c, g, or t
  misc_feature (582)..(582): n is a, c, g, or t
  misc_feature (584)..(584): n is a, c, g, or t
  misc_feature (587)..(587): n is a, c, g, or t
  misc_feature (590)..(592): n is a, c, g, or t
  misc_feature (594)..(598): n is a, c, g, or t
  misc_feature (604)..(604): n is a, c, g, or t
  misc_feature (606)..(607): n is a, c, g, or t
  misc_feature (609)..(612): n is a, c, g, or t
  misc_feature (614)..(616): n is a, c, g, or t
  misc_feature (619)..(619): n is a, c, g, or t
  misc_feature (621)..(625): n is a, c, g, or t
  misc_feature (631)..(631): n is a, c, g, or t
  misc_feature (633)..(633): n is a, c, g, or t
  misc_feature (635)..(637): n is a, c, g, or t
  misc_feature (640)..(640): n is a, c, g, or t
  misc_feature (642)..(647): n is a, c, g, or t
  misc_feature (649)..(654): n is a, c, g, or t
  misc_feature (656)..(658): n is a, c, g, or t
  misc_feature (660)..(661): n is a, c, g, or t
  misc_feature (665)..(667): n is a, c, g, or t
  misc_feature (672)..(674): n is a, c, g, or t
  misc_feature (676)..(682): n is a, c, g, or t
  misc_feature (684)..(684): n is a, c, g, or t
  misc_feature (686)..(692): n is a, c, g, or t
  misc_feature (694)..(694): n is a, c, g, or t
  misc_feature (697)..(697): n is a, c, g, or t
  misc_feature (699)..(705): n is a, c, g, or t
  misc_feature (707)..(709): n is a, c, g, or t
  misc_feature (712)..(717): n is a, c, g, or t
  misc_feature (719)..(729): n is a, c, g, or t
  misc_feature (731)..(731): n is a, c, g, or t
  misc_feature (734)..(734): n is a, c, g, or t
  misc_feature (736)..(744): n is a, c, g, or t
  misc_feature (746)..(746): n is a, c, g, or t
  misc_feature (749)..(749): n is a, c, g, or t
  misc_feature (751)..(752): n is a, c, g, or t
  misc_feature (754)..(758): n is a, c, g, or t
  misc_feature (761)..(764): n is a, c, g, or t
  misc_feature (766)..(768): n is a, c, g, or t
  misc_feature (770)..(770): n is a, c, g, or t
  misc_feature (772)..(779): n is a, c, g, or t
  misc_feature (781)..(788): n is a, c, g, or t
  misc_feature (791)..(791): n is a, c, g, or t
  misc_feature (793)..(797): n is a, c, g, or t
  misc_feature (801)..(802): n is a, c, g, or t
  misc_feature (805)..(808): n is a, c, g, or t
  misc_feature (810)..(812): n is a, c, g, or t
  misc_feature (815)..(815): n is a, c, g, or t
  misc_feature (817)..(821): n is a, c, g, or t
  misc_feature (823)..(824): n is a, c, g, or t
  misc_feature (826)..(828): n is a, c, g, or t
  misc_feature (832)..(834): n is a, c, g, or t
  misc_feature (836)..(836): n is a, c, g, or t
  misc_feature (838)..(838): n is a, c, g, or t
  misc_feature (840)..(844): n is a, c, g, or t
  misc_feature (849)..(853): n is a, c, g, or t
  misc_feature (856)..(858): n is a, c, g, or t
  misc_feature (860)..(860): n is a, c, g, or t
  misc_feature (862)..(864): n is a, c, g, or t
  misc_feature (866)..(869): n is a, c, g, or t
  misc_feature (871)..(874): n is a, c, g, or t
  misc_feature (878)..(880): n is a, c, g, or t
  misc_feature (882)..(882): n is a, c, g, or t
  misc_feature (884)..(885): n is a, c, g, or t
  misc_feature (989)..(989): n is a, c, g, or t
  misc_feature (993)..(994): n is a, c, g, or t
  misc_feature (996)..(996): n is a, c, g, or t
  misc_feature (1005)..(1006): n is a, c, g, or t
  misc_feature (1009)..(1009): n is a, c, g, or t
  misc_feature (1013)..(1013): n is a, c, g, or t
  misc_feature (1015)..(1015): n is a, c, g, or t
  misc_feature (1019)..(1029): n is a, c, g, or t
  misc_feature (1031)..(1032): n is a, c, g, or t
  misc_feature (1034)..(1035): n is a, c, g, or t
  misc_feature (1037)..(1038): n is a, c, g, or t
  misc_feature (1040)..(1041): n is a, c, g, or t
  misc_feature (1043)..(1051): n is a, c, g, or t
  misc_feature (1053)..(1054): n is a, c, g, or t
  misc_feature (1056)..(1057): n is a, c, g, or t
  misc_feature (1059)..(1060): n is a, c, g, or t
  misc_feature (1062)..(1063): n is a, c, g, or t
  misc_feature (1065)..(1066): n is a, c, g, or t
  misc_feature (1068)..(1068): n is a, c, g, or t
  misc_feature (1072)..(1075): n is a, c, g, or t
  misc_feature (1080)..(1081): n is a, c, g, or t
  misc_feature (1083)..(1087): n is a, c, g, or t
  misc_feature (1089)..(1090): n is a, c, g, or t
  misc_feature (1092)..(1095): n is a, c, g, or t
  misc_feature (1097)..(1099): n is a, c, g, or t
  misc_feature (1101)..(1113): n is a, c, g, or t
  misc_feature (1115)..(1118): n is a, c, g, or t
  misc_feature (1120)..(1127): n is a, c, g, or t
  misc_feature (1129)..(1167): n is a, c, g, or t
  misc_feature (1169)..(1189): n is a, c, g, or t
  misc_feature (1191)..(1192): n is a, c, g, or t
  misc_feature (1194)..(1200): n is a, c, g, or t
  misc_feature (1202)..(1202): n is a, c, g, or t
  misc_feature (1205)..(1209): n is a, c, g, or t
  misc_feature (1211)..(1212): n is a, c, g, or t
  misc_feature (1214)..(1214): n is a, c, g, or t
  misc_feature (1217)..(1218): n is a, c, g, or t
  misc_feature (1221)..(1221): n is a, c, g, or t
  misc_feature (1223)..(1224): n is a, c, g, or t
  misc_feature (1226)..(1231): n is a, c, g, or t
  misc_feature (1233)..(1241): n is a, c, g, or t
  misc_feature (1244)..(1244): n is a, c, g, or t
  misc_feature (1247)..(1247): n is a, c, g, or t
  misc_feature (1250)..(1256): n is a, c, g, or t
  misc_feature (1258)..(1268): n is a, c, g, or t
  misc_feature (1270)..(1276): n is a, c, g, or t
  misc_feature (1278)..(1278): n is a, c, g, or t
  misc_feature (1281)..(1282): n is a, c, g, or t
  misc_feature (1284)..(1290): n is a, c, g, or t
  misc_feature (1292)..(1292): n is a, c, g, or t
  misc_feature (1294)..(1304): n is a, c, g, or t
  misc_feature (1306)..(1311): n is a, c, g, or t
  misc_feature (1314)..(1317): n is a, c, g, or t
  misc_feature (1319)..(1329): n is a, c, g, or t
  misc_feature (1332)..(1332): n is a, c, g, or t
  misc_feature (1335)..(1336): n is a, c, g, or t
  misc_feature (1342)..(1344): n is a, c, g, or t
  misc_feature (1348)..(1349): n is a, c, g, or t
  misc_feature (1352)..(1352): n is a, c, g, or t
  misc_feature (1355)..(1355): n is a, c, g, or t
  misc_feature (1357)..(1358): n is a, c, g, or t
  misc_feature (1362)..(1362): n is a, c, g, or t
  misc_feature (1365)..(1366): n is a, c, g, or t
  misc_feature (1368)..(1368): n is a, c, g, or t
  misc_feature (1371)..(1371): n is a, c, g, or t
  misc_feature (1373)..(1373): n is a, c, g, or t
  misc_feature (1375)..(1377): n is a, c, g, or t
  misc_feature (1381)..(1381): n is a, c, g, or t
  misc_feature (1383)..(1385): n is a, c, g, or t
  misc_feature (1387)..(1387): n is a, c, g, or t
  misc_feature (1389)..(1390): n is a, c, g, or t
  misc_feature (1394)..(1394): n is a, c, g, or t
  misc_feature (1397)..(1397): n is a, c, g, or t
  misc_feature (1400)..(1400): n is a, c, g, or t
  misc_feature (1406)..(1406): n is a, c, g, or t
  misc_feature (1412)..(1412): n is a, c, g, or t
  misc_feature (1417)..(1418): n is a, c, g, or t
  misc_feature (1422)..(1422): n is a, c, g, or t
  misc_feature (1424)..(1424): n is a, c, g, or t
  misc_feature (1429)..(1430): n is a, c, g, or t
  misc_feature (1432)..(1432): n is a, c, g, or t
  misc_feature (1446)..(1447): n is a, c, g, or t
  misc_feature (1449)..(1450): n is a, c, g, or t
  misc_feature (1454)..(1455): n is a, c, g, or t
  misc_feature (1457)..(1458): n is a, c, g, or t
  misc_feature (1462)..(1462): n is a, c, g, or t
  misc_feature (1464)..(1465): n is a, c, g, or t
  misc_feature (1467)..(1468): n is a, c, g, or t
  misc_feature (1470)..(1470): n is a, c, g, or t
  misc_feature (1472)..(1472): n is a, c, g, or t
  misc_feature (1474)..(1476): n is a, c, g, or t
  misc_feature (1478)..(1478): n is a, c, g, or t
  misc_feature (1480)..(1481): n is a, c, g, or t
  misc_feature (1484)..(1488): n is a, c, g, or t
  misc_feature (1490)..(1490): n is a, c, g, or t
  misc_feature (1492)..(1493): n is a, c, g, or t
  misc_feature (1495)..(1517): n is a, c, g, or t
  misc_feature (1519)..(1530): n is a, c, g, or t
  misc_feature (1536)..(1566): n is a, c, g, or t
  misc_feature (1568)..(1568): n is a, c, g, or t
  misc_feature (1571)..(1571): n is a, c, g, or t
  misc_feature (1574)..(1574): n is a, c, g, or t
  misc_feature (1576)..(1576): n is a, c, g, or t
  misc_feature (1578)..(1580): n is a, c, g, or t
  misc_feature (2000)..(2000): n is a, c, g, or t
  misc_feature (2005)..(2005): n is a, c, g, or t
ttaagcggtcgcgcaggacactcagtggcagacgcgcgaggcgtttcatcaacccaatcttgatagtatgtggtgcgccaactgcggacgagagcgcggagcgcgtaaagtatacagatttgcggatacctaagatgagggcgagagcacaccctacaaacacgccaagaaccaatccaagcgctaagatgaggtttcgcttaggttcagagggtgcgagagggggcgtggcatattcaaagactttgaaggtctcaggtttgtatccagcagtaagtgactgcgcttttacttgctcgatcatcacggtgtaagtggcttcggctattgttgcctcacgcgtcaggcgcgcaaattcttctacacttgccgcnntnncnnctgnnncnnntnccncnnnnnnnanttcnnnnnnnnngnncnnaagncgntcnnnangnnnnnnnnntnnnnnntcnacannntcannanncnnnnnnngcnnnnngcncnnnncnnnnnnngnnncnnttntncnnnngangcgnnngnnnnnnacnnnnnnannnnntgnnngtntngnnnnnnnagnnttntnanncntntcnctnnnannnnntgcagnanntnnnncnnntangnnnnntaggancntnnngancnnnnnnannnnnncnnnannctcnnnaagcnnntnnnnnnnantnnnnnnncnaancnnnnnnncnnntgnnnnnncnnnnnnnnnnncnganannnnnnnnngnctntnntnnnnntcnnnnannncnannnnnnnnannnnnnnnagntnnnnnaggnnttnnnngnnntcntnnnnntnntnnncttnnncnantnnnnncagtnnnnncannngntnnntnnnntnnnntgcnnnangnncaggatctgcatgagaaacggtgatggatagggcgcctgtatctgtgctctcgatactcacagatttcaagaaactacgaacaatattatcctctacaattgcncgtnnancacgttcannacnttcncnaccnnnnnnnnnnntnntnntnntnntnnnnnnnnnannannannannannantatnnnnattannannnnnannannnncnnncnnnnnnnnnnnnntnnnngnnnnnnnnannnnnnnnnnnnnnnnnnnnnnnnnnnnnnnnnnnnnnncnnnnnnnnnnnnnnnnnnnnntnntnnnnnnncngcnnnnncnncnagnnctncnngnnnnnnannnnnnnnnccnccnccnnnnnnngnnnnnnnnnnnannnnnnntnctnntnnnnnnntntnnnnnnnnnnngnnnnnnagnnnnannnnnnnnnnnatnatnntgatgnnnatgnnatnaanannatanacnncnaanangnnnaaangnnntngnngagntcnatntcatcntcatcntcgtnnttcncntgttnntnttaatttattaatnntnntagnngnngaanannannancntnnncntnntcnnnnncnannannnnnnnnnnnnnnnnnnnnnnntnnnnnnnnnnnnaaaaannnnnnnnnnnnnnnnnnnnnnnnnnnnnnncnacnacnantnnnttgttgttgttgttgttgttgttgttgttgttgttgttgccttctctgttgccgccacaaccgcggctactgccgcgacagcgactgcagcaactgctattgctgaaacagcgacacctccagcgacggcgccagctgccgctgcgccagctgcggccccggcacctgctgcacccgcgcctgctgctcctgcagcaccgccagctgcaccgccggccgcgccaccggctgccccgccagatgcaccacctgctgcgccaccagatgcaccgctgcttgctccacccgaagcaccacttcccgcacttccggaagagccggcttcttgggcgtacactggcattgcactcaaggccacgactgataatgttaacaataactttttcatagcaattcctgtttctatagagttgcaccttntctancgtttacctcggcttacgatttcaatcaagtctcactttgaaatgatatgatcatttttttgctatgagcgctaatttggagttaaacacacagaataaagcttatttgttgctgcttcggatgaccaaggattgctgaaaacaggcaatcgaaatgctgtaatttgaccaattttggtgggcgacttgtacaacggaaaattaaaatgttgtgcgcgaatcatttaccttgtttgctatgtagggaaaattataaacgttcagtatcaaatccgcggtatttttgctgcgtttggagtcgagattgtgttgaattataagagcctttttacagccgcgttgatttcgagccttgcttggtccgcaactgcgcagactgtgatcaaacaagatacattatctttcgaaggatgcttgaaagtaattgaaataacagcagaacaaatcggggcgccaccaaaagtaaaagtagattttgacaatcggcgcgtggcagaatttatggcgccagatgggacagtcgtgattgaatgtgatggagaaacagaacaggttacagtatccataaagtaagctcatattaaacgacgttttgtccaaagatctgtcattaacgaggatcaagcggatctatttacagtcgattgtatcgcttttgtcctgttgactacttgtgcatttgcagctccttaggaacgcaagccttatcgtatgaacatactatccggttttgatgtcttcgcggcaaattagagaatattaagcatcaacttgtcatgtgtccctgcccagcaatcagcaaatattattatttaaagaacatcgctatgccggcacgaggtgacaaatgttgttttcgaaatttgcattttgggattatttttgagtataacgaattcgaccctgtcgttcacgatttttagatctttcacaatatgtatcattgtgatacttaatttaactattaggttgaaaacacctgagtccgtaatgactttaatggaatatttctttatcaatcgctccacgcgccgtgtagtctcattcagcgtaacacaacattatggtcgcacattgaatgtagggaaaatttaaagataaaaaagcaaagctgatggatagtgtagtgtttcaattgattttaaagcgaactgcaataatgcgatgatagacgtctcaaccatacaaatgattgtgaagaatgtcgtctctgcgcaattgatgatcccatcgattgtgacattcctcatctgtattacaattacgctgttaacgcccgcgcttttcaaattggttcagcgtgaagatgacttaagtgcagtccaggcctctcacattaagccaacattgcgagttggcggactaggtattctgattggcctgctcgttgggctttttctgttaaagcttgatcgtgatttggtatcatttggatccatcatattagtaactgccattccactcgtacttgcagggtttgctgaggacatagggttgcatctgcgtccgtcctttcgcctcggtgcaatagcactttcttcacttttttgtgccgttttactacctaatgttataagtaagcttggtctgatttggttggatgatgcacttgggtattatcccgtagcgcttttgtttacaatttttgccgcgagcggtgtgaccaatgcctttaatcttattgacggattgaatggattggcgagcttcactgcgataacgacgtccgtcgccttggctgcaatcgcgaagatcgctggcttagaccatctacaatatttttatactctgctcaccattgttaccttcgggttctttttgttaaattacccttttggaaagctctttttaggggatggaggagcttatctgttaggtttctgtcttgtgtgggggggtattacacttgccaaccaggtcgcaggattaagtgcatttgccgtactccttattttcttctggccaattgcagacacttttcttgcgatatggcgg

SEQ ID NO: 443 - DNA, 4000 bp, Escherichia coli
  misc_feature (1985)..(1985): n is a, c, g, or t
  misc_feature (1991)..(1991): n is a, c, g, or t
  misc_feature (1999)..(1999): n is a, c, g, or t
  misc_feature (2012)..(2012): n is a, c, g, or t
  misc_feature (2023)..(2024): n is a, c, g, or t
  misc_feature (2026)..(2026): n is a, c, g, or t
gttgccctaataacagggttcacgaaagggcacatatatcgcctgacaagcgggcaaaaaatcccgcactacaagcccaacggacgtactctctatttcaagaaagaggaaatcgaagattggatgctgcaaaacaagatacaaacaaacaccgagattgaaagtgcagccaccacctacacagcaatcaacaaaaaaaagtgagttatggacgatagcctcaatacagcgaaagcccgcatccgggcagcctttgaatccggaatcaggatgacaacggcacagggaaaccgcatcggcaaaaccgtcgatttccgcaaaattgtatcgctcctcaaaagcgagggattcgacatacaaagctattggaacgaaaaggacgggcggcgttggaaaacctactaccaccaatacccgctgccgcagaaagggacacgcatgaatgaattggggcaatccaaactgcaattataaaccggctggggaggcgaggcggcattacgctaaggtggtgatttaagtgcgctcacggacttcgccacctctatttcgcaggttcgaaccctgcccccagcgcaagcaaagcccgaagctgtaagagggcaaaaaaaatcagcaattatgagtgacatcatcgaaatcaaacaggctgagatgctgcaagcaatcaaccgggcggaggtagatacccaaatcgccaccgcaaagcagtaccctcgtgatatttacggggcattgaacaacatcaagacaatcgccacgctcgacaattcgacggcagaagattgtttctatgccctgcgccgacaggggacactcatcgagggcgtatcggtacgcctcgcagagattatcgccggagcgtggggaaatatgcgggtacaaacccgtatcatcggcaacgacggcaagacgatcacggcacagggcgtatgccatgaccttgaaaccaatcttgccgtttcggtcgaagtgaaacgccgtatcacggacaaaagcggcaaaacctactcggaagatatgcaggttacaaccggcaacgcagcatcggcaatcgctttccgaaatgcagttctgaaagtagttcccaaagccgtaacaaaacgggtcatcgacgaaatcaaacaggttgcgctcggcaaagccatagacctcgaaacccgcaggcagaatatgattgcctacttcggcaaactgggtgtatcgcagacggacatcctcacctactgcggcgtgaaacgtatcgaggaaatcaccagcgaaatggtgttcgagttgagcggcttgaaaaacgccataaaggagggcacaacgaccgtagccgaaacattcaagcagaacaccgccgacgcagagaagttggccgaggacgcccgaaaacaagccgaggccaaacgccgcaaggtggcagaggctgccgccgcagctacggctgcaacacaaggtggcggacaaccctccgaaacatcggaggccgtgaatcccgaaacaggcgaagtaacaaaaaaataaccgctcgaaagagcataattcaatataacaatggataacgtagaaatcaaaaaatcgaatctcgaagcagcgtacaaacaagctgacgacaacacgaaaaaactgctcgccacattgttcggcgatgcggtaacaaccaaagacgaccgcccagtaacggagcgtatcaagacgttcgaggacgcaatggctgcactcgacagcaaccacccatttgtatgcgattcccgagcgttttgcgcccaatccgacaacatcagccctgatatgctggcgtatctcaaactccgcatcatctgcgctgccttaaacgagggctgggaaccacagtttacagaggatgagtggcggtattatccttggttttacctctacacacaggcggaactcgacgacatgggcaacggggaaaagcaggagcggcgaatgattgacaccgctgactatgtaactgaatatgcgggcttcggctntgcgtnttcggatnacgccccctcgtntacgaatgcgnncntcggctctcgcctttgcttgcggagcagcgacctcgccatttactgcggaaagcagttcatcaaattatgggctgatttcaacttaacccgcaaataaaaatatcagggagggattttcaccctccctattttcaaaacctcaaaattaacagaaatggatattcaaaacatcgtaaaagacctgcaaaagtggcaggaggaaaacaaagaaaaccggagcgtaatcattattacctctgaatgtatcgcaaaatccgagggggggggtaaacgcaccagcgcatctctcataggggttgttggttcagaagggatgctcgtgccctcccttgcaaatgccattacccaacactccgatttcatcgacctactccgtaaggccacaaaagttgcggcaatagatacaatttcccaaaccattaaagacgtaaattagtatgagcaatacagtaatacgacccaaagaccgagccgaatggctcgaataccgcaaagacggtatcggtagttccgaagtagcgacaatcctcggcctcaatccgtgggaaactccttaccagctatggagacgcaaaaaagggctggacgcccccaaagacgaaacctttgcgatgaaagccgggcattatctcgaagatgccgtatcgcagttttgggctgacgcaacaggccgagaggtcatcaaaagttcagccggagattggttgttcaagaacaacgaaaaagggttcttgcaagcctcccccgaccgtacttattggctggacggccaccgaaacccgaacaacaaagggatattggagtgtaaaacaacccaaatgtcaatcgaccccgacgacctgccgaagcattggttctgccaggttcaatacctgctcggagtttcggaatttaagcaaggttcgctggcttggctctgttccggccgagaattcgggtacaaggacatcgcatttgttccggacttcttcggatggatgattgaggaggttgaacgcttttgggttgataacatcatcggaaacgtggaaccggatgcgactaccgttacggacgttatcacgaaatacgcccgccatacggagggaaaaatcattgaggttagcgatgacatcctctcggcctgcaatcaactgaaagtggtaaaagcagaacttgccaaactcgaagccaccaaagaagaactcgaatcgaaaatcaaaatgggcttcggggatgcagaagccatcagttacggaggccaaaccctcgcaacgtggaaaacgtccaaagacagcgcaaaattcgatagcaaggctttcgggaaagtccaccccgaccttgcacaagagttcacgaagatagtaccgggcacacgccgatttatcctaaaatagagggaatgtatgcaatatcaaaccagcagcgagaggaaattatcaaacttctcgctgctttacaagacctgcccgacaaagataccaagactatcaatatcaaacgccgagcggtcatactgacaaggaagttgaacaataaaaagcagatagacaatgacaccaaatgattttttagggcaattatgggagtataaactgaacagttaaattttcttcgctcaaaatatgattgtattataatcattttattattttcgcaaaaccaaaagtaacagagtatgaataagaaagaacatagcactgtatatgggtgggagtggccgaaaggcctccctacgctcctgttatgcgtggtagccctaaatacggtgctttttaacactatacggctatgattacgttacgttccaatcaatcagagccgataaacaaggcgattgcattcttcaacgaaaagaagccgaaaccgagtttgatagtactccccacagcgtggggaaaatcaatccttactgctttcgttgcgaagaactgcacggataaattgctcgttttacagccctcaaaggagctgttggagcagaactacaaaaa

SEQ ID NO: 444 - DNA, 4000 bp, Escherichia coli
  misc_feature (460)..(460): n is a, c, g, or t
  misc_feature (3370)..(3370): n is a, c, g, or t
  misc_feature (3379)..(3379): n is a, c, g, or t
caatgttgacgtgtcccaagccgcccttaaaccggccaaacacacccacacaaaaatttaacaaacgctcgctgatcgagccggcattcataatgtttgccgcaacgataaacaatggcaccgccagcaatacaaaactgtcataaagaccgtaaattatttgctcaccagcgagtcccacatcttgaccaacaagggtcaaatacacaactgcacaagaaataatggcatagccaatcggcgtaccaatcgacgcgagcaggaacaatgttgtcagacacaatccaaaagccagactcatacaatgcctccagctgcgccaggatcactgagctcttgaccacgccaaagacgcagcaggcctcggccataaattgcaatgctagacagcataaacaccaaataaattgaaaagatataggctagaggaatgcgcaacgttccgctttttttaatctgnaagaacgacacgaaatcgtaagttctcgggaaagccaccaacattgtgacaataattgccagcgccgaaatggcagctaatttgcgacgggtcccgctactaacaatcaaataaatcatgtcaaagcggacatgctcgtcatggcgcaaacaaaatgaagaaccccaaaacacagtccaaagccacaaaataagacacagttctaacgtccatcccaatgggtagttaaaaacatagcgtgcagtaatctggacaacaaatgtcaaaaacagtgccgacagcattaaaacagccacatcgtcagcgcggcgttgcaaccaaatctgtaaatttttcatagctacacaaatgcaattacaaaaaacgcaacgggcactctgagcgcgttgcgttttttatttcaaaacgacggctttacagcgcgtttattttctcaagggcacctttttcccaagactttgacaggtcagatttcaagtaagccgcttgcacgacgcttctgaaagcatttaaatctggtgaataaaccttcaaaccttttgacttcatgaacgcttccaactcaccttcaagtttcaactgcttttgacgaccagattcggcagctgcatcagcggctttttgaacagtggcttgctgatcggctgtcagcttgttccagaccttctggctgatcgtgacgtaattcaaatcgaccaaatggttggtcaacacaatttgcttagtcacttcgtaaaatttagatttttgaaccgttggaagtgggttgtcttgaccgtcaacggcacctgtttgaagggctgtatacacctcaccaaaagccattggtacaggatttgcacctaacgctttacccaaaaattgccatgactctgaacccggcatgcgcagcttgatgcctgccatatctgccggggttttaatgacattgtcagttcgcaagttaagctgtcgacggcccagatacatgatggtcaggagttttacgcccaacttgtcttcaacagtttttttgtatgacttgaaaaaatctgaattgaatactgcaacttgatgagctgcatcgcggtgaacataacccgccgcgaacacaccaaattcaggaaaaaattctgccagctcttgtgcagaagcaatagacatatccaggttgccgcgggaaatagcttccagttcagttccctgcttgaacaacgacgcgttccaatgagggtcaaattcagcaaagctgctgacagctggagcaaaaatttccgttaaagcgatggcacgctcgtcgtttgcggacgcaggcgatgacagacgcagcttgatggtgtcagcagctagcgctgacccaccaaccgcaactaaagacagggcagccgctgcaccgataagactgcgacgaatttttgaaacaaacatgaaaaatctccttgataggtattagcgtgaccagcacccaatggtgcaacggttctaaatcctaacagtgttttagttcatgtactatttagtaaatgacattttcactaggtgtttaccactatttaaggcgttatagcatcttctatttgtgttttttgtaccgagtggtacataataaaaacaccatcagtcttgatgaaagtacagctatgaataagaagtccgaattgcctgatcagctgatgcaggcacatctagaaccgtttaaaaacacatccaaacgtgcagaagatgcacaacggaccaaagccgacatactcaaagctgccgcccatgagtttggtgagaaaggtctggcgggtgcccgcgtcgatgaaattgctgcggccacacgcaccagcaagcgaatgatctattactacttcgccagcaaagatggcttgtacttggccaccctagaagctgtataccgtgcggttagggagtctgaatctcagttgaatcttgatgcaatggcgccagaaactgcccttcgctgcctaaccgccgtgacgtttgatcaccatctcaacaacgaagactacattcgcatggtcatgtctgaaaacatcaaccgtggccggtacttagccaaaagcgcacacgtcaaagagctcaaccgtcctgccattaggctgttaacgcgcatttatgaaagaggcttaaaaaccaatatatttcgccctaatttagaccctgccgacattcatgcatccatctccgcattgtcgtttttcaatgtgtcaaaccaatacacgtttggactcatttttcagcaagacaaccgtgcaccagagtacatagcgaatcgacgcgaaaacgttgttcagatggtacttcgctacgtaatgttgtaacactatgcaacctacttcttacactacaaaccctccggtccgaatcgcagttgcaggcgctggctatataggacaggctcacataggggcgattcttaaaaacaacagctcaactttgagtgccattgttgacccaagtcctaacgccaaaatttatgcagccaacttgcaggtcccatacttcgaggatctagacgtgctgctgaaaagcaacttaacgcaacaacacaccgacgctgtgatcattgctacgcccaaccatctacatgcgcagcaagctttaacgtgcatgcgtatggacatgccagtgcttgtagaaaagcctgtgacacacgatctagcaagtgggcagcagttgcttgaagccttgaccatgtccaaggcgcccgttttggtagggcaccatagagcgcacagcgccattatgaaaaatgcacgggcaatggttcattctggccaactggggaaaatcgtcagtgttgttggcactgcctggttttttaaaccggatgactattttgaaagtagcccatggcgcaaaagcaaagcagcaggtcctttgctactgaacatgattcatgaggtgcacaacttgcgaatgctntgtggcgangtgacgcaagttcaagccatgaccagtcaagccacacgcggttttgaggtggaagatactgcaagcatcacaatgcgctttgacagcggtgtgctggcaagctttgcaatatcagacactgcagcaagcccaaaaagttgggaacaaaccagccaagaaaacccagcctacagcagctacccagaccaaaactgctattacattgcgggcacacatgctagcttggccatacccaccatgaccattcacagctatacaaatacacaacaacgatcttggtggaaaccatttcaagttagtgcgcaacctgccataacagatgacccaattgcaaaccaaatagatcacttcgtgcgcgttgtccgcgcagaagaaacgccgcttgtaagcctacatgacggacttgaaaacctcaaagttgtgcaagctatcgtagttgcggcgagccaagacattacggtacatatggccagttttaaccactcatctgcgatagcttgaaattcaaagaggcacaagtctccaaagtacgcacatgaaaaataactgacgcccaataattcttaccaaccatgtcttcaaaaagaccttctttctaggctgtgatggacatgagaacta

SEQ ID NO: 445 - DNA, 4000 bp, Escherichia coli
  misc_feature (258)..(258): n is a, c, g, or t
  misc_feature (263)..(263): n is a, c, g, or t
  misc_feature (265)..(265): n is a, c, g, or t
  misc_feature (269)..(269): n is a, c, g, or t
  misc_feature (275)..(277): n is a, c, g, or t
  misc_feature (280)..(283): n is a, c, g, or t
  misc_feature (286)..(287): n is a, c, g, or t
  misc_feature (289)..(289): n is a, c, g, or t
  misc_feature (292)..(293): n is a, c, g, or t
  misc_feature (295)..(295): n is a, c, g, or t
  misc_feature (297)..(297): n is a, c, g, or t
  misc_feature (300)..(300): n is a, c, g, or t
  misc_feature (303)..(303): n is a, c, g, or t
  misc_feature (305)..(306): n is a, c, g, or t
  misc_feature (308)..(314): n is a, c, g, or t
  misc_feature (317)..(322): n is a, c, g, or t
  misc_feature (326)..(332): n is a, c, g, or t
  misc_feature (334)..(334): n is a, c, g, or t
  misc_feature (336)..(340): n is a, c, g, or t
  misc_feature (342)..(343): n is a, c, g, or t
  misc_feature (345)..(347): n is a, c, g, or t
  misc_feature (349)..(351): n is a, c, g, or t
  misc_feature (353)..(353): n is a, c, g, or t
  misc_feature (355)..(355): n is a, c, g, or t
  misc_feature (357)..(357): n is a, c, g, or t
  misc_feature (359)..(362): n is a, c, g, or t
  misc_feature (366)..(366): n is a, c, g, or t
  misc_feature (368)..(368): n is a, c, g, or t
  misc_feature (370)..(370): n is a, c, g, or t
  misc_feature (372)..(374): n is a, c, g, or t
  misc_feature (376)..(378): n is a, c, g, or t
  misc_feature (380)..(384): n is a, c, g, or t
  misc_feature (391)..(391): n is a, c, g, or t
  misc_feature (393)..(393): n is a, c, g, or t
  misc_feature (395)..(395): n is a, c, g, or t
  misc_feature (397)..(403): n is a, c, g, or t
  misc_feature (407)..(408): n is a, c, g, or t
  misc_feature (410)..(410): n is a, c, g, or t
  misc_feature (412)..(413): n is a, c, g, or t
  misc_feature (415)..(415): n is a, c, g, or t
  misc_feature (417)..(418): n is a, c, g, or t
  misc_feature (420)..(420): n is a, c, g, or t
  misc_feature (422)..(424): n is a, c, g, or t
  misc_feature (426)..(435): n is a, c, g, or t
  misc_feature (437)..(441): n is a, c, g, or t
  misc_feature (444)..(446): n is a, c, g, or t
  misc_feature (449)..(449): n is a, c, g, or t
  misc_feature (451)..(453): n is a, c, g, or t
  misc_feature (455)..(455): n is a, c, g, or t
  misc_feature (458)..(460): n is a, c, g, or t
  misc_feature (462)..(463): n is a, c, g, or t
  misc_feature (466)..(468): n is a, c, g, or t
  misc_feature (470)..(473): n is a, c, g, or t
  misc_feature (478)..(480): n is a, c, g, or t
  misc_feature (482)..(486): n is a, c, g, or t
  misc_feature (489)..(489): n is a, c, g, or t
  misc_feature (491)..(491): n is a, c, g, or t
  misc_feature (493)..(498): n is a, c, g, or t
  misc_feature (500)..(500): n is a, c, g, or t
  misc_feature (502)..(502): n is a, c, g, or t
  misc_feature (504)..(505): n is a, c, g, or t
  misc_feature (507)..(507): n is a, c, g, or t
  misc_feature (514)..(514): n is a, c, g, or t
  misc_feature (516)..(516): n is a, c, g, or t
  misc_feature (519)..(519): n is a, c, g, or t
  misc_feature (521)..(521): n is a, c, g, or t
  misc_feature (523)..(527): n is a, c, g, or t
  misc_feature (529)..(534): n is a, c, g, or t
  misc_feature (536)..(538): n is a, c, g, or t
  misc_feature (542)..(543): n is a, c, g, or t
  misc_feature (546)..(546): n is a, c, g, or t
  misc_feature (550)..(555): n is a, c, g, or t
  misc_feature (558)..(561): n is a, c, g, or t
  misc_feature (563)..(565): n is a, c, g, or t
  misc_feature (570)..(571): n is a, c, g, or t
  misc_feature (574)..(574): n is a, c, g, or t
  misc_feature (576)..(580): n is a, c, g, or t
  misc_feature (582)..(584): n is a, c, g, or t
  misc_feature (587)..(587): n is a, c, g, or t
  misc_feature (590)..(590): n is a, c, g, or t
  misc_feature (593)..(593): n is a, c, g, or t
  misc_feature (595)..(595): n is a, c, g, or t
  misc_feature (598)..(598): n is a, c, g, or t
  misc_feature (600)..(600): n is a, c, g, or t
  misc_feature (603)..(605): n is a, c, g, or t
  misc_feature (607)..(607): n is a, c, g, or t
  misc_feature (611)..(611): n is a, c, g, or t
  misc_feature (615)..(618): n is a, c, g, or t
  misc_feature (620)..(624): n is a, c, g, or t
  misc_feature (626)..(627): n is a, c, g, or t
  misc_feature (631)..(631): n is a, c, g, or t
  misc_feature (633)..(633): n is a, c, g, or t
  misc_feature (635)..(636): n is a, c, g, or t
  misc_feature (638)..(639): n is a, c, g, or t
  misc_feature (641)..(643): n is a, c, g, or t
  misc_feature (645)..(646): n is a, c, g, or t
  misc_feature (648)..(648): n is a, c, g, or t
  misc_feature (650)..(655): n is a, c, g, or t
  misc_feature (660)..(660): n is a, c, g, or t
  misc_feature (665)..(666): n is a, c, g, or t
  misc_feature (668)..(670): n is a, c, g, or t
  misc_feature (672)..(672): n is a, c, g, or t
  misc_feature (674)..(675): n is a, c, g, or t
  misc_feature (681)..(681): n is a, c, g, or t
  misc_feature (685)..(685): n is a, c, g, or t
  misc_feature (687)..(687): n is a, c, g, or t
  misc_feature (689)..(689): n is a, c, g, or t
  misc_feature (692)..(695): n is a, c, g, or t
  misc_feature (700)..(702): n is a, c, g, or t
  misc_feature (856)..(856): n is a, c, g, or t
  misc_feature (1963)..(1963): n is a, c, g, or t
  misc_feature (1992)..(1992): n is a, c, g, or t
ccgcttggcctcgatcacctcggccaccagggtgatggcgtcggtgtgcaggcctggatctccgcccgcggccagccaggggagattggcggagttgccgcctgagcaccaggaaagccgccacatcgcgcaaagcctggtcggaggccgcctggccccagcgatgccgcacctggctgaagtggtcgagctgcaaagccagcagggccaggggctgaccgctcagacgggcgcgaccgatctccggctccgcttgcnccagnangctncttcgnnncannnngcnncnganngnangcncgntnncnnnnnnncgnnnnnngagnnnnnnngncnnnnntnngnnnannncntncngnnnncgcncntngnnncnnntnnnnnggcgagncnancnnnnnnngacnnananngngnngngnnngnnnnnnnnnngnnnnngcnnnggngnnncngcnnngnngcnnntnnnngggtnnngnnnnncgngngnnnnnntncngnngngtgggtncnggngngnnnnngnnnnnncnnnggtnncgncgcnnnnnntgnnnngnnngcaannggncnnnnncnnnggngtntcngnggngnccnnncngtgntggnnnngnnnnnannggcngncnncnncnnncnngnannnnnnggcgntcggnntnnncngnncggtgnaggncnancgnnnnagccnnnctaaatatgcgtcgccgggatgattcagcaccccgatgcgttccaggtcccgttgccgcagcgcttcgtccgcgggaatcggacagtcgggatacggtgtaaccgcgtgccgaggatctccagcctaggaaggttgatctcgccatgattgagngatcccgaatggctgcgatcccatgtccctctctcaggaagcctgcatcccctgcaccgaaggtgctcccaccctcagcgacaccgagcttgccgccctgctgctggagctgccgggttgggaggtgatcgaggcgcaccacctgcacaaggcctggacctttcccgattttcagcaggccctcgattgggtgaaccgtgctggcgcgatctgcgaggccgagggccatcacgccgagttcactctgggctggggccacgctgaagcgctggtgtacacccacaaggtggatggactcacccgcgccgatgcggtgctcgcagccaagttggatcaggcctaggtcgaggtgctcaggtcgaggtgctcaagtcgaggtgctggcacttagaccggttgggcggcgttcttcacataatcttccgtagagaacctgctgctccagcctcgatctgctccaaatctccatagggtccgcaaaacgtgtagttccgtcatggcttcccgggaggagctccactccagcggtgatctgtttgagccccgcagcttggagtggcaagacaacggtgagctggctgccagcgaagtctttgagctggtcaagcgtttgcgggcggtggaatctggcgagcacgtcaacgagttgtggcggctcagccagaagccctgaacccaacattgcagcgcccgcgctgcagatttgcgtgcattgaacaccgccagatcgcatcaaactgatgacagcgatggaaggaggatgtgttgtttctcaaattgcatgatgcaaacgacgagagcctggtggaggtgctcgatctgaagcacctgatggatccgtttgtcgccgatgtgctggtgcgtctccatgccggggaggagcttcaggaaccgggtcccgttcggaaggatcatctggtctttccctccggggaggtgctgccccgctgctggttgcagctcaacggccaggcctgaggccttccgcctttgggggagggcgccatcgtgttggcctggtttgctcccgctgacagcaaagccccgctgatcccctggcccgctgctcccggatcgtgatctgctgatacgcccgaccaaaagganggaagaccgacaaaattgccgcacctctnatcgatatgcgcagtggcgtgctcctcaggttttccgatgtccggtaacaaccttgatgcgagcgacctcaccctgcggcagttgcgccacctggccagcaacctcggcatcgggcgctacagccgcatgctcaaggagcagctgctgcgagcgatcgagcgtcaggcgccctctcccggcgagcctgggcagggcccggctgatctccgcgccctggaggcgggcatggctccggcccctcggccggaagcccagacctcggtggtctttctgccgcgtgatcctcaatgggcctatgtgttctgggagctgtctgattccgatcggcgtcaggcgatggccgacggagccaatcagttggtgttgcgcatcgccgatgtcaccggcctgggcgatggaggcacccatccccacaccatgcaggaagtggtggtcaacagccatgccaccgagtggtacctgccggttcccctgagtgaccgtgcctaccgggttgaactggggtatcgggatgcggggggtggttggcgctcgttggcgtattccgccgtggcccacgtgccctcgctccatcccagcgagctgatcctggatcaattcgtgcctttcacccttgaggctccggtgacggaggcagccgctgcgccgctgctgtccgaggccgcgccgggaattcacgaacgcgtttaccaggtggccacctccacctggcgggcgacgggccgcggttctgaggccttccatgagatggatgctttcgctgattccagccaggggctcaacgcctccggtgctggtgtttgggccagcggccgcactgcatcgggtgccggtggggtggcctcacgccagcgctccttctggctggttgccgatgccgaattgatcgtctacggcgctaccgatccctcggccaccctgcgcatcggcgaggagttggtgcccctcgccgaagacggcaccttccgcatccaggtgccgttccgcgatggacagcagctgtatccgatcacggcggtggcggccgatggcgaacagcgccgccacatcaccctcgacttcagccgctccacccccgacgccaacgtcaacacggtggaggacgcggtcgccgagtggttctgaggccctcagggcaccagattgacgagcttgcctggcaccacgatcacgcggctgggtggtttgccctccagccatttgctggcgatgtcactgtccagggccaggcgctccaaggtggccttgtcggcatcagcgggcacgtcgaggttgccccttaccttccccttcacctggatcaccagcgggatcgtgtcgcgcaccagggcgctggcatcggcacgcggccaggcctggtggtgcacgctcgtttggccatcgggattgccccccaaccgctgccagagctcctcggccaggtgcggcgcgaacggcgccagcagcacgagcagggcattcagggcttcggaggccacggccggggaagccgcctgcacgtgctcgcccatggcgttgctcagcttcatcagctctgagacggccgtattgaattgatagtcgccgtcgaggtcgtcgctgatctcggtgatcgcggtgtgaacggcgcggcgcagcgctttgtcttccgggctgagggtggagagatcgctctctacaccgtcggcgtccagtccaaggccccgcgccacggccccctccaccaggcgccagagccgctgcaggaagcggaactgaccctccacatcggcgtcatcccactcgagatccttctcgggcggcgccttgaacaggatgaacatgcgggcggtgtcggcgccgtacttgtcgatcaccacagccggatcaacgccgttgtacttcgacttcgacatcttttcgtagaaggtttccagcacctcgcccgtgatcggatcccggggatcgctgggatcggtcacatcggccggggcgatgtacttgccgctgtgggggttcttgtaggtgatgccttgcaccatgccctgg

SEQ ID NO: 446 - DNA, 4000 bp, Escherichia coli
  misc_feature (1)..(5): n is a, c, g, or t
  misc_feature (7)..(14): n is a, c, g, or t
  misc_feature (16)..(18): n is a, c, g, or t
  misc_feature (21)..(30): n is a, c, g, or t
  misc_feature (33)..(33): n is a, c, g, or t
  misc_feature (36)..(38): n is a, c, g, or t
  misc_feature (41)..(48): n is a, c, g, or t
  misc_feature (51)..(63): n is a, c, g, or t
  misc_feature (65)..(65): n is a, c, g, or t
  misc_feature (67)..(67): n is a, c, g, or t
  misc_feature (69)..(69): n is a, c, g, or t
  misc_feature (72)..(74): n is a, c, g, or t
  misc_feature (76)..(80): n is a, c, g, or t
  misc_feature (82)..(82): n is a, c, g, or t
  misc_feature (84)..(84): n is a, c, g, or t
  misc_feature (90)..(90): n is a, c, g, or t
  misc_feature (93)..(93): n is a, c, g, or t
  misc_feature (95)..(95): n is a, c, g, or t
  misc_feature (97)..(97): n is a, c, g, or t
  misc_feature (99)..(105): n is a, c, g, or t
  misc_feature (107)..(108): n is a, c, g, or t
  misc_feature (110)..(112): n is a, c, g, or t
  misc_feature (115)..(116): n is a, c, g, or t
  misc_feature (119)..(120): n is a, c, g, or t
  misc_feature (122)..(122): n is a, c, g, or t
  misc_feature (124)..(125): n is a, c, g, or t
  misc_feature (127)..(128): n is a, c, g, or t
  misc_feature (130)..(134): n is a, c, g, or t
  misc_feature (136)..(143): n is a, c, g, or t
  misc_feature (145)..(145): n is a, c, g, or t
  misc_feature (151)..(151): n is a, c, g, or t
  misc_feature (153)..(154): n is a, c, g, or t
  misc_feature (157)..(162): n is a, c, g, or t
  misc_feature (164)..(164): n is a, c, g, or t
  misc_feature (166)..(170): n is a, c, g, or t
  misc_feature (172)..(173): n is a, c, g, or t
  misc_feature (177)..(177): n is a, c, g, or t
  misc_feature (180)..(180): n is a, c, g, or t
  misc_feature (200)..(200): n is a, c, g, or t
  misc_feature (205)..(205): n is a, c, g, or t
  misc_feature (227)..(227): n is a, c, g, or t
  misc_feature (252)..(253): n is a, c, g, or t
  misc_feature (295)..(295): n is a, c, g, or t
  misc_feature (303)..(303): n is a, c, g, or t
  misc_feature (312)..(312): n is a, c, g, or t
  misc_feature (316)..(316): n is a, c, g, or t
  misc_feature (334)..(334): n is a, c, g, or t
  misc_feature (383)..(383): n is a, c, g, or t
  misc_feature (424)..(424): n is a, c, g, or t
  misc_feature (472)..(472): n is a, c, g, or t
  misc_feature (497)..(497): n is a, c, g, or t
  misc_feature (742)..(742): n is a, c, g, or t
  misc_feature (916)..(916): n is a, c, g, or t
  misc_feature (1474)..(1474): n is a, c, g, or t
  misc_feature (1546)..(1546): n is a, c, g, or t
  misc_feature (1732)..(1732): n is a, c, g, or t
  misc_feature (1765)..(1765): n is a, c, g, or t
  misc_feature (2006)..(2006): n is a, c, g, or t
  misc_feature (3223)..(3223): n is a, c, g, or t
nnnnngnnnnnnnngnnnggnnnnnnnnnnccntannnccnnnnnnnnctnnnnnnnnnnnnngncncnccnnncnnnnnangnaaaaanaanangntnnnnnnntnngnnnttnnaannanannanntnnnnntnnnnnnnntncccccntnnaannnnnnancnnnnnannaaanatntacaaaataaaaaagacgtnttcgntgtcttcgccctgagggttaangtccctcaggtcccttcccttcacnnctggacccctgtccagcctccgacgtcttctgcctcccaacnggggaggnctttttagngatngccccggtgttctggggnggtcccttgatcgtcaacacgatcttggcaccctcggtggtgttgggtnccttggcagcctgaatgaccttggctgccttggctgctttngcagccagcctcttccgcttccgtttctccgctggagtggctttgggnggatccagggcgagtcccgggattnccctcggcgtgccagtcgccaacttgcccctggttcccgtgggtccagacgcgcctcggctctgtgatgtctcgttggaagatgtcgataacttggccagcttatcctccaaacctgtggaggctggtttagttaccgactcttttccaacgacctccgcgtaagatattggctgttcggaagctgtaagtacttctggaggagggttgggagaaggctgagcagtgctcaagtgagcctgctcntaaacgaccaacttaccatctaccaagtgataaatttggccttctctcaaatctcctacaggcagggcaacagcgggtgtcatctccacatctgtgtccaaggactcaggtgtagagctgaccacagctgaacttgctagttcccgagctggagcttgaaccagaatttcttcnggttctgctgccagcttggaaactttgttagccaagcttttagccttgcgcttactgagtcgatcacgattcttctgctttttctttaaagaatcgtctaactcagcctcttcagacttgtcaatcaagtctaccatttcgccttcatggatgctttcaccaaagcgccggttatgataaaccaggctacggcgaaacctatccatagcggactggtagagatgagccttcctagtaagcctggcaaaagactcagtcctcttggcagcccgcaattgcacggcctgttcttgaggactaagtttgccaaccttaataggcaaactgacagcttttgctgaacctgctttgggctgtgacccagaagcaacttcagccacctttctcttcttagagtcagacggagctgacttctttgaaggagcagatggtttgggctgtccttgactagcgctaatagcttgattaccctggtaattgtattgtacctgagggggtggggccattggaggagcgccccacaccggtccataaggcccatagtaaggcatcctccanggctccggaggaccccagtatgctgggtttgtggcccatggacgcccgtaggtccaaggaccgctcttttgncctcgccccttctgcggataggattgttggtccgacatctggaatgttttgaaaaagccaacattagaaactgagaataagtttcccgtagttgccttgtagcaagcaacttctctaacttattctaattgttcacagattttgaaaaatggcttacacaaatttcatctcttcctgttatggcangctcgctttttgcacaaggcaaaaatgctagantgaacacacaggaacttagaaagctagagccttgcctatggcgcgaacgccaaagctctagctttgcagtattttaaagtaaaataacaatgcaaagatgaaattcattttattagatccaacaatcattaggaagttatgttttctctaatcgttattcagcgggttacaattagctacttcagcagagcccctaaataacttttgattaagtggtattagattcacaatgggtctaagntactgacccttgctattacggattgtgactttgcgaactttagagtcatcagaaggatgaatttgctcaacaatagctagcttccagcaacctcttggctgggtggaatcaacttccacaactaaatctccctctgccaattgtgtgtgttctacttgccacttcttggtgttcctaagctccaataaagttttgttcaagaagatactccaaaattggtctaaaacttcgcaaactctatgccacctttgggaatgtgaggtaaaagtttcagtagttacgctaccaccaagattaccaaaaagaaagtgatttggggtaaggatgatatccccctcactaagtgaaagtctactcagtggtctactgtttactaaatttgccactttgtaagctacagtccgaaattcatccacagttaggtctgaatagtggcacagactttccagagctcttttagctactcctaccatacgttcatatacacccccatggtgaggtcccctgggtgggataaagtaccaatgaactttggctttagtagtagagatgagatcatttaactgtattgttcttacccagctttctaagtccttatctttagatacgaaagtcgagaaattgtcagaaagaatggacatcggcatacccctaatatcgacaaaccttgatatcgcattaagagttgcagacatcgacattgcctctgtcaactccaagtgaactgctcgagtctggagacaagtaaatagaagtaagtaagttttcggtttagctttacctctacctgctgcttttaattcaaaaggaccagcaaaatctaagccacactgagcaaacgcccttaaaggtttctgaaagcgccaactaggtagcgctgacatctgttgcttcagcggaattgctaaatatctctgacaggtgagacatttcgatcttactgttttaagaaagttttctaaacctaacatcacgtagcctttgcttatttctgacttgcaacagtcattccctactgtatgtgcaaacttaaaatgaaaagagcatatcatgagttgagtaaaaggatcttgtctatcaaggatagcaggaaatcttacctcgtagtctaagtagtcaacctttgctagcctactttttgaccttaaaatacctgctttgtctatgaatggcaagaaacttctatagggtttagaaattgacttttctgtccttanttgatgcataatttcttgaagagccagactattagcttgtgaccttcttattagaaatcttagagctactttgctagccttaggataatccctcctagggtttgctagcttaaagacttcagttgccaaacttataagtcggtcaaagccatcccagactttccctacactatatctgcatggatctaatagactaagttgagctatgtctatattgccaatgaacagtttcttaaactcatttttagcttcatcatctacttcagtaggtggaacaaatggcttaggccaacttgtcatggaatcagacaagaagcgtggcccattccaccaaagagaactttccgctaaatcagagatttttggtagtctagttgggatatctgctggattcatatcagttggaatatgcttccattgacttggattgctatgcgtatggacttctcctactctattagaaacaaatgtttttaagttgctggatggggaatttatccagtacaaacaatttgtggaatcagtccaaaatgtaatagtgcttttatctaagtccaaagcattcgcaactgtcagaccaagtcttgtgccaatgacacatgctgctagttcaagtctactaacagattctgtcttagttggcgttactctagctttcgctgtaatgagtgttactgcaatacaatgattctgattttccccccttgcagtgacaccattatcaagatcattagcttctggtttctctaaaattcgtgcatagactgtagctgcaaa

SEQ ID NO: 447 - DNA, 4000 bp, Escherichia coli
  misc_feature (1032)..(1032): n is a, c, g, or t
  misc_feature (2723)..(2723): n is a, c, g, or t
  misc_feature (2768)..(2768): n is a, c, g, or t
gtgttttcgcgccatgccacaaccgtaactttgtgcctattcgataacgcggggatcgaggttcgccagattgctttgcctgaaagacaaggtcatgtctggcatggttacatccccggacttagaaaggggcagcagtacggtttccggatggacggcccgtataagccagagcaaggtcacaggttcaatcataacaaactgctgattgatccctatgctaagcaactgaccgggcaccccacgtggaatgatgcgttgttcagttatcaaccgggccacaagaacaaagacctcagtttcaacaaacaggacagtggaccatatatgccgcgtagcgtggttgttgatccgtatttcgattgggggacagtgacggccccgggtcatcatttgaaagacaccatagtttacgaggctcatgtcaaagggttgaccgcagggcatccacggattccaaatcctggaacctatgcggccatggcgtctgatccaatgttggaacacctgaacaaattgggaattacggcggtggagctgttgcctgttcaggctttcatgaacgacaagtttttactggatcgagggctcacgaattactgggggtacatgacttacggcttttttgcccctgacccgcgttacatgaaggggggcgatattgctgagtttcagcaaatggtccgccgttttcattctgctgatatcgaagtcattctggacgtcgtttacaaccatactgccgaagggtccgaactgggtccgacgctgatgttccgtggtttggacaatgccagctattaccgcctacacgaaaacccgcgctactatactgatgattccggttgcgggaacacgctggattttgaaaacccgtttgtcatccgtcttgtgatggacagcttgcggtactgggtcgaagtcatgaaggtcgatggtttccggtttgatttgtgttccaccctgggacgcaccgcacgcgggtttgaacgcgatggcccgttttttcgtgccatcgggcaggaccctgtnctcaacaaggtcaagttgattgctgaaccgtgggacattggtccgggcgggtatcaattgggggcctatccgtcgccgtttttggaatggaatgataaataccgcgacgacacccgagaattttggcgcaggggcagtggtacgtttacgcgtatggctgaacgtttggtaggatctgcaccctattttgaccatgatgggcggcgcgcgaacagttcattgaactttgtgactgctcacgatggattcacgctgcaagatacggtcagctataatagcaaacataatctggccaacggcgaagacaaccgcgatggccattccaacaaccagtcggacaatatgggcgttgaaggaccgactgatgatcccgccatccgtgcggcccgtcaacagcgcaagcgaaacctgatcacgacacttatgctgtcgcaaggcacgccgatgatcttggccggtgacgagttggggaattcgcagcagggtaacaataatgcctattgccaggacaatgaaatcggctgggttgattggtcgggcatcgacaaagattttttggagttctgccagcaggctattgttttacgcaagtcacacccgatcctgcgccagacgcggttcctgcattcacgtcaacgcaaatatgatggagaatccgatctgttctggcgacgcgctgatggaaaactaatgcagcaatcagattgggacaattctgatctaggaactttgattgcggaactccgcaccgctgcaggatcgccgacttacgtaaatcgccaacgtgcattgctggtcgttctgaaccgtggccctgcggttgaagtgatcctgccgggtttgcgtgaaggggatatctggacgcgtagttttgatactgcgcacaatcagtccttagacggcacgtatattgatgcggacagcgttgtcgtgtttaccaatgaggccgacgctatataaagcaaaattcacccttgaccaacggagattacaccatgccaatgcaaactgttcgaacgactcccattgaaggtcagaaacccggaactagtggattgcgtaaaaagacggcggtgttccgattgcctcattttctggaaaattatgttcaatcaatttttgatggaataggtgggatcgaaggaaagacgttggtcgtgggcggtgatggtcgcttctttaacgacgatgcgatccagatcattttgcggatggcatcggccaatggggccgttcggtgtattgttgggcaagacggcatcctttctacacccgcggcgtctcatttgatccgcctgctggaatctgacggtgggctaatcctatcggccagtcacaatcctggcgggccagacgcagacttcgggttaaagtataatggcaaaaatggcggaccagcgtcggaggccataacggacaagattttcgcccgaacccaaacgatagattgttacaagatcgtcgccgcggacaatatcgacctgtcaacgcttggcacgcttcatatcgaaggcatggcggtggacatcgtcgaccctgtttccgattatgcagccttgatggaaacgatttttgatttcgataaaattcgcgcgttgttcgcgggtgggtttaccatgtgctttgatgcaatgcatgccgtcactggaccttatgcgcatactattctggaagacatgttgggggcaganaaaggaactgtaatcaatggtttgcctcgttctgatttcggcaanggtcatcctgatcccaacccaatttgggcaaaggaactgatggacacaatgtatagtggggctgccccagattttggggcagcgtccgatggggatggcgatcgcaatatgatcgtgggacctggcacctatattacaccgtctgatagcttggcactgttgactttcaaggcgcatttggcccctgcttatcgagccgggttatcgggcgtggcgcgatccatgcccacatcgcgcgctgtagatcgtgtggccgaagggctaggcattccctgttttgaaacacccaccggttggaaattttttggaaatctgttagatgcaggcaaggtcacactgtgtggcgaagaaagtgcaggcaccgggtctgatcacgttcgtgaaaaagacgggctgtgggctgtgctactttggctgaacattttggcagaaacaaagacatctgtggccggtttgatgacggatttgtgggcgacgtacggacgttgttattattcccgtttggattatgaaaatgtggatagcgataaagccacgcagttattcggctctctgcgagcaaaacttgacggtttatcgggtcaaaactttggtgaccttgaagtcgaaaatgcagacgagtttgaatatttggatcctgtggacggatcaacgtcagccggccaaggctttcgcgtttcatttatcgggcagtcgcgcgcggtgttccgtttgtctggtaccggaaccagtggtgctacaatccgcatttatctggaacagctgcaaacggatgcaaatcacctggatgatgatccgacgcaggtgctgcacccggttcgggatgcagctttggaactgtcagatctggcggcaatcaccggccgcacgaaacccgatgtgataacgtgacctaaataaccgccatgtcactgtgggtcagataagcaaacccgttgccatccaaagttaggatggaactatcgatggatgcgcttgacccacagatgatatcagccgcaccaatcaaggaaatggtgtgcttgtctttggacaggttgaagacacaggtgatatgttcagcaccctgcgtacgggtgaatgccaacaagggttccgccaacgcgataaaacgcgtcgaaccatgcgagagaacagagctgtttttgcgaaacgcaatcatggatttgtagaatgccataatcccgtcatcgggttgttgtttaactgcatttgcggtttgcggtggcttt

SEQ ID NO: 448 - DNA, 4000 bp, Escherichia coli
  misc_feature (74)..(74): n is a, c, g, or t
  misc_feature (146)..(146): n is a, c, g, or t
  misc_feature (257)..(257): n is a, c, g, or t
  misc_feature (386)..(386): n is a, c, g, or t
  misc_feature (389)..(389): n is a, c, g, or t
  misc_feature (404)..(404): n is a, c, g, or t
  misc_feature (644)..(644): n is a, c, g, or t
  misc_feature (842)..(842): n is a, c, g, or t
  misc_feature (884)..(884): n is a, c, g, or t
  misc_feature (1234)..(1234): n is a, c, g, or t
  misc_feature (1258)..(1258): n is a, c, g, or t
  misc_feature (1297)..(1297): n is a, c, g, or t
  misc_feature (1432)..(1432): n is a, c, g, or t
  misc_feature (2403)..(2403): n is a, c, g, or t
  misc_feature (2555)..(2555): n is a, c, g, or t
  misc_feature (2777)..(2777): n is a, c, g, or t
  misc_feature (2982)..(2982): n is a, c, g, or t
  misc_feature (3179)..(3179): n is a, c, g, or t
  misc_feature (3279)..(3279): n is a, c, g, or t
  misc_feature (3293)..(3293): n is a, c, g, or t
  misc_feature (3380)..(3380): n is a, c, g, or t
  misc_feature (3425)..(3425): n is a, c, g, or t
  misc_feature (3530)..(3530): n is a, c, g, or t
  misc_feature (3623)..(3623): n is a, c, g, or t
  misc_feature (3725)..(3725): n is a, c, g, or t
  misc_feature (3851)..(3851): n is a, c, g, or t
  misc_feature (3905)..(3905): n is a, c, g, or t
  misc_feature (3974)..(3974): n is a, c, g, or t
acttgggtactgctaacaccctaattatccataatgatagggtagtagtggatagtccttctattgtagctttngatagaagcactaaaaaaattatagctgtgggacaagaagcgcgccttatgcaggggaaaacacaccccagnattagcactattcgtccgctaaaagacggggttatcgccgatttcgacgcttctgagcaaatgattagtatgctcatcaagagtattcctgcgcttaaaaagcgtttcttntcgccttcactccgtatggtggtgtgtattccttcgggcattaccgaggtagaaacacgtgcggtacgcgagtcgtgcgaacgcgtaaacggaaaagatatttacttagtacacgaacctatggcagcngcnataggtattgggctngacattatgcagcctaaaggtaatatgattatagatataggagggggtactactgaaattgctgttattgcacttggcggtatcgtttgcgataagtcggtgaagatagcaggggatattttcaactctgatatagtgcattatatgcgtacccaacacaacctatatgtgggcgaaagtactgccgaaaacatcaaaataacagtaggggcagccatcgaagacctcgattcgccaccngaagatattatggtgcaaggtcgcgacctgctaaccggcaaacctaagcaggtacaggtatcgtaccgcgaaatggtgaaagccttagacaagtcgattttgcgtatagaagacgctattatggaaacgctttcgcaaacgcctcctgagcttgctgccgacatctataacaccggtatctatatggcaggcggtggngcgatgctacgcggtttagacaagcgtatttcgcttaaaacngatttgcctgtatatgttgccgaagacccattgcgcgcagtagtacgcggtacgggtatcaccctaaagaatattaataaatttaagagtatattgcttaaatagtgaatcaaatcatacagttctttattcgttcgagggacttcttactgtttttgctactctttgggctgtctattagcttagtattcaaaagtaattactattcgcagagtgcttatctgcattcggctaatgctattagtggcaaactgtacggcttttctaactattgggcgcagtatttcaacctcagaagccaaaacgagttgctcagcgaggaaaatcgcacccttcgcaaagagttattncagctacagcagcaggtcagcagnttatctcataccgattcgcttacctttgctcacgctganactttgcgcttcaaggtgcttactgccaatgtgataaagaatagcttcagattgcacaaaaactatttaacgatagacaaaggtagcaatgacggagtgaagcaagatatgggggtagtgtcgccacaagggatngtggggatagtagagaatacctcagggcgatttgctaccgtgcagagtgtgctaaacactaaatcagcccttaatgcgatgataaaacgcacccgccatttcggttcgctacattgggatgcccaatcattgaataaagtgcagctattggaagtgcctaatattgcgcctatacaatacggcgatactatagtaactgggggaatgtctaacatcttccctaaagggatacctattggcaaaatagtacattatcagaaaagtcagcacgataatacttacattatcgatgtacagctttttaccgatatgtctaacctcgactacgtatatatcatagaagataccgaccgtactgccgtaaaggcaattgaaaaacaagacagcaaatgaatcaccctatagtaaaaaatacatttctctttgtagtattggtattgttgcaggtgcttatttttaacaatgtagcttattgggggtatgtaaacccgatgatttacatcgtttacctattggcagccccttatagagagaatagggtaccctatctgctgacggcatttttgttggggctctgtatagatatgttttctaatacaggcggcttgcacgctgccagtagtgtgtttatagcttattggcgctcgcctatcttgcaccttgtgtttggcaagaattttgagtaccaagagttagaccttttggcctatccgtttaccaaagtgtttagttataccactctgatggtggtgttacaccacatattattctattttttagagattttcaactttaatcacgtactgattacccttgtaaaaatcatttgtgcctcagtattcaccatcattgtttgtttgctatacatttatctgtttagtaaaagtaaaaaatgagaaaatttctgttgccattcatcatattatttacaaccattgtgataatcttgcgcttattcttcttgcaagtgntttatcacgatgagaatacttctggtatcgacaatatcgctatcgaaacggtatacgactatcccgaacgcggctatatatacgaccgcaatggcgaattgctggtctctaatcagcctgcttatgacgtgatggtgatacccagtgaggtnaagaacttagataccctcgaactttgcagcttattagaactctctaaagctgatttcaccgaaaaactacagaaagccaaagattattcgcgcaaaaaaccatcagtaatagtgcatcagctctctaacaccgactatgcagtgctacaagagaagatgcgcaaattcgagggtttttatatacaaaagcgaatgctgcgcagctatctgacccataacgcnggtaatgtgttgggctacatcagcgaggtaaacgagtgggaactgaagaagaacccttattatctggcgggagagctcattgggcgcagtggggtagagaagcagtacgaagagtttttgcgcggcaaaaaaggggtacaatacttccaaaaagacaaacacaatgcggcgatagagcgttataaaaatggagcgctcgacaccntgcctattatggggcaaccgctacaactgaccatagacattgggctacaggcttatggcgaactgctgatgcagcacaagcacggcggtatagtagctatcgagcctaagacgggcgagatactcgctttggtatcggcgccttcttttgaccccagtctgttggtagggcgcgaccgctctaagaactacacggcnctctataacgactctataggcaagcctttatacgaccgcacgctattggcgcagtacccccctgggtcgccttttaaggtggtcaatgctcttatagggntgcaagagggggtnattactcctcagagcgttttcagttgcggtgggggctatcgctatggggggcatataatgcgttgccactgcgggcgcggttcgaangacctgctatacggtattgccctatcgtgcaacgcctattttgcnaatacttataagcgggctatcgatatgaaaacttcttcggaagtgggaatggaaaaatggactgcccacgtgaagagttttgggctcggtaacttcttaggttcngatttgcctacaggtacccctgggaaggtgcccgacatcaacctctacaacaaacaatacggcaaagggcggtggaatggcacttctaacatntctaacgctattgggcagggcgagatactcaccacccctatacagcttgccaatgtaatggcagccatagctaataagggctattactacacccctcacatngtgaagaagatagacaataaggtaactccttttaaggaatacactgagcctaaacatactaccatcgaccctaaacattttgaccctatcatcagaggaatgaatatggcgtacttagccggtacngcacggcgtacccagatagatggcataaatattgcggctaaaacagggacggcngagaactttatcagggtaaatggcaagcgtatgcagctaaccgaccactctatatttgtagctttggcncctgtagaagaccctaagatagccat

SEQ ID NO: 449 - DNA, 4000 bp, Escherichia coli
  misc_feature (1989)..(1989): n is a, c, g, or t
  misc_feature (1996)..(1996): n is a, c, g, or t
  misc_feature (2845)..(2848): n is a, c, g, or t
  misc_feature (2850)..(2851): n is a, c, g, or t
  misc_feature (2853)..(2853): n is a, c, g, or t
  misc_feature (2857)..(2857): n is a, c, g, or t
  misc_feature (2859)..(2861): n is a, c, g, or t
  misc_feature (2864)..(2864): n is a, c, g, or t
  misc_feature (2866)..(2866): n is a, c, g, or t
  misc_feature (2873)..(2874): n is a, c, g, or t
  misc_feature (2876)..(2876): n is a, c, g, or t
  misc_feature (2879)..(2879): n is a, c, g, or t
  misc_feature (2881)..(2881): n is a, c, g, or t
  misc_feature (2883)..(2884): n is a, c, g, or t
  misc_feature (2889)..(2890): n is a, c, g, or t
  misc_feature (2892)..(2892): n is a, c, g, or t
  misc_feature (2896)..(2899): n is a, c, g, or t
  misc_feature (2902)..(2903): n is a, c, g, or t
  misc_feature (2953)..(2953): n is a, c, g, or t
  misc_feature (2955)..(2966): n is a, c, g, or t
  misc_feature (2968)..(2970): n is a, c, g, or t
  misc_feature (2975)..(2979): n is a, c, g, or t
  misc_feature (2981)..(2990): n is a, c, g, or t
  misc_feature (2992)..(2992): n is a, c, g, or t
  misc_feature (2995)..(2995): n is a, c, g, or t
  misc_feature (2997)..(3002): n is a, c, g, or t
  misc_feature (3005)..(3006): n is a, c, g, or t
  misc_feature (3009)..(3009): n is a, c, g, or t
  misc_feature (3011)..(3014): n is a, c, g, or t
  misc_feature (3016)..(3016): n is a, c, g, or t
  misc_feature (3018)..(3019): n is a, c, g, or t
  misc_feature (3021)..(3022): n is a, c, g, or t
  misc_feature (3024)..(3027): n is a, c, g, or t
  misc_feature (3029)..(3031): n is a, c, g, or t
  misc_feature (3033)..(3036): n is a, c, g, or t
  misc_feature (3039)..(3042): n is a, c, g, or t
  misc_feature (3046)..(3046): n is a, c, g, or t
  misc_feature (3051)..(3051): n is a, c, g, or t
  misc_feature (3055)..(3055): n is a, c, g, or t
  misc_feature (3058)..(3058): n is a, c, g, or t
  misc_feature (3060)..(3060): n is a, c, g, or t
  misc_feature (3063)..(3067): n is a, c, g, or t
  misc_feature (3069)..(3069): n is a, c, g, or t
  misc_feature (3073)..(3073): n is a, c, g, or t
  misc_feature (3075)..(3081): n is a, c, g, or t
  misc_feature (3083)..(3084): n is a, c, g, or t
  misc_feature (3087)..(3087): n is a, c, g, or t
  misc_feature (3089)..(3093): n is a, c, g, or t
  misc_feature (3096)..(3097): n is a, c, g, or t
  misc_feature (3101)..(3102): n is a, c, g, or t
  misc_feature (3104)..(3105): n is a, c, g, or t
  misc_feature (3108)..(3110): n is a, c, g, or t
  misc_feature (3112)..(3112): n is a, c, g, or t
  misc_feature (3114)..(3115): n is a, c, g, or t
  misc_feature (3117)..(3121): n is a, c, g, or t
  misc_feature (3123)..(3124): n is a, c, g, or t
  misc_feature (3127)..(3127): n is a, c, g, or t
  misc_feature (3129)..(3129): n is a, c, g, or t
  misc_feature (3131)..(3131): n is a, c, g, or t
  misc_feature (3133)..(3133): n is a, c, g, or t
  misc_feature (3136)..(3137): n is a, c, g, or t
  misc_feature (3139)..(3141): n is a, c, g, or t
  misc_feature (3143)..(3144): n is a, c, g, or t
  misc_feature (3146)..(3146): n is a, c, g, or t
  misc_feature (3148)..(3151): n is a, c, g, or t
  misc_feature (3156)..(3157): n is a, c, g, or t
  misc_feature (3161)..(3163): n is a, c, g, or t
  misc_feature (3166)..(3166): n is a, c, g, or t
  misc_feature (3172)..(3174): n is a, c, g, or t
  misc_feature (3179)..(3179): n is a, c, g, or t
  misc_feature (3182)..(3184): n is a, c, g, or t
  misc_feature (3191)..(3191): n is a, c, g, or t
  misc_feature (3205)..(3205): n is a, c, g, or t
  misc_feature (3208)..(3209): n is a, c, g, or t
  misc_feature (3212)..(3213): n is a, c, g, or t
  misc_feature (3215)..(3215): n is a, c, g, or t
  misc_feature (3218)..(3218): n is a, c, g, or t
  misc_feature (3221)..(3221): n is a, c, g, or t
  misc_feature (3225)..(3225): n is a, c, g, or t
  misc_feature (3227)..(3227): n is a, c, g, or t
  misc_feature (3229)..(3229): n is a, c, g, or t
  misc_feature (3232)..(3233): n is a, c, g, or t
  misc_feature (3235)..(3236): n is a, c, g, or t
  misc_feature (3238)..(3239): n is a, c, g, or t
  misc_feature (3241)..(3241): n is a, c, g, or t
  misc_feature (3244)..(3245): n is a, c, g, or t
  misc_feature (3247)..(3247): n is a, c, g, or t
  misc_feature (3249)..(3251): n is a, c, g, or t
  misc_feature (3253)..(3256): n is a, c, g, or t
  misc_feature (3259)..(3259): n is a, c, g, or t
  misc_feature (3262)..(3262): n is a, c, g, or t
  misc_feature (3264)..(3264): n is a, c, g, or t
  misc_feature (3270)..(3270): n is a, c, g, or t
  misc_feature (3273)..(3274): n is a, c, g, or t
  misc_feature (3276)..(3277): n is a, c, g, or t
  misc_feature (3281)..(3281): n is a, c, g, or t
  misc_feature (3285)..(3286): n is a, c, g, or t
  misc_feature (3288)..(3289): n is a, c, g, or t
  misc_feature (3294)..(3294): n is a, c, g, or t
  misc_feature (3316)..(3316): n is a, c, g, or t
  misc_feature (3321)..(3323): n is a, c, g, or t
  misc_feature (3325)..(3325): n is a, c, g, or t
  misc_feature (3328)..(3329): n is a, c, g, or t
  misc_feature (3331)..(3331): n is a, c, g, or t
  misc_feature (3333)..(3333): n is a, c, g, or t
  misc_feature (3336)..(3339): n is a, c, g, or t
  misc_feature (3343)..(3343): n is a, c, g, or t
  misc_feature (3346)..(3347): n is a, c, g, or t
  misc_feature (3350)..(3353): n is a, c, g, or t
  misc_feature (3355)..(3356): n is a, c, g, or t
  misc_feature (3359)..(3360): n is a, c, g, or t
  misc_feature (3363)..(3363): n is a, c, g, or t
  misc_feature (3367)..(3369): n is a, c, g, or t
  misc_feature (3371)..(3371): n is a, c, g, or t
  misc_feature (3373)..(3378): n is a, c, g, or t
  misc_feature (3380)..(3387): n is a, c, g, or t
  misc_feature (3389)..(3390): n is a, c, g, or t
  misc_feature (3392)..(3394): n is a, c, g, or t
  misc_feature (3396)..(3398): n is a, c, g, or t
  misc_feature (3400)..(3400): n is a, c, g, or t
  misc_feature (3403)..(3403): n is a, c, g, or t
  misc_feature (3405)..(3405): n is a, c, g, or t
  misc_feature (3411)..(3414): n is a, c, g, or t
  misc_feature (3416)..(3416): n is a, c, g, or t
  misc_feature (3418)..(3424): n is a, c, g, or t
  misc_feature (3430)..(3433): n is a, c, g, or t
  misc_feature (3435)..(3437): n is a, c, g, or t
  misc_feature (3439)..(3441): n is a, c, g, or t
  misc_feature (3444)..(3446): n is a, c, g, or t
  misc_feature (3448)..(3449): n is a, c, g, or t
  misc_feature (3451)..(3451): n is a, c, g, or t
  misc_feature (3454)..(3459): n is a, c, g, or t
  misc_feature (3462)..(3464): n is a, c, g, or t
  misc_feature (3468)..(3470): n is a, c, g, or t
  misc_feature (3472)..(3472): n is a, c, g, or t
  misc_feature (3475)..(3475): n is a, c, g, or t
  misc_feature (3477)..(3479): n is a, c, g, or t
  misc_feature (3481)..(3482): n is a, c, g, or t
  misc_feature (3485)..(3487): n is a, c, g, or t
  misc_feature (3489)..(3489): n is a, c, g, or t
  misc_feature (3491)..(3491): n is a, c, g, or t
  misc_feature (3493)..(3494): n is a, c, g, or t
  misc_feature (3499)..(3499): n is a, c, g, or t
  misc_feature (3875)..(4000): n is a, c, g, or t
tttaattaaagaattagaagaacagaaaaggttggtcgaagagttagaacatgttaaggaaaagcaaaaagaaatgaaacaattagaattggcgaaattgaaaaataaaccgaaaaaaaccaacaaaataccaacgaagaatgaagaaaataataagaatttaaatagtaaacagaaagaacaagaaatattacaaaaaaatctagaagaaaatgagcaacagaagaaaagagaagctgagcaaacagagttacaaaagcaaaaaaagaatgaattaaaaaatttacaggaaaataaaaaagagagagagcaaaaaataatggaagagaaaaataaaaaacgtttgcagacgcaactaaaatctttcaataaattacttaaagaatacgaagatcaaaaagtatctatggaagaacgagaagcagaacaaaaagtattattagaagaacaaaaaaaccaacttagaaaacgactttcggaagaaagaaacgaaagagaaagattaaaaatggaatggataaaaaaagaaaaacaagaacaaaaacaaaaagaagatttaattaatgaaatagaaaatcagaaacgcatgatagaaaaacttaaagaaacagagcatttaaattatgaaaacttaaaaaaagattatggaaaaaaaatgcacctatataagaaaaaagaaaaatctgagaatcaaaagttaataaaaaatttagaagaacaaagagatttaattgaaaaattagagtatctgttagaaaaaaagaataatattaggggtttacaggaaaaaaggggaaattcagaaaataataatttaatacaaggaaatgaattaaaaaatttaaagaaagaaagaaaagttaacgaaaaaataaatacataaatatatatctgatatatatgtttattttataaatacaaaactaatatgaatatatataacaaattattattattattattattattattattattattattattattactatttatttaaaattatgatatacatatttatttactaaatttatagttaaatacattctatttatacatattaacgtgtatatatatttaatgaattattattcttatctatttatttaaacttatgtacatatatttacctattaaatatacagttaaatatattccatttatacatatgtataaaaagataatatttttatttttatttttatttaaaagaaaaaaaaaagataataaaatatctgaaagtatttttaaatttcccatctctttttttttttttaatgtttttaataatttattaattcttatatataataaatgtgttttaatgaattgaatattatattttgtatgtattactatcataaattaattttaaaattaaataaaaacaatacattaatgtcatattatatatctctgtaattgttaatgcagaaagcactttatcaatgaaaggattagtgtagttgttcttccctcgatgatggttcaagagatcactgaaaagaaacctattatatacaacggcgtataaggagtacctttcatattagccttgcttagagaaatgtccgtgttgatgccgaaatggtatggtaaagaatccagtgaaagtcgaaaccattcacccctccagtgggtgtaatcattggcgtgtgggcatattatcatcagtgcctatgattaagtcgtagcgtagtatcaccggggttgggtccaatatgctgccaagggaaagtcttttggataccactgtggttttatgataccccaggatagaaacctcaaagcatattatatggccatgtcgggatcgaaccaaggtttctacagtaacatgtattgtccttacctgattgagccaacacagcggccccaagtcatgggtaataacttcatcggtttaaatagatgattaatctataaatttatatagttcatactaacttatgatcaatatactaaaaaaaaaaaaaaaaaataaantataatntgaaaataagcattttttctctgaattagttggcctagactaattcctaaatattttaataaagttaatttaataatgattattatatatcattatttattaatattgaaattcaaataactgaattattgaaatagaaattgaattaaattgaaattcaattattatcttaacattagtaaatttagttgtatttaattttcatttttcatttggtctcgtaccatttttgatacgatattttattaaataccgtatatgttagttgtgcgtttatgcaaaagggaattactccaagaatattatattacaataattatatttatttatttactttttatttatttatttttattattttatttattatattttatcatataaaaaatacatgttgcaattattattcattaaaaaaaaaatatttatttataaactattttcataattatattttactaattttataaatattatttgtcgaaacactaaaattaataaatataaattttcataactttttacttaaaatagtttttagataatgttaaacaatatgaattaaaaattattcatattgtttaacattatctaaaaactattttaatattaacacattcaatctccgttataattaatataactaattttgctatataatcaacaattatttaatttaatattttaattattattaataaattatctttaataatatattttaagattcattatataaaaataatttttaataaatatttatattaataatttttctaaataatttttctaaataatttttctaaataatttttctaaataatttttctaaataatttttctaaatannnntnntntttntnnntantntttctanntnatntntnnaaatnntntttnnnnatnntttttctattattttctattatttctattggacatgcacaaactttattntnnnnnnnnnnnntnnnctaannnnntnnnnnnnnnnanttntnnnnnnaannttncnnnntnanntnncnnnntnnntnnnntannnntttntattntttntantngannnnnanaaantnnnnnnnannttntnnnnnatnnatannanntannntnannannnnnannatntnantnttnntnnntnnantnnnnatgtnnaagnnntanatttannnaatanaannnaatagtnaaaataaaaatagnaannatnntnaantanaaantntntannanntnntnttnnantnnnannnnatnttnanactatntanntnntaanaatnntnnttttntttttttttttaatgaacgaantaaannnanaannantnatnnnnatanatnntannnntnntannaantaannntnannnnnnannnnnnnntnnannnannnanatnanaaaaannnntntnnnnnnntttttnnnnannnannnaannnannantannnnnntannnatannnanatnannnannttnnnancnanntattnaggatgataatatctcgagtacgcaaaaataaaaatgaaatattatgtatataaaagaattttacaggattattttgattatataaaaattaaaaaacaaataaaataaaaaaatttttttaataataaatagtctgttatcatattataaatataagatatatatttagaaaataaaaggaaataataataataatatattaataaaaataataaaaaagaataatataaataataaaaataaataaattcataatacatatatttataataatattatatgtatatacagaaactatcattacaatacaaattacatatatttttttcttttttctttttaatgatttgcttttattttttttttttttatttnnnnnnnnnnnnnnnnnnnnnnnnnnnnnnnnnnnnnnnnnnnnnnnnnnnnnnnnnnnnnnnnnnnnnnnnnnnnnnnnnnnnnnnnnnnnnnnnnnnnnnnnnnnnnnnnnnnnnnnnnnnnnn

SEQ ID NO: 450 - DNA, 4000 bp, Escherichia coli
  misc_feature (38)..(38): n is a, c, g, or t
  misc_feature (896)..(896): n is a, c, g, or t
  misc_feature (1992)..(1992): n is a, c, g, or t
  misc_feature (1995)..(1995): n is a, c, g, or t
  misc_feature (2001)..(2001): n is a, c, g, or t
  misc_feature (3406)..(3406): n is a, c, g, or t
  misc_feature (3434)..(3434): n is a, c, g, or t
tccataggtgcttgcaaggcttcgtaaagtgcaggtgnatccaccataagctgaggacttaattggtccgcgaggtccctcaagttcttcgcactattgaaacttaccttcacaggacgctgtaaacccgctttcaacatgtttacgattccattactactcatgccttcctcgatgacgtaataccctgttttgagcgtatccagtccctttttcttaccgatcaggtaaaatccttccggctgaagcagtagtcccgattcaaaccactcctcataaaccgtttctagggtggttccgggttctacatataattcatagggaaccaattctggattgacgttcgcttcgaaaaccgcattgtagcctttccaaaccaaaacaagcaacagacctggaatgaccacgcctatagtaataaccatcagctttctcatgaaactattttttgaaagagttgtgcattttgatgggtaccgtcgaaccagacccaatcttctagcattccaaccgcacggtatccgctttgttcgaacaaatgtgtggaggcatcattattcgtcgggacatgggcataaagactatgcaacccgagcgttttaaagcaatacgcttcgaacgctttcagtacccgtttacccaatcctttgctccgatgcatctctgaaagtacaatgccaattcccgctttacgcgctacaggatcgtaatcaaaaagatcgactgcacccgccgtttgtccattgtagacaaaaagcaaacgaagttgaccatcgcgttgcaagttgcctggctgtgtggccaaataatcggccagtaccttcttactccacggctccttgctaattcctaaatgccaaagcgttgcatcattttctataccgtaaagccattgnaggtcttccggctcaggcgcgcgcaagaatccgttctccgtcactttaatcataacggcaacaatcctttaaatacttgcgttgcaggtccagtaaggacgacatctgtaaacggtccacttcctttgaaatctaccgtcaatattcctccttgtgcatacagccttaccggtgcagcaggtacccaaccctgggctaccgcaaccatcgcggctgcagttgctccggttccacaggccaacgtttcgttttctacaccacgttcgtacgtgcgtatggaaagttcaccttcacacgcttgaataaaatttacatttgccccttccggcccatacgatgctcgaatacgacgtgctgtatttacaaaatttggccccggttcccgatgctcgacgtgatgtggagagcccgtatctataaaaaaaccattatttcgagcgactacagcaggggcatcgatcatacttaaggctacgctcgatggagcgaccacagcagtgtgtggcccatcaatagcatgaaaattcaacgtgccctcagcggcaattcctaaatccactgcaaaccgcgaaatgcatctgccgccatttccgcacatggtactttcccttccatcagaattaaaatactgcatgtaaaagtgatcgccttccactttcggcgcttctaacaacattaatccgtcagcaccaacgccgtagttgcgatggcaccattgtgcgatagtttcagtcgttaaggtcagcgaaccggatctattatcaatgaggatgaagtcatttccagcgccgtggtatttataaaattctacgtaggccatcccaatgggtgttaaaaggcgttaaagttatgcgtttcgacggggtctgtgcgttgatttggtgtacaatttgaaggtacgaaggaaacaagaatctaacgaatgaaccttatgaaagcattactgaaatccattggtcgtcccattgcgtttactgctattggcggattagtggcactgggagcagcgcacagcttgggatggactggaaaaaccgtcattattgaggatacgaatcagagcgcctcacaagtgaattggactgcagaccgtccnctnccctcngcgcccacagattttgttgcagcagcggaacgcaccgtagaagcggtggttcacgttaagaccactgccgaacgtgtgcagaactactacaatccgttcaatgatttattctttggtcggccgtctaccccacaaaaatttgaagtagaaggctccggatctggcgtaattctgactgaagacggttacatcgttaccaataatcacgtcatcaaaggtgcaaagaccattgtggtgacgacctcaaacaatgacgaatacgaagcagaattgatcgggacggatcccacaactgatattgctttgctaaaaatagcgggcaatgcgttgacgaaagtggatgttgcaaactccgacgaggtccgactaggtcaatgggtccttgctgtgggcaacccgttcaacctcacctccacagttaccgcagggattatttctgcaaaaggtcgagacatcaatattatcgacgagcaaagcgcaattgagagtttcttacaaacggatgctgctgttaatccaggcaattcaggaggcgcgctggtcaatactgccggggaattggtaggaatcaataccgccatttcttctcgcagcggctcttttgaaggctacagcttcgccgtccctgccaacctcatgcttaaggtcgttaatgatctaaaggaatacggacgggtacaacgtgcattcataggcatcaactacaatgaagtgaccgccgcattaagcgaagaattgaaccttgagatcaataaaggggtgtacgtcgctaatgtcattccaggcggagcagcagacgatgccggtatccttaaaggcgatgtcattattaatgtcaacggaaaggccattactaccggagctgacttgacggaagcattggggcagcacagacctggagagaaactcgctgtggtggtcaaccgctctggtaaaaacaagccctttgaagtactgctcaaaaataaactaggcactactgaaatgctcaccaaagaagaagagttactgcgcagttttggcgcggaactcgaggatttaagcagtacagacaagcgtcgcttaggacttcgctacggcattagagtctctaaagtgctgggtggccgattcgaaaatgcaggcattcccaaagactttatcatcgtcaaactcaacaacgtctatgtagagaacgtcgaaagttttgaacggcttgtccgacagttcagcccaggggacggtgtacttatccaagggtttgaacccaacggcaaggcgaattactacgcttttgagtggtaatcatacctgactgtacataaatactcccccactgagcgcaccgcgtactgtgggggattttttttacgccaaagtcacccatcaaagtgtacattttacactgtttataaccaccttaaanccttgttttacagccgactaacaagtanaaataaacctttccaactctatctacctgccctaactttgtgcttagaaccaccaaaaactatcacatgattgctcaacaagagtacactcaaaaagtggggcttcgtattcaaaacgaacgccttgcagtggacgtaagtgcctgcgtacacgaactcttttacaacagaggcattgaaattaccatgttccgcaaccagctccgggataaaagtgcaagccaagttttggaactgcatcaatacgcctcggatttcgttggtaagcccattcgcgtagaggatacgctcgagatgcttcttgcacttaagcgaaccgctatcgaacatgcgaagctcgatatcggtcggattacacacgaatggtcacaaacggaccatacggctgaccattggatcatggaccatttaggaagcttttttaagcctactaccctagaacctcgagatgttattctcttcggcttcggtcgcattggccgattgttagcacgggaactgatcgtgcaagaaggcagcggacatcaactcagacttcgcgctgttgccgttcgaagtattgatgc

SEQ ID NO: 451 - DNA, 4000 bp, Escherichia coli
  misc_feature (21)..(21): n is a, c, g, or t
  misc_feature (287)..(287): n is a, c, g, or t
  misc_feature (1009)..(1009): n is a, c, g, or t
  misc_feature (1065)..(1065): n is a, c, g, or t
  misc_feature (1072)..(1072): n is a, c, g, or t
  misc_feature (1175)..(1175): n is a, c, g, or t
  misc_feature (1197)..(1197): n is a, c, g, or t
  misc_feature (1260)..(1260): n is a, c, g, or t
  misc_feature (1284)..(1284): n is a, c, g, or t
  misc_feature (1332)..(1332): n is a, c, g, or t
  misc_feature (1486)..(1486): n is a, c, g, or t
  misc_feature (1501)..(1501): n is a, c, g, or t
  misc_feature (1546)..(1546): n is a, c, g, or t
  misc_feature (1986)..(1988): n is a, c, g, or t
atctgcagtgcgttaaagccnccccaactaatccccatcattccaacgctgccactgcaccaatcttgattggccagccaatatatcacctcaacgccatctttcagttcctgttcggtatattcatcctccatcaggccctgactgtcgccgtttccacgcatatcgacacggacgcaggcatagccacgtttcgcaaaatagggatgggtaagcgcatctcgcgcacaggtgccatcgcgtttgcgatagggtaggtattctaaaatcgcaggaatcggatgttnggtcgcatctatgggcatccaaacgcgcgccgaaagtcgacagccatcggacaaaatgatttccatatcttcgatttcttggatgtcgcaaatattgttcattcaaggttcctctcgtaacctttatctatcgaattccaagtctgactgactcgtcaagaaaagagtgtttagtacgatgcgtttttttggatttattatctgtgtattattgggtggattttactacttcacttcgccgtcgatgtgggcagaaggtataacgctcgcccctgactcacaaaacggtgaatatatttatttcgctgcgggatgtggtggttgccataccgcaccagatgctgaagaagatccaaaaaatattttatcgggcgggcaaaaattcctttcgccatttgggacgtttactgctccaaatgtgtcaatgcatgctgaatttgggatcgggtcctggtcacaagcagattttgttcgcgctgtgcgacagggcgtttcaccagatggccggcattattacccagcatttccatatacatcctatcagggaatgagtgatcaagacgttgttgatttgtggttatattggcaatccctgccattatcagagcaaaaatcacaggcgcacgatctgcccatttatgcgcaatggcgccgtcctttgggtatttggaagatgatgtttcagcctgagtatgatccgcgaatgaaggataatggagtgncccgtggggaatatttggtgaataccctgggtcactgcggagaatgccacacggcncgaaatntattaggggcgcgaagcggcaattctacattgcagggtgcagagcatccaaatggtaaagggcgcatccccgcaatcgcaggcgataattttgattggagcancgcagatattgccgagtatttnaagtcaggtttcacacccgattatgacgttgcaggagggttgatggctgaagtgatcgagaanacgtcaaagttgtcagacgacgancgaatggcaattgctcgttttttaaaggctgttgaaaactaattccanatgcagtggaatttcgttttgaaatccccttagtttcccgttaggaatgcagtaagcggtcccatagctcaactggatagagcaactgacttctaatcagtaggttgagggttcgagtccttctgggatcgccattaaaaacaaaggcttaacntcaaaatgctgagcnttttgtttttctggggaaacaccgggggaaactttatctcaattntatcagagaattatccaagctagggttgccagagcgataaacactcccactactagaagcactggctgggatgcatttggtttcgcttcactctgggtattcgccttaggttctggtgcttcgaaagctgcctctgtgctttctgctgccgacgcattctgcaatagctcgatcagctcggctttcttcatagatgattttgcatcgatcccttgtgatgaaagcatttcaagaagttcagctttagtatgtttgtttagcgacatgtcttttccttggctacaaaggttgcccaaggttttaaacaaatgaatttagtaacatcaataaaaaaaagatggcaaaagctcgatggcttcagtttctgggtatcccacttaaaaattttcctaaaaaaggtggaatatatatggttccttatgtggttcgtattattttannnaaggctctttacgaaccgatgatgtttatctgttcggatacaaggattgttaggcgatgacgcaaataaaagttgctgttattggttgtggtttttatgcgcagaaccaccttcatgcttggaaagatttagaaaaaaaaggcgcgtcgttggtagcggtgtgcgacttgaatgctgaaaaggcccaagcgtgtgctgataggttcaaagctgcttggtacacagatgcgcgtgaaatgctgtcttctgaaagtatagatttagttgatattgtcacgcaaatggatagccatcaatcccttgccgcattggtggcagactatggggtcggggccattcttcaaaagccactcgcgccaaacttagaagtagctactgagattgcaaattatgcaaaaagtaggaaaaactggttagccgttcatgagaattttcgttttagtacatccatgcttcgaataaaggataaattagaagctaatgtaattggccatcctacatgggcgcgcatttctttcagaacaaattatgacgtttatgcaggacaaccgtatcttaagactgttccaagattagtaatactagatttaggtattcatttattggacttggctagatttttcttaggagaagtggcccaagtgcattgtgaaacccagcagttgcgagatggaatcaaaggtgaagataccgcaacaatcttattgaaacataagactggtagcgtctctgtagtggatgtatgttatgaggcaaagcggtttcctgacacttttccagaaacgctagtagagatcgaaggggctaatggttcgataaaactttctaaaggtcagattatgtcgataaactgtgacgaagaagttgaagaacgttatgtcggttctgatattttgccttggaccagtcttccttggcatgtttctcaagaagctgttttaaatgcgaataaacactttttagaatgttttaaacgcggtgttgatccggaaacatccgcatttgataatttaaaaacatttgctttggtggaagccgcctatgaagctgcaacaactggccgagccattagaccaaagtacacttgagtacgatccagtgtaaaaagtgaggccaaagcaagcacatcaaaatagttgtactgccccctcccagaaacactgagtgaaatttagtttttgaggatcacttcattgtattggttccaaatacgtagctgtatgacaaaaaagttattgatggtagtgaacccaaaattcataccgatctagaggtgctgtggtataatattgcctatcaactagttgcgcggatcgttgcgctgcgggtactaacgtgtgaacagggcatatgggtggcaaagtttaaggcgtcgtttgcacccaaataaaggacttttaggaattccagatgattagattttctgtttttattattttgatttttttggctgtattgatcgtggctgaaaacgtgggtcggcccattccatatggttatcgtattttggcaggtttggtcatggcatttggtatcgccgctgccatgaccagcggatagaaaggaagccatgttagaaacatttaagcagcaatttgatgcacaatattctaagggacaaagttttgatcagttgatgagcggtcacaacggtgcaagtatggcaatgcaacaaatcgttttgtcatttgtcgatcggtcctaccggtttaatgttgcctctgcgttcagcaaattagacccagaaaaccgacggcgggcaagctgggttttaacggcacatgaatgccatgaaacattcggaatactaagtgtcatcgatgtgtgtcgggaatatccgcgtctgatcgaattatatgaacaaagcgatgaaatgcgcgcgctgatccgaaagaacttgggctagtttgttcttggcactcgtagaaccgttgtaggttacagaaccccgtgtggggtgtctattgtttcgcagccgtcattgaaccagaattcctctgtctttttcatac

SEQ ID NO: 452 - DNA, 4000 bp, Escherichia coli
  misc_feature (1980)..(1983): n is a, c, g, or t
  misc_feature (1987)..(1987): n is a, c, g, or t
  misc_feature (1989)..(1990): n is a, c, g, or t
  misc_feature (1992)..(1992): n is a, c, g, or t
caccttgtatcgattcacgtgccccaatttcgaccgctaacccatatttggtgtaatcgcgcatcgcggtgtagttcgtcgtcactacgggcgtacccagcgcttggcactcgaggacgaccatgccgaaaccttccgatttcgacgtgtgcaaacacacgtcggcgtgtcttttcagtgccgacgtgaaaaccttgtcgtgcaaattctcatccagcgtgtacatgttcgatggaatttgtgcgcgttgaagcgcggcacgtagggatatacccgttcgcaaaaccgcgacgggcggcttgctcttgtggttcagatcgttttgcgtcatagcgctgtccaccgtatgaatccagaggtgcgtctttaatttcgggttcgctcgttgaaattcagcgaacgcgttgattgacgccacccatcctttcctgtcagagttttcgtagttgccaccttgcatgagcaccaagaaggtgtcgtcgtcgacttcgtcgatgctcctcgagaacattctgtcgtactttttagaatcaaacaccgcgcggcgaatgactttgcgtctatttttgacatcgtcggcgattttcagtttcgtctcgaaagagtccgcgagcgcgttgagcgacgcgcgatcgataaaatgaggaatcgtgcgcgtgagcggctgctccgtcgcgatcgcgcgacccgtggtgtcggacaacgccgccacgcccgagtacgtccggaccaccgccaccgacgcgtccgcttcttcgtggtgatacggcatccacaaaaccacgggcacggcgaaatcgtacccatcgaaatacatttgtccgatatccatgagcaacacgaaggcgtccagtcggtgcgtcgacgacgcctcgttcacctgcttcatcgtcatcgacagctcgtttatccgcgcgtacggcgcgtgcacgtccggcacgcccaaaaacgtcaggtgctccatcgccttttgctccgctttcgtcggcgcgcgcacgtcgcccgcgaagcgttcgcgagcgcggcgccaatccgcgtactctcccggaggcaaccgcacccccggcacgcgcggcatccaaaacgtctcgtacccattatccgcgaacgctttagagagtcccagcgcctgcgcctggtacgcgccgaacgtccacggaaccgtcgccgcgacgaagcacacgcgccgatcgtccgccgcgcccgcgctcgccgcgttcgccccccccccgcgacgtccccacagcgcgtccgcgcgcgtgaccccgctcgcgatcgcccacgcgacgcacgcgacgacgacgatcgcccgcgcgcgtcgcgtcgccatctcgagtcgagacgagcgtcgcgttctgcggcgtcgccctcgcgtcccgcccgcgtcccgcccgcgtcccgcgtcccgacgcccgcgtctccgtctccgccgcgtctccgtctccgcgcgcgcctcaaaatccgttatcgcactccccaaagtaatcgtgcgtcgcccacgtcgccctgtcgccgtcgtcgctcgtcgcgatcgccctcgccgcgtccgcgatggcttcggcgcacgcgctcaagctctcgccctcgtccggctccacgtcgacgcaccacgcctcgccgtcgcccacgggcgcgcaccgcgcgacgtttcgtcgcccgatcgcgcgctcgacgacgctcaccgcgtccgcgccgcgcgcgccgcgcgcgatgcgcgccgacacccgacaccgcgcggcgtcggcgtcgacgcgaacgcgcagcgaccgcgcgcgcgcgtcgacgtcgtcgagcgtcagcggacgcgcgtcgcgctcgacgcgcgcgtctccgcgcgcgcgcgcgtcgcgctcgacgacgacgacgaatcgaggcgtcatgggctgggcgcgacgcgacgtgacggcacacgcgcgcgcgaacgacggcgatggcgacgacggcgaccgggacgacgacgacgacgcgggcgggcgtcgnnnncgcncnncncgcgcgcgcgacggcgacgcgtcgaacggcgacgcgcgtcgggaggggcgtcgaagacgcgcgaagcgatgacgaagcctcggcgcgacgacgagggcgcgcggtcgcgcgcgcgagcgcgggcgcgggcgggagcggagggaagaagataagccagaatgagttcacggcgcgcgcgtgggacgcgatcgtgcgggcgccggaggtggcgaaacagagcaaacaacaaatcgtggagacggagcacgtgtgcgaggcgctgtgctcgcaaaaggacgcgttcgcgatgcggatattcgcccaagcgggagtgaaggatttgaaattagtgatatcgagaacgcgtgatttcatcgcggggcagccgcaggtgagcggggcggcgcaacaggtgctggggaggtttttggagtcgctcgtggacgacgcgcggacgatttcgagcggcatgtcggacgagttcgtggcggtggaacatttggtgctcgcgctggcgcgagacgagagatttgggaaaggattgatggcggatttggggatcacgtacgcgaatctcgaggccgcggtgatcacgctgcgtcggggagagaacgtgacggatcaagacgccgaggataagtacgaggcgctgaaaaagtactcgcgggatttgacggaggaggctcgggcggggaagttggatcccgtcatcggccgagacgatgaaattcgtcgcacgattcaaatcttaagtcgtcgctcgaagaataatccggtgttgatcggagaacccggggtagggaagacggcggtggcggagggactggcgcaacgcgtcgttcgaggcgacgtcccgacgtctctccaagacgtgaaaatcatgtcattggacatgggtttgctcatcgccggcgcaaagtttcgaggggagtttgaagataggctaaaggcggtgatgaaggaagtttccgactccatggggaaaattatccttttcatcgacgagattcacaccgtcgtcggcgccggaggcggaggcggcgggggcaacggcatggacgcgggtaacttgctcaaacccatgctcgggcgaggtgagctgcgatgcatcggagcaacgacgttggatgagtatcgcacgtacatcgagaaagatcccgcgctcgaacgtcgattccaacaagttttaatcgcgcagccgacggtggaggacacgatcagtatcttgcgaggtttacgcgaacgctacgagcttcatcacggggtctcgatctctgattctgccttggtcgaagcggcgacactcagcgaccgatacatcgccgatcgcttcttgccggacaaggcgatcgatctcgtagatgagtccgcagccaagctcaagatggaaatcacgtcgaaaccgacggttttggatgaaatcgatcgcgagattttgaaacttcaaatggagaagatatcgttgtcgcgaccaggcgcttcgcgagacgcgcgctcgatccaatccaaagttgagaagctcgacagcgatctgaaggcgctcaccgaaaagcagtcggtgctcaacgatcaatggcaaggtgaacaaaacaagttgaaggcgattcagactttgaaggaagaaattgattcggttacgaacagcattcagcgcgccgagcgtgagtatgacttgaataaagcggctgagttgaagtacggtacgctcatgacgttgcagcgaagactaaacgaggcagaggaagtgctcgagctcgctacttcggagggaccgactcttttgcgcgacgaagtcaccgaggccgacatcgcggacgtcatctccaagtggaccggtattcccgtcgccaagctccagcaaggcgagcgggaaaaacttcttgatttacccgccgaacttcacaagcgagtcgtcggccaagatgaagccgtgcagtctgtgtgcgaggctattcagcgctctcgcgcgggtctctctgacccgaaccgcccgattgcgagtttcatgttcctcggccccacgggcgtg

SEQ ID NO: 453 - DNA, 4000 bp, Escherichia coli
  misc_feature (1)..(1): n is a, c, g, or t
  misc_feature (3)..(5): n is a, c, g, or t
  misc_feature (10)..(11): n is a, c, g, or t
  misc_feature (19)..(22): n is a, c, g, or t
  misc_feature (25)..(25): n is a, c, g, or t
  misc_feature (29)..(29): n is a, c, g, or t
  misc_feature (32)..(32): n is a, c, g, or t
  misc_feature (34)..(34): n is a, c, g, or t
  misc_feature (39)..(41): n is a, c, g, or t
  misc_feature (46)..(47): n is a, c, g, or t
  misc_feature (49)..(49): n is a, c, g, or t
  misc_feature (51)..(51): n is a, c, g, or t
  misc_feature (54)..(54): n is a, c, g, or t
  misc_feature (58)..(59): n is a, c, g, or t
  misc_feature (61)..(61): n is a, c, g, or t
  misc_feature (76)..(76): n is a, c, g, or t
  misc_feature (78)..(78): n is a, c, g, or t
  misc_feature (81)..(81): n is a, c, g, or t
  misc_feature (83)..(83): n is a, c, g, or t
  misc_feature (89)..(90): n is a, c, g, or t
  misc_feature (92)..(92): n is a, c, g, or t
  misc_feature (94)..(94): n is a, c, g, or t
  misc_feature (98)..(99): n is a, c, g, or t
  misc_feature (102)..(104): n is a, c, g, or t
  misc_feature (118)..(119): n is a, c, g, or t
  misc_feature (121)..(122): n is a, c, g, or t
  misc_feature (125)..(126): n is a, c, g, or t
  misc_feature (133)..(136): n is a, c, g, or t
  misc_feature (138)..(138): n is a, c, g, or t
  misc_feature (143)..(145): n is a, c, g, or t
  misc_feature (147)..(147): n is a, c, g, or t
  misc_feature (150)..(151): n is a, c, g, or t
  misc_feature (157)..(157): n is a, c, g, or t
  misc_feature (160)..(161): n is a, c, g, or t
  misc_feature (172)..(172): n is a, c, g, or t
  misc_feature (175)..(175): n is a, c, g, or t
  misc_feature (179)..(179): n is a, c, g, or t
  misc_feature (185)..(185): n is a, c, g, or t
  misc_feature (188)..(192): n is a, c, g, or t
  misc_feature (194)..(196): n is a, c, g, or t
  misc_feature (198)..(199): n is a, c, g, or t
  misc_feature (204)..(204): n is a, c, g, or t
  misc_feature (206)..(206): n is a, c, g, or t
  misc_feature (209)..(209): n is a, c, g, or t
  misc_feature (212)..(212): n is a, c, g, or t
  misc_feature (223)..(223): n is a, c, g, or t
  misc_feature (226)..(226): n is a, c, g, or t
  misc_feature (229)..(229): n is a, c, g, or t
  misc_feature (236)..(237): n is a, c, g, or t
  misc_feature (241)..(242): n is a, c, g, or t
  misc_feature (245)..(245): n is a, c, g, or t
  misc_feature (247)..(247): n is a, c, g, or t
  misc_feature (257)..(258): n is a, c, g, or t
  misc_feature (261)..(261): n is a, c, g, or t
  misc_feature (272)..(272): n is a, c, g, or t
  misc_feature (274)..(274): n is a, c, g, or t
  misc_feature (278)..(279): n is a, c, g, or t
  misc_feature (281)..(281): n is a, c, g, or t
  misc_feature (283)..(284): n is a, c, g, or t
  misc_feature (286)..(287): n is a, c, g, or t
  misc_feature (290)..(291): n is a, c, g, or t
  misc_feature (293)..(294): n is a, c, g, or t
  misc_feature (296)..(299): n is a, c, g, or t
  misc_feature (301)..(301): n is a, c, g, or t
  misc_feature (304)..(304): n is a, c, g, or t
  misc_feature (306)..(307): n is a, c, g, or t
  misc_feature (309)..(309): n is a, c, g, or t
  misc_feature (312)..(312): n is a, c, g, or t
  misc_feature (314)..(314): n is a, c, g, or t
  misc_feature (318)..(318): n is a, c, g, or t
  misc_feature (321)..(321): n is a, c, g, or t
  misc_feature (327)..(328): n is a, c, g, or t
  misc_feature (335)..(335): n is a, c, g, or t
  misc_feature (338)..(338): n is a, c, g, or t
  misc_feature (342)..(342): n is a, c, g, or t
  misc_feature (344)..(344): n is a, c, g, or t
  misc_feature (348)..(348): n is a, c, g, or t
  misc_feature (355)..(357): n is a, c, g, or t
  misc_feature (363)..(363): n is a, c, g, or t
  misc_feature (365)..(365): n is a, c, g, or t
  misc_feature (371)..(371): n is a, c, g, or t
  misc_feature (376)..(376): n is a, c, g, or t
  misc_feature (378)..(380): n is a, c, g, or t
  misc_feature (382)..(383): n is a, c, g, or t
  misc_feature (392)..(392): n is a, c, g, or t
  misc_feature (400)..(400): n is a, c, g, or t
  misc_feature (404)..(405): n is a, c, g, or t
  misc_feature (410)..(410): n is a, c, g, or t
  misc_feature (416)..(416): n is a, c, g, or t
  misc_feature (426)..(427): n is a, c, g, or t
  misc_feature (430)..(430): n is a, c, g, or t
  misc_feature (434)..(440): n is a, c, g, or t
  misc_feature (446)..(446): n is a, c, g, or t
  misc_feature (448)..(448): n is a, c, g, or t
  misc_feature (452)..(453): n is a, c, g, or t
  misc_feature (455)..(456): n is a, c, g, or t
  misc_feature (461)..(461): n is a, c, g, or t
  misc_feature (468)..(468): n is a, c, g, or t
  misc_feature (477)..(477): n is a, c, g, or t
  misc_feature (480)..(480): n is a, c, g, or t
  misc_feature (482)..(482): n is a, c, g, or t
  misc_feature (492)..(492): n is a, c, g, or t
  misc_feature (496)..(498): n is a, c, g, or t
  misc_feature (506)..(506): n is a, c, g, or t
  misc_feature (508)..(508): n is a, c, g, or t
  misc_feature (510)..(510): n is a, c, g, or t
  misc_feature (513)..(513): n is a, c, g, or t
  misc_feature (517)..(517): n is a, c, g, or t
  misc_feature (520)..(521): n is a, c, g, or t
  misc_feature (523)..(523): n is a, c, g, or t
  misc_feature (527)..(528): n is a, c, g, or t
  misc_feature (532)..(533): n is a, c, g, or t
  misc_feature (536)..(536): n is a, c, g, or t
  misc_feature (539)..(539): n is a, c, g, or t
  misc_feature (541)..(541): n is a, c, g, or t
  misc_feature (548)..(548): n is a, c, g, or t
  misc_feature (550)..(550): n is a, c, g, or t
  misc_feature (558)..(558): n is a, c, g, or t
  misc_feature (562)..(562): n is a, c, g, or t
  misc_feature (565)..(566): n is a, c, g, or t
  misc_feature (568)..(568): n is a, c, g, or t
  misc_feature (570)..(570): n is a, c, g, or t
  misc_feature (575)..(575): n is a, c, g, or t
  misc_feature (577)..(580): n is a, c, g, or t
  misc_feature (582)..(583): n is a, c, g, or t
  misc_feature (592)..(595): n is a, c, g, or t
  misc_feature (598)..(598): n is a, c, g, or t
  misc_feature (605)..(606): n is a, c, g, or t
  misc_feature (610)..(610): n is a, c, g, or t
  misc_feature (616)..(616): n is a, c, g, or t
  misc_feature (623)..(623): n is a, c, g, or t
  misc_feature (625)..(625): n is a, c, g, or t
  misc_feature (630)..(630): n is a, c, g, or t
  misc_feature (633)..(636): n is a, c, g, or t
  misc_feature (638)..(640): n is a, c, g, or t
  misc_feature (643)..(645): n is a, c, g, or t
  misc_feature (653)..(654): n is a, c, g, or t
  misc_feature (657)..(657): n is a, c, g, or t
  misc_feature (661)..(661): n is a, c, g, or t
  misc_feature (663)..(663): n is a, c, g, or t
  misc_feature (668)..(668): n is a, c, g, or t
  misc_feature (673)..(674): n is a, c, g, or t
  misc_feature (678)..(679): n is a, c, g, or t
  misc_feature (684)..(684): n is a, c, g, or t
  misc_feature (692)..(692): n is a, c, g, or t
  misc_feature (696)..(696): n is a, c, g, or t
  misc_feature (703)..(703): n is a, c, g, or t
  misc_feature (705)..(705): n is a, c, g, or t
  misc_feature (707)..(707): n is a, c, g, or t
  misc_feature (712)..(712): n is a, c, g, or t
  misc_feature (715)..(716): n is a, c, g, or t
  misc_feature (721)..(721): n is a, c, g, or t
  misc_feature (723)..(723): n is a, c, g, or t
  misc_feature (728)..(728): n is a, c, g, or t
  misc_feature (731)..(732): n is a, c, g, or t
  misc_feature (737)..(737): n is a, c, g, or t
  misc_feature (740)..(741): n is a, c, g, or t
  misc_feature (743)..(745): n is a, c, g, or t
  misc_feature (748)..(748): n is a, c, g, or t
  misc_feature (754)..(754): n is a, c, g, or t
  misc_feature (756)..(756): n is a, c, g, or t
  misc_feature (758)..(759): n is a, c, g, or t
  misc_feature (765)..(765): n is a, c, g, or t
  misc_feature (768)..(771): n is a, c, g, or t
  misc_feature (777)..(777): n is a, c, g, or t
  misc_feature (785)..(785): n is a, c, g, or t
  misc_feature (792)..(792): n is a, c, g, or t
  misc_feature (798)..(798): n is a, c, g, or t
  misc_feature (801)..(801): n is a, c, g, or t
  misc_feature (803)..(803): n is a, c, g, or t
  misc_feature (806)..(806): n is a, c, g, or t
  misc_feature (809)..(809): n is a, c, g, or t
  misc_feature (812)..(812): n is a, c, g, or t
  misc_feature (814)..(814): n is a, c, g, or t
  misc_feature (817)..(817): n is a, c, g, or t
  misc_feature (819)..(819): n is a, c, g, or t
  misc_feature (822)..(822): n is a, c, g, or t
  misc_feature (828)..(828): n is a, c, g, or t
  misc_feature (835)..(835): n is a, c, g, or t
  misc_feature (837)..(840): n is a, c, g, or t
  misc_feature (842)..(842): n is a, c, g, or t
  misc_feature (846)..(848): n is a, c, g, or t
  misc_feature (850)..(850): n is a, c, g, or t
  misc_feature (855)..(855): n is a, c, g, or t
  misc_feature (859)..(859): n is a, c, g, or t
  misc_feature (864)..(864): n is a, c, g, or t
  misc_feature (867)..(867): n is a, c, g, or t
  misc_feature (869)..(869): n is a, c, g, or t
  misc_feature (871)..(872): n is a, c, g, or t
  misc_feature (877)..(877): n is a, c, g, or t
  misc_feature (880)..(880): n is a, c, g, or t
  misc_feature (884)..(886): n is a, c, g, or t
  misc_feature (892)..(893): n is a, c, g, or t
  misc_feature (898)..(898): n is a, c, g, or t
  misc_feature (902)..(903): n is a, c, g, or t
  misc_feature (911)..(913): n is a, c, g, or t
  misc_feature (915)..(915): n is a, c, g, or t
  misc_feature (918)..(918): n is a, c, g, or t
  misc_feature (920)..(921): n is a, c, g, or t
  misc_feature (923)..(924): n is a, c, g, or t
  misc_feature (928)..(928): n is a, c, g, or t
  misc_feature (933)..(934): n is a, c, g, or t
  misc_feature (939)..(939): n is a, c, g, or t
  misc_feature (942)..(942): n is a, c, g, or t
  misc_feature (944)..(944): n is a, c, g, or t
  misc_feature (947)..(947): n is a, c, g, or t
  misc_feature (953)..(954): n is a, c, g, or t
  misc_feature (956)..(956): n is a, c, g, or t
  misc_feature (958)..(958): n is a, c, g, or t
  misc_feature (962)..(962): n is a, c, g, or t
  misc_feature (965)..(965): n is a, c, g, or t
  misc_feature (969)..(970): n is a, c, g, or t
  misc_feature (980)..(980): n is a, c, g, or t
  misc_feature (982)..(982): n is a, c, g, or t
  misc_feature (986)..(986): n is a, c, g, or t
  misc_feature (988)..(988): n is a, c, g, or t
  misc_feature (994)..(994): n is a, c, g, or t
  misc_feature (999)..(1000): n is a, c, g, or t
  misc_feature (1002)..(1002): n is a, c, g, or t
  misc_feature (1004)..(1006): n is a, c, g, or t
  misc_feature (1009)..(1009): n is a, c, g, or t
  misc_feature (1013)..(1014): n is a, c, g, or t
  misc_feature (1018)..(1018): n is a, c, g, or t
  misc_feature (1024)..(1024): n is a, c, g, or t
  misc_feature (1031)..(1031): n is a, c, g, or t
  misc_feature (1034)..(1034): n is a, c, g, or t
  misc_feature (1037)..(1038): n is a, c, g, or t
  misc_feature (1047)..(1049): n is a, c, g, or t
  misc_feature (1053)..(1053): n is a, c, g, or t
  misc_feature (1064)..(1064): n is a, c, g, or t
  misc_feature (1072)..(1072): n is a, c, g, or t
  misc_feature (1074)..(1074): n is a, c, g, or t
  misc_feature (1076)..(1076): n is a, c, g, or t
  misc_feature (1083)..(1083): n is a, c, g, or t
  misc_feature (1085)..(1085): n is a, c, g, or t
  misc_feature (1088)..(1088): n is a, c, g, or t
  misc_feature (1095)..(1095): n is a, c, g, or t
  misc_feature (1109)..(1109): n is a, c, g, or t
  misc_feature (1112)..(1112): n is a, c, g, or t
  misc_feature (1116)..(1116): n is a, c, g, or t
  misc_feature (1122)..(1123): n is a, c, g, or t
  misc_feature (1125)..(1125): n is a, c, g, or t
  misc_feature (1132)..(1134): n is a, c, g, or t
  misc_feature (1140)..(1140): n is a, c, g, or t
  misc_feature (1142)..(1143): n is a, c, g, or t
  misc_feature (1147)..(1147): n is a, c, g, or t
  misc_feature (1152)..(1152): n is a, c, g, or t
  misc_feature (1155)..(1155): n is a, c, g, or t
  misc_feature (1158)..(1160): n is a, c, g, or t
  misc_feature (1162)..(1163): n is a, c, g, or t
  misc_feature (1172)..(1172): n is a, c, g, or t
  misc_feature (1175)..(1175): n is a, c, g, or t
  misc_feature (1177)..(1177): n is a, c, g, or t
  misc_feature (1180)..(1181): n is a, c, g, or t
  misc_feature (1183)..(1185): n is a, c, g, or t
  misc_feature (1187)..(1187): n is a, c, g, or t
  misc_feature (1191)..(1191): n is a, c, g, or t
  misc_feature (1193)..(1193): n is a, c, g, or t
  misc_feature (1206)..(1210): n is a, c, g, or t
  misc_feature (1212)..(1212): n is a, c, g, or t
  misc_feature (1214)..(1215): n is a, c, g, or t
  misc_feature (1220)..(1220): n is a, c, g, or t
  misc_feature (1222)..(1222): n is a, c, g, or t
  misc_feature (1234)..(1234): n is a, c, g, or t
  misc_feature (1237)..(1238): n is a, c, g, or t
  misc_feature (1242)..(1242): n is a, c, g, or t
  misc_feature (1249)..(1250): n is a, c, g, or t
  misc_feature (1254)..(1254): n is a, c, g, or t
  misc_feature (1261)..(1262): n is a, c, g, or t
  misc_feature (1264)..(1265): n is a, c, g, or t
  misc_feature (1267)..(1267): n is a, c, g, or t
  misc_feature (1271)..(1272): n is a, c, g, or t
  misc_feature (1274)..(1277): n is a, c, g, or t
  misc_feature (1279)..(1280): n is a, c, g, or t
  misc_feature (1283)..(1284): n is a, c, g, or t
  misc_feature (1286)..(1287): n is a, c, g, or t
  misc_feature (1291)..(1292): n is a, c, g, or t
  misc_feature (1294)..(1294): n is a, c, g, or t
  misc_feature (1296)..(1301): n is a, c, g, or t
  misc_feature (1303)..(1303): n is a, c, g, or t
  misc_feature (1309)..(1309): n is a, c, g, or t
  misc_feature (1311)..(1313): n is a, c, g, or t
  misc_feature (1316)..(1321): n is a, c, g, or t
  misc_feature (1323)..(1324): n is a, c, g, or t
  misc_feature (1326)..(1334): n is a, c, g, or t
  misc_feature (1336)..(1336): n is a, c, g, or t
  misc_feature (1338)..(1338): n is a, c, g, or t
  misc_feature (1340)..(1340): n is a, c, g, or t
  misc_feature (1343)..(1345): n is a, c, g, or t
  misc_feature (1348)..(1349): n is a, c, g, or t
  misc_feature (1352)..(1353): n is a, c, g, or t
  misc_feature (1355)..(1355): n is a, c, g, or t
  misc_feature (1357)..(1358): n is a, c, g, or t
  misc_feature (1360)..(1364): n is a, c, g, or t
  misc_feature (1370)..(1370): n is a, c, g, or t
  misc_feature (1378)..(1378): n is a, c, g, or t
  misc_feature (1383)..(1383): n is a, c, g, or t
  misc_feature (1389)..(1389): n is a, c, g, or t
  misc_feature (1391)..(1391): n is a, c, g, or t
  misc_feature (1393)..(1394): n is a, c, g, or t
  misc_feature (1396)..(1397): n is a, c, g, or t
  misc_feature (1400)..(1400): n is a, c, g, or t
  misc_feature (1402)..(1402): n is a, c, g, or t
  misc_feature (1404)..(1404): n is a, c, g, or t
  misc_feature (1407)..(1414): n is a, c, g, or t
  misc_feature (1416)..(1416): n is a, c, g, or t
  misc_feature (1972)..(1972): n is a, c, g, or t
  misc_feature (2519)..(2519): n is a, c, g, or t
  misc_feature (2522)..(2523): n is a, c, g, or t
  misc_feature (2525)..(2529): n is a, c, g, or t
  misc_feature (2532)..(2533): n is a, c, g, or t
  misc_feature (2535)..(2539): n is a, c, g, or t
  misc_feature (2541)..(2543): n is a, c, g, or t
  misc_feature (2555)..(2555): n is a, c, g, or t
  misc_feature (2559)..(2561): n is a, c, g, or t
  misc_feature (2564)..(2564): n is a, c, g, or t
  misc_feature (2568)..(2568): n is a, c, g, or t
  misc_feature (2583)..(2583): n is a, c, g, or t
  misc_feature (2585)..(2585): n is a, c, g, or t
  misc_feature (2589)..(2589): n is a, c, g, or t
  misc_feature (2593)..(2596): n is a, c, g, or t
  misc_feature (2599)..(2599): n is a, c, g, or t
  misc_feature (2602)..(2604): n is a, c, g, or t
  misc_feature (2610)..(2610): n is a, c, g, or t
  misc_feature (2612)..(2612): n is a, c, g, or t
  misc_feature (2614)..(2614): n is a, c, g, or t
  misc_feature (2616)..(2616): n is a, c, g, or t
  misc_feature (2618)..(2618): n is a, c, g, or t
  misc_feature (2620)..(2621): n is a, c, g, or t
  misc_feature (2623)..(2623): n is a, c, g, or t
  misc_feature (2627)..(2630): n is a, c, g, or t
  misc_feature (2635)..(2637): n is a, c, g, or t
  misc_feature (2642)..(2642): n is a, c, g, or t
  misc_feature (2645)..(2646): n is a, c, g, or t
  misc_feature (2648)..(2649): n is a, c, g, or t
  misc_feature (2652)..(2653): n is a, c, g, or t
  misc_feature (2659)..(2659): n is a, c, g, or t
  misc_feature (2665)..(2666): n is a, c, g, or t
  misc_feature (2668)..(2668): n is a, c, g, or t
  misc_feature (2672)..(2674): n is a, c, g, or t
  misc_feature (2679)..(2679): n is a, c, g, or t
  misc_feature (2681)..(2681): n is a, c, g, or t
  misc_feature (2683)..(2689): n is a, c, g, or t
  misc_feature (2691)..(2693): n is a, c, g, or t
  misc_feature (2698)..(2699): n is a, c, g, or t
  misc_feature (2703)..(2703): n is a, c, g, or t
  misc_feature (2708)..(2709): n is a, c, g, or t
  misc_feature (2717)..(2717): n is a, c, g, or t
  misc_feature (2720)..(2721): n is a, c, g, or t
  misc_feature (2724)..(2724): n is a, c, g, or t
  misc_feature (2731)..(2731): n is a, c, g, or t
  misc_feature (2733)..(2733): n is a, c, g, or t
  misc_feature (2735)..(2738): n is a, c, g, or t
  misc_feature (2741)..(2741): n is a, c, g, or t
  misc_feature (2746)..(2746): n is a, c, g, or t
  misc_feature (2751)..(2751): n is a, c, g, or t
  misc_feature (2758)..(2759): n is a, c, g, or t
  misc_feature (2767)..(2767): n is a, c, g, or t
  misc_feature (2771)..(2771): n is a, c, g, or t
  misc_feature (2776)..(2777): n is a, c, g, or t
  misc_feature (2780)..(2784): n is a, c, g, or t
  misc_feature (2786)..(2787): n is a, c, g, or t
  misc_feature (2789)..(2789): n is a, c, g, or t
  misc_feature (2793)..(2793): n is a, c, g, or t
  misc_feature (2798)..(2799): n is a, c, g, or t
  misc_feature (2803)..(2803): n is a, c, g, or t
  misc_feature (2805)..(2805): n is a, c, g, or t
  misc_feature (2808)..(2808): n is a, c, g, or t
  misc_feature (2810)..(2811): n is a, c, g, or t
  misc_feature (2813)..(2817): n is a, c, g, or t
  misc_feature (2819)..(2820): n is a, c, g, or t
  misc_feature (2823)..(2823): n is a, c, g, or t
  misc_feature (2825)..(2825): n is a, c, g, or t
  misc_feature (2828)..(2829): n is a, c, g, or t
  misc_feature (2842)..(2842): n is a, c, g, or t
  misc_feature (2846)..(2846): n is a, c, g, or t
  misc_feature (2853)..(2853): n is a, c, g, or t
  misc_feature (2858)..(2859): n is a, c, g, or t
  misc_feature (2862)..(2862): n is a, c, g, or t
  misc_feature (2865)..(2865): n is a, c, g, or t
  misc_feature (2868)..(2868): n is a, c, g, or t
  misc_feature (2871)..(2871): n is a, c, g, or t
  misc_feature (2878)..(2878): n is a, c, g, or t
  misc_feature (2881)..(2885): n is a, c, g, or t
  misc_feature (2887)..(2888): n is a, c, g, or t
  misc_feature (2893)..(2896): n is a, c, g, or t
  misc_feature (2899)..(2899): n is a, c, g, or t
  misc_feature (2901)..(2902): n is a, c, g, or t
  misc_feature (2904)..(2907): n is a, c, g, or t
  misc_feature (2909)..(2910): n is a, c, g, or t
  misc_feature (2912)..(2912): n is a, c, g, or t
  misc_feature (2920)..(2920): n is a, c, g, or t
  misc_feature (2924)..(2924): n is a, c, g, or t
  misc_feature (2931)..(2932): n is a, c, g, or t
  misc_feature (2937)..(2937): n is a, c, g, or t
  misc_feature (2939)..(2939): n is a, c, g, or t
  misc_feature (2946)..(2947): n is a, c, g, or t
  misc_feature (2956)..(2956): n is a, c, g, or t
  misc_feature (2959)..(2960): n is a, c, g, or t
  misc_feature (2962)..(2962): n is a, c, g, or t
  misc_feature (2970)..(2970): n is a, c, g, or t
  misc_feature (2972)..(2972): n is a, c, g, or t
  misc_feature (2978)..(2981): n is a, c, g, or t
  misc_feature (2983)..(2983): n is a, c, g, or t
  misc_feature (2985)..(2985): n is a, c, g, or t
  misc_feature (2989)..(2989): n is a, c, g, or t
  misc_feature (2991)..(2991): n is a, c, g, or t
  misc_feature (2993)..(2995): n is a, c, g, or t
  misc_feature (2999)..(3001): n is a, c, g, or t
  misc_feature (3003)..(3003): n is a, c, g, or t
  misc_feature (3009)..(3010): n is a, c, g, or t
  misc_feature (3015)..(3015): n is a, c, g, or t
  misc_feature (3018)..(3018): n is a, c, g, or t
  misc_feature (3021)..(3022): n is a, c, g, or t
  misc_feature (3024)..(3025): n is a, c, g, or t
  misc_feature (3028)..(3028): n is a, c, g, or t
  misc_feature (3030)..(3031): n is a, c, g, or t
  misc_feature (3033)..(3033): n is a, c, g, or t
  misc_feature (3036)..(3037): n is a, c, g, or t
  misc_feature (3040)..(3040): n is a, c, g, or t
  misc_feature (3042)..(3042): n is a, c, g, or t
  misc_feature (3047)..(3047): n is a, c, g, or t
  misc_feature (3052)..(3053): n is a, c, g, or t
  misc_feature (3055)..(3055): n is a, c, g, or t
  misc_feature (3059)..(3060): n is a, c, g, or t
  misc_feature (3063)..(3063): n is a, c, g, or t
  misc_feature (3065)..(3065): n is a, c, g, or t
  misc_feature (3069)..(3071): n is a, c, g, or t
  misc_feature (3074)..(3077): n is a, c, g, or t
  misc_feature (3081)..(3082): n is a, c, g, or t
  misc_feature (3084)..(3084): n is a, c, g, or t
  misc_feature (3087)..(3087): n is a, c, g, or t
  misc_feature (3090)..(3090): n is a, c, g, or t
  misc_feature (3092)..(3092): n is a, c, g, or t
  misc_feature (3095)..(3096): n is a, c, g, or t
  misc_feature (3102)..(3102): n is a, c, g, or t
  misc_feature (3110)..(3110): n is a, c, g, or t
  misc_feature (3113)..(3113): n is a, c, g, or t
  misc_feature (3115)..(3115): n is a, c, g, or t
  misc_feature (3119)..(3119): n is a, c, g, or t
  misc_feature (3122)..(3123): n is a, c, g, or t
  misc_feature (3129)..(3129): n is a, c, g, or t
  misc_feature (3135)..(3135): n is a, c, g, or t
  misc_feature (3138)..(3138): n is a, c, g, or t
  misc_feature (3141)..(3141): n is a, c, g, or t
  misc_feature (3144)..(3144): n is a, c, g, or t
  misc_feature (3149)..(3150): n is a, c, g, or t
  misc_feature (3155)..(3155): n is a, c, g, or t
  misc_feature (3158)..(3158): n is a, c, g, or t
  misc_feature (3164)..(3164): n is a, c, g, or t
  misc_feature (3167)..(3167): n is a, c, g, or t
  misc_feature (3171)..(3171): n is a, c, g, or t
  misc_feature (3179)..(3180): n is a, c, g, or t
  misc_feature (3182)..(3182): n is a, c, g, or t
  misc_feature (3186)..(3186): n is a, c, g, or t
  misc_feature (3188)..(3188): n is a, c, g, or t
  misc_feature (3191)..(3192): n is a, c, g, or t
  misc_feature (3198)..(3198): n is a, c, g, or t
  misc_feature (3207)..(3207): n is a, c, g, or t
  misc_feature (3209)..(3209): n is a, c, g, or t
  misc_feature (3212)..(3215): n is a, c, g, or t
  misc_feature (3217)..(3217): n is a, c, g, or t
  misc_feature (3220)..(3222): n is a, c, g, or t
  misc_feature (3224)..(3224): n is a, c, g, or t
  misc_feature (3229)..(3231): n is a, c, g, or t
  misc_feature (3236)..(3237): n is a, c, g, or t
  misc_feature (3240)..(3240): n is a, c, g, or t
  misc_feature (3243)..(3243): n is a, c, g, or t
  misc_feature (3247)..(3247): n is a, c, g, or t
  misc_feature (3249)..(3249): n is a, c, g, or t
  misc_feature (3260)..(3260): n is a, c, g, or t
  misc_feature (3263)..(3263): n is a, c, g, or t
  misc_feature (3265)..(3266): n is a, c, g, or t
  misc_feature (3269)..(3269): n is a, c, g, or t
  misc_feature (3272)..(3272): n is a, c, g, or t
  misc_feature (3275)..(3275): n is a, c, g, or t
  misc_feature (3278)..(3278): n is a, c, g, or t
  misc_feature (3280)..(3280): n is a, c, g, or t
  misc_feature (3282)..(3282): n is a, c, g, or t
  misc_feature (3288)..(3290): n is a, c, g, or t
  misc_feature (3294)..(3294): n is a, c, g, or t
  misc_feature (3300)..(3301): n is a, c, g, or t
  misc_feature (3303)..(3304): n is a, c, g, or t
  misc_feature (3306)..(3306): n is a, c, g, or t
  misc_feature (3309)..(3312): n is a, c, g, or t
  misc_feature (3314)..(3319): n is a, c, g, or t
  misc_feature (3332)..(3332): n is a, c, g, or t
  misc_feature (3335)..(3335): n is a, c, g, or t
  misc_feature (3340)..(3341): n is a, c, g, or t
  misc_feature (3344)..(3346): n is a, c, g, or t
  misc_feature (3348)..(3348): n is a, c, g, or t
  misc_feature (3350)..(3350): n is a, c, g, or t
  misc_feature (3352)..(3352): n is a, c, g, or t
  misc_feature (3358)..(3358): n is a, c, g, or t
  misc_feature (3360)..(3360): n is a, c, g, or t
  misc_feature (3363)..(3363): n is a, c, g, or t
  misc_feature (3374)..(3374): n is a, c, g, or t
  misc_feature (3378)..(3378): n is a, c, g, or t
  misc_feature (3383)..(3383): n is a, c, g, or t
  misc_feature (3387)..(3387): n is a, c, g, or t
  misc_feature (3398)..(3399): n is a, c, g, or t
  misc_feature (3402)..(3402): n is a, c, g, or t
  misc_feature (3404)..(3404): n is a, c, g, or t
  misc_feature (3406)..(3406): n is a, c, g, or t
  misc_feature (3416)..(3416): n is a, c, g, or t
  misc_feature (3422)..(3422): n is a, c, g, or t
  misc_feature (3425)..(3425): n is a, c, g, or t
  misc_feature (3428)..(3431): n is a, c, g, or t
  misc_feature (3433)..(3433): n is a, c, g, or t
  misc_feature (3437)..(3437): n is a, c, g, or t
  misc_feature (3442)..(3444): n is a, c, g, or t
  misc_feature (3446)..(3446): n is a, c, g, or t
  misc_feature (3448)..(3449): n is a, c, g, or t
  misc_feature (3451)..(3453): n is a, c, g, or t
  misc_feature (3455)..(3457): n is a, c, g, or t
  misc_feature (3459)..(3459): n is a, c, g, or t
  misc_feature (3462)..(3462): n is a, c, g, or t
  misc_feature (3464)..(3467): n is a, c, g, or t
  misc_feature (3469)..(3471): n is a, c, g, or t
  misc_feature (3473)..(3473): n is a, c, g, or t
  misc_feature (3475)..(3475): n is a, c, g, or t
  misc_feature (3477)..(3477): n is a, c, g, or t
  misc_feature (3479)..(3479): n is a, c, g, or t
  misc_feature (3484)..(3487): n is a, c, g, or t
  misc_feature (3489)..(3489): n is a, c, g, or t
  misc_feature (3491)..(3491): n is a, c, g, or t
  misc_feature (3493)..(3493): n is a, c, g, or t
  misc_feature (3495)..(3495): n is a, c, g, or t
  misc_feature (3499)..(3499): n is a, c, g, or t
  misc_feature (3501)..(3503): n is a, c, g, or t
  misc_feature (3505)..(3507): n is a, c, g, or t
  misc_feature (3509)..(3509): n is a, c, g, or t
  misc_feature (3512)..(3519): n is a, c, g, or t
  misc_feature (3521)..(3521): n is a, c, g, or t
  misc_feature (3525)..(3528): n is a, c, g, or t
  misc_feature (3530)..(3534): n is a, c, g, or t
  misc_feature (3536)..(3537): n is a, c, g, or t
  misc_feature (3542)..(3544): n is a, c, g, or t
  misc_feature (3546)..(3547): n is a, c, g, or t
  misc_feature (3550)..(3560): n is a, c, g, or t
  misc_feature (3563)..(3571): n is a, c, g, or t
  misc_feature (3574)..(3574): n is a, c, g, or t
  misc_feature (3577)..(3580): n is a, c, g, or t
  misc_feature (3583)..(3584): n is a, c, g, or t
  misc_feature (3587)..(3587): n is a, c, g, or t
  misc_feature (3589)..(3590): n is a, c, g, or t
  misc_feature (3593)..(3594): n is a, c, g, or t
  misc_feature (3597)..(3597): n is a, c, g, or t
  misc_feature (3599)..(3599): n is a, c, g, or t
  misc_feature (3602)..(3603): n is a, c, g, or t
  misc_feature (3607)..(3607): n is a, c, g, or t
  misc_feature (3611)..(3614): n is a, c, g, or t
  misc_feature (3616)..(3619): n is a, c, g, or t
  misc_feature (3622)..(3622): n is a, c, g, or t
  misc_feature (3624)..(3632): n is a, c, g, or t
  misc_feature (3635)..(3647): n is a, c, g, or t
  misc_feature (3649)..(3649): n is a, c, g, or t
  misc_feature (3651)..(3652): n is a, c, g, or t
  misc_feature (3655)..(3655): n is a, c, g, or t
  misc_feature (3659)..(3661): n is a, c, g, or t
  misc_feature (3664)..(3665): n is a, c, g, or t
  misc_feature (3668)..(3668): n is a, c, g, or t
  misc_feature (3670)..(3671): n is a, c, g, or t
  misc_feature (3673)..(3674): n is a, c, g, or t
  misc_feature (3677)..(3677): n is a, c, g, or t
  misc_feature (3679)..(3681): n is a, c, g, or t
  misc_feature (3683)..(3683): n is a, c, g, or t
  misc_feature (3686)..(3691): n is a, c, g, or t
  misc_feature (3693)..(3696): n is a, c, g, or t
  misc_feature (3699)..(3700): n is a, c, g, or t
  misc_feature (3705)..(3706): n is a, c, g, or t
  misc_feature (3713)..(3713): n is a, c, g, or t
  misc_feature (3715)..(3715): n is a, c, g, or t
  misc_feature (3720)..(3720): n is a, c, g, or t
  misc_feature (3722)..(3722): n is a, c, g, or t
  misc_feature (3724)..(3727): n is a, c, g, or t
  misc_feature (3729)..(3735): n is a, c, g, or t
  misc_feature (3737)..(3739): n is a, c, g, or t
  misc_feature (3744)..(3746): n is a, c, g, or t
  misc_feature (3748)..(3748): n is a, c, g, or t
  misc_feature (3753)..(3756): n is a, c, g, or t
  misc_feature (3760)..(3763): n is a, c, g, or t
  misc_feature (3765)..(3770): n is a, c, g, or t
  misc_feature (3772)..(3772): n is a, c, g, or t
  misc_feature (3774)..(3775): n is a, c, g, or t
  misc_feature (3777)..(3778): n is a, c, g, or t
  misc_feature (3783)..(3783): n is a, c, g, or t
  misc_feature (3785)..(3785): n is a, c, g, or t
  misc_feature (3787)..(3787): n is a, c, g, or t
  misc_feature (3789)..(3790): n is a, c, g, or t
  misc_feature (3792)..(3793): n is a, c, g, or t
  misc_feature (3798)..(3799): n is a, c, g, or t
  misc_feature (3807)..(3809): n is a, c, g, or t
  misc_feature (3812)..(3812): n is a, c, g, or t
  misc_feature (3814)..(3814): n is a, c, g, or t
  misc_feature (3816)..(3819): n is a, c, g, or t
  misc_feature (3824)..(3825): n is a, c, g, or t
  misc_feature (3827)..(3830): n is a, c, g, or t
  misc_feature (3832)..(3832): n is a, c, g, or t
  misc_feature (3838)..(3839): n is a, c, g, or t
  misc_feature (3842)..(3844): n is a, c, g, or t
  misc_feature (3848)..(3849): n is a, c, g, or t
  misc_feature (3853)..(3855): n is a, c, g, or t
  misc_feature (3857)..(3858): n is a, c, g, or t
  misc_feature (3860)..(3861): n is a, c, g, or t
  misc_feature (3865)..(3865): n is a, c, g, or t
  misc_feature (3867)..(3869): n is a, c, g, or t
  misc_feature (3874)..(3874): n is a, c, g, or t
  misc_feature (3876)..(3879): n is a, c, g, or t
  misc_feature (3881)..(3881): n is a, c, g, or t
  misc_feature (3884)..(3885): n is a, c, g, or t
  misc_feature (3889)..(3890): n is a, c, g, or t
  misc_feature (3893)..(3893): n is a, c, g, or t
  misc_feature (3897)..(3899): n is a, c, g, or t
  misc_feature (3901)..(3903): n is a, c, g, or t
  misc_feature (3905)..(3907): n is a, c, g, or t
  misc_feature (3910)..(3911): n is a, c, g, or t
  misc_feature (3913)..(3913): n is a, c, g, or t
  misc_feature (3917)..(3917): n is a, c, g, or t
  misc_feature (3919)..(3919): n is a, c, g, or t
  misc_feature (3921)..(3923): n is a, c, g, or t
  misc_feature (3925)..(3930): n is a, c, g, or t
  misc_feature (3932)..(3932): n is a, c, g, or t
  misc_feature (3934)..(3938): n is a, c, g, or t
  misc_feature (3940)..(3941): n is a, c, g, or t
  misc_feature (3944)..(3944): n is a, c, g, or t
  misc_feature (3946)..(3957): n is a, c, g, or t
  misc_feature (3959)..(3961): n is a, c, g, or t
  misc_feature (3963)..(3972): n is a, c, g, or t
  misc_feature (3974)..(3975): n is a, c, g, or t
  misc_feature (3977)..(3980): n is a, c, g, or t
  misc_feature (3982)..(3986): n is a, c, g, or t
  misc_feature (3990)..(3998): n is a, c, g, or t
ngnnntcgtnngtagcggnnnnacnatcnaancngggcnnnccagnngntntcncatnncncctgcgacagacctncntgncntttgcnnancncccnnctnnnccgggcaggaaggnngnntgnncaggagnnnncnaccannncncgnngcacanggnnattgcctgttnttntaanggcgcnccnnnnngnnntnncgccncnggngtnctccgaaggcnccnaancgagatnngacnncantncaacggggcnngtnaagcgcgtcangnctcnnancnngnnaanngnngnnnngnccncnntnaangngacnccncggagnnattggtnagncttnantacngaaaccnnncgccantngggcanaagcngnnngnnttgccccgnaaggcgcnccanncggcnagtgcnttcagtgaanncgnccannnnnnnctgaangncganntnntgggncggatgnggcattttnatncnggcgatccancgcnnntgcgcctngntncantggnttnncncgtnnaagnngtnacngngccgganangaaaagcnaaantgnncngnttggncnnnntnnccgccaacnnnncancctctcnngatngggtgnggtcccncntggcntcnnnntnnncannnggcacaannacngccnanaattnaccgnnccgnngcagncgggccancatntgggcancncngtgancanntttgntncggtngcnnctttnctnngnnntcnttgctngngnnaccacnatnnnntcaaanccttgagntgcaagntggcgntananctnatnacnanagngnccngcttcntagacgnannnnanctcnnnanctttngaanccagnttncngnngactntgncgannncgccanngctcncgtnnatttttcnnnanctncnnanntcancgttnnggccngcntnggngatagnnancncaanggngttnntgtggacgtncnatcntncaaatntgctnnantnnntcntganntgcntccttngttatgnctntgnnttggggttnnngagnttccaacatancccacgtntncnaggggcngntcnttttttntcaactgtcagccnttntgtntagggnngnttcaatnnnagcacncnnaatngtcgntcnctnnncnngtcaaaaantcnangcnntnnncnttcnancgatttgcttggnnnnnancnnttatngnctgctattgttnacnntctnaagcccnnatcntattgcnnannancttnntnnnncnntanntnncaanncntnnnnnnanaaaacntnnnaannnnnngnntnnnnnnnnnananantannntannaannanannannnnncttgantctcgagntatangatgananannannggnanancgnnnnnnnncnttgttttttgaaactctagcgaagctgttttgggtaagggcgaaggaagtctggtccttacaactcggaaaactgactgaagggagagcagatatggaaaaccgaggtatttcatcaagggcaaaaaaacttaaagacaagtatttggctactccgccagggatttgctctgaacgggccaagattgtcacgcaggcttatcaagattatgagagtctgcctgcaatacttaggcgggctaaagttctcaaacgggttcttgaagaaatgtcaatttggattgcaaatgatgaactcattgttggtaatcaggcaaaagttgccagatattctccaatcttccccgaattttcgtttgagtggattctgggtgaaatggatgaagaaccttttgagttgtgtgatactgataggttccttattgatgaggaaactaagtccgatctacggaaaattgggccttattggaaggggaaaacggttaatgatctaaccattggcagactgccagaagaaactgccgcaagtattgcaaattctgctgtatataactttnctccgagtgtagtggtttgcacaggagttggtcattattcgccaagttataaaaaagtaatcactaaagggtttaatggaatcaggcaggatgcacttgaaaagctcaaggtgatgggaattccggccgatggaaatgaagtcgacacgtacaattttttgaaagccgttatcatttcgtgtgatgctgccgtttcttttgcccagcgttatgctgacttggctaagcagatggcagtagaagaaagtgattctgctagaaaaacagagttgttgaagattgcaagtatttgcgaaaaggtaccggctaatcccgccacaacattccatgaggcttgccaagccttctggtttttccaattaattttgcaacttgaatctaatggccactcaatctcaccaggtcgctttgaccaatatatgtatccctattattcaaaagacctattgacgggacaattggcgcgggaagatgcgcaagaactggtggagtgtctttggatcaaactgtcggaaattaataagattgtgccatttggagttacagntanngnnnnngcnntnnnnnannntctaattctaantgtnnntgntcgngatcgcgatggcgangncaangatnnnnccnttnnntttttntntntntntnngnatgnnnntcttnnncttcngcnncnntcnncgtctntgtgtnngngtannngtaangntnnnnnnnannnaattnngaangtaanngtaaaggnaannggnatggggntncnnnnccntgacnatganaaagttnnagttctgnttcngcgtnngcnnnnnanngnaaangcaanngaanangcnanngnnnnngnngtngnagnnggacctgaacctnaagnttatggntatgnntgnggnggnggngatggtnctnnnnntnntcttnnnnttngnntnnnntnngnctttgacnatgncaatagnnaaagnanaagtatnnaaaccggtnccnnanccggaacntnaactgnnnntnantctnantnnnaagnnnangaggannagganaangannannaanannangtnnatnantttgnagtcnntntcannacnancacnnncgnnnncgannangtngancntgnncctttnccttttcnttntnttgnatnnggaatngaaaanggnatnganattgnngttgnagnggcagnggncaangccaatgnnantgcnantgnnggtgtnggtgtcggngncgnnnncnttnnngntatcnnnatgannatnatngatntngatgtagaagnagnanntgnatntgnatngntnttgatnnngaantggaanngnnanggnnnngnnnnnnatagaattagaanaanagtanntgnnnangntnatgatnangangaggaagaggnagangcagnagcngcagcagcagnngangntnaatttaaatngaaatnganagnnnngngagngcgannncnanngnnncnnnanccngnnnntnnncntntnantatgnnnntngntntnggtntnnntnnngntgnnnnnnnngnaggnnnngnnnnngnngatgnnntnnccnnnnnnnnnnntcnnnnnnnnnatngannnntanntgnanntanntcngnatnnaaanctgnnnntnnnnttnannnnnnnnnaannnnnnnnnnnnncnanntcnatcnnnatnnccntnnanntgnannngnagnnnnnncnnnngannctgcnnttaaagntnaattntntnnnnannnnnnncnnntccannncnacgtnnnngatnnnnannnnnnangnnanngacananananncnnataannataaggannnggncntnnnngtggnngnnnntngtgctnnttnnnttgnncttnnncnngnncttnannnggacntnnnnanaannacannaanagannnannngnnnagnntntttntnannntnnnnnnanannnnnanntanannnnnnnnnnnncnnnannnnnnnnnngnngnnnntnnnnngggnnnnnnnnnga

SEQ ID NO: 454 - DNA, 4000 bp, Escherichia coli
  misc_feature (135)..(135): n is a, c, g, or t
  misc_feature (159)..(159): n is a, c, g, or t
  misc_feature (172)..(172): n is a, c, g, or t
  misc_feature (1163)..(1163): n is a, c, g, or t
  misc_feature (2847)..(2847): n is a, c, g, or t
  misc_feature (3331)..(3331): n is a, c, g, or t
taagcgtttactccaaaaatctcttggcacaagacaatgcccgggcctttgccgttttttggcaaagcgagatagccactgaacgaatcgccgtcttttgcctccacctgaatccactgtcctgtcatgatgaancctcttaatgaattaaactaaatngctccaagttttnttagttgtatagtctatctttttttgcgctagttatatccttgacaaatgaatacccagtccttaaattggatttgatatttcgaagtttaaatagtttgtctctagtgcagcggcacaacgcacagagaggatgtttcatgaaaggtttttcgaggcgggaatttcttaaagcctcagggtcagcgattgcgctcccattatcaacgtctttgacattaaaagggtgctctttcgatcaagagatgctcacgatcgcctacggggcaaatttgagttcgtgggacccaacgacagggctatcatctttgaacccacaaattcagtcactctacaaggctgtatttgattcttttattgggcaaagtcctgatcggagtttacgtcccggcatacttatcgattggggatggaacgacgatcgatccaagattcagatgaccgtcaggagggatgccttttggcatgatggactgccagttactgcagatgatgtcgtgtggtctctggagcgggctggcaattcagtcaacggtaatccaatgcactttatttggagcaaaattactaattttagtgtctcgggtaatacagtcacagcggatgtcagcgagtacgatccgacgatcttcaagtggatggtccacctgacaggatatattttgccgaagcatgcctatactgctctaggtgccgatgcgtgggagcaaacaccgattggcagcggtccttatatagttgacaagtatgagcagaacaactcggttttacttagagcatttcctcaatattggggacccaaacctcaatttgaaactgtgctgatcaaaatgatcccagatgcgcaagctcgcgttgaggcgcttgaagccggcaaatgtgatttggctgtcggtctgtctttcagtgagtttaatcgtgtaaccagtaaaacatcgtggactggaaacgcttacccggttacggatgtaggtctgatctttttaacgaanaaagatgcattaatgaaggatagaaatattcggctcgctatgcatcatgccattgataaacagaaattaatcgatgagctgatgctcggatatggaaggccaatggattcacttcaggtgccgggctatgatgcatatgatccatccgttggctttggccgaccaatggattcatttcaggtacctttatttgatgcgtacgacccctcaatcaaaacggactttgacccgtaccgcgcgagaaattatttgtcaaagtcaggatattcaaaatcaaagcccgtcaagttaacgattcagacaactcaagggtatcgacctaaagactacgagatggtcaagatgattacagagatgtggcaggaagtcggtatagaagcaaacattcagatccacgcggacaaggaacacttacggctgcgtgcaaggcatgaactggctccagcggctttttttaactggagtaattccactggagatccattcatgtctacgggcttagcaatgcttagtaattctcctgactctacatttaagagtgcagaattagatcgtttgatcatgccattaatgaatgaggctgatgagcgtaagcgaattcggggttatcaaaaaatcgatcgatatattgcggatgaggggttgattatccctttagtgcaattttttcaaacagtggcgcactctagggatatcgagttcacaccgcactcgagtggtgaggttttgccccaggaaattagatcactataactttagtacacgaataattacagattatcatgtgtagcttttgattgattagctgaagcgtgaaataatgccacagaggacatgtcgcattagtagaacgattttaagggagcttgagagatgcaaatagacaatgcgaccgcgttggtgacgggtgccaatcgaggtattgggttggcttttgtggagtgcttgattgctcatggagtaaaaaagatttacgttggtgttcgagatctttcgtcggccaattctttggtcagtctgtatcctgggctggttcatccgatcgcgttggacataaccaatcagcttcaaatagatgcggcggttaatgaagcaaatgacattactttgttgattaataacgcaggggcaaacagcaacacagcactggtcgcggttgatgggttggataatgcaagagatgagatggagactaattactttggtactttatcgatgtgccgggcatttgcgcccatattaaagagtaatggcggtgggacaatcgttaatgtcttgtctatcttatcccttgtgaatttacccgcgagcggttcttatagtgtttctaaggctgctgcctattctatgaaccaaggtgttagagcagaattggcgtcgcaacaaactaaagtgattggtgtaatgcctggggcagtggataccgacatggctaaagaattcgagggtccgaaagaaaaaccgcttgatgttgccgaggctgcaattaaagcggttgaagatggcgtagaagatgtattcccgggcgatatggcgcaagcagtgagtcagggacatgcccaagacgctaaggcagtggaacaagagttttctgcgtacataccggggtaatggtttccgtgatgtattaaaatgacggaatagtgaatatattttgaaaaattctatttatcccaaattctantataaaaactttaaggagtttagacgtgttgagatgttttagagcttcaatttttgtattaatcggaatggccttcttggttgcaggttgttctaatgaatcttctactgctgggtcagacgcaggccttgcttacgtcacaaatcaaaaaggaaacataacagtgatcgacttggctagtttggagtctgtttctgaaattgacgtaaacggtaaaggtcctcgtgggattggaattacacctgacggtaaaacaatcgttgtagccaatgttgatgggggtgatatcacattgattgctcgagagagcggtgagattatcaagcatatcgaaattggggaaaatcccgagtttgttcgtgtgattggtaatcgagcatatatctcatttgaaccggcttctttgggtggtcctccaccgactcctggatctgaagctgctcaaaagctcgaagaggagcgagaagaggaggatgctgagccngctaaaatagcggtggttaacatcgagtctggtattgtagaaaaggaaattactggaggtatggagaccgagggtatcgagctgtcttatgaccaaactaaattgatcatcacaaacgaggccgatgaaaatatcacagttcatgatttagaatctggcgagatgatcaaagaaatcagcactatagaatacggccataggcctagaggtattaaagcctctccggacggcagtatgtacgtgggcagtatcgagtatggcaacagtttagtcgttatgaatagtgaattcgaggtcataacttccattaagactggagaggttccatacggtttatcttttagtcgtgatggcagcaagctctacgttgctctagcgaaaggaaaagtgttgcaagtatttgacacgaagacctgggaagaattgggtcgcggaaaaacgggtacgcgttgttggcactttacttttacccctgatgactcaaaaattcttgtggcttgcggacgatctgatgaggtggttgttctaaatgcttcggatctttcagtcgtaaaaagactaactggatttgcaatgccttggggtattgttgcttatcctaagtcggtcggtagtctcgattcggtttggcagtaacactaagacagcaaaaaaaccccaccataacgg

SEQ ID NO: 455 - DNA, 4000 bp, Escherichia coli
  misc_feature (688)..(688): n is a, c, g, or t
  misc_feature (1651)..(1651): n is a, c, g, or t
  misc_feature (1987)..(1989): n is a, c, g, or t
  misc_feature (3890)..(3890): n is a, c, g, or t
catcatcaatactaattaaccaatcatcgactaccacaggttcagcagctaagaaatttgcactcaaaaaaaatccagcaaatccaataaatcttttcatacagcacccaaacatttgcgcaccccttatgtaagttacctaaaatgataaacagtttcggcgtttcgtctatttctcacactgaacgcacgctgcatctgaccatcggtccaaacaccgtcgtacttctgcccattaggcaggcggaccgtcataaaaccttgtggctttaaatttttaaattttccaaaccactgaatgccttccccatcggttgcggtcgcttgatcaacattcatgtcgtcagaccattccccttcgatttggctacccgatgcactgaagtaggttccctttccatttctagtgaaggttgtgagttcaccaacataaacagagccatcctgatatgttaaacttccatttgcatagccatgaggttcaggaattgtgccggaatatttccagtcactgctttttatttgaacgtcaccgacaagtgatccgttcttccaattacccttaaaaattctttgcgacgacacctcggataattcacccaacccgcaccgcagaccgttttttacttcgccttcataccagtcgccattcttatacgaaattttcgctgatcctgtttgtctgccntcagaccattccccctcatatcgaaaaccagagacagaagtgtagaggccaaatccgtgtttaactccatatttgaagttgcctttgtaaattgcaccgttagcatattctaaaacgccatagccgtgaaaggcacctttgcgccaagaacctttatagctcaggacctctgagtaaggtacgatatagaaacgcccaaataggcgccgaataaatttttccatataaacacctgctgctgaacacccgtacattgcggacgattccattaggctttcagtattggcctgcagttttcagagtcaattaaactgaaagtaatgggcaaagaaacgccagtttgaatttaaccagtagttaatcgaacgccttcagaaggctgctcatgcggcggacaactgtgatgcgggtgactttatcattgcagctgcacggttcttggacatggggtagaccactatctaattctgtataaaatatgcggcaatctagggagactaatggtaatggcgcaacataaacggcgtgaatccgaagtcataactaccgcaatggtaaatgataactttgaacccagtaagtatcaggacggcgtgattgcacgtctgtgtctaaatgttgaaaacaatggctagaaaagcaagtcacggctggagtactaggcaacaaggcggcttcaggcccgctgggccagtacgtaatgttttaaaaaaacgcgaaaaggctgataaaattaatcaaaatatgttattatatacagcttcgagtataggggccgagattttgtcacactgccaaaaatgcggtttaaaaaaaacacggtcaactacagagcttgtcagaaaatatccccaaatcaaatttaaaaaacttagccaattaaacgcagtatgtgaaaatacagcgtgtcgtggaaaaataataatattgcgatataagttactgtcaggaaaataataactngcatcggattgctggtgcagcctgagtctatgcgctcaataattggcgccactcagtatgagcggcggttcgattgagcttgaaattgtctcgtgagtggagatcgcggtttacgccttaaacagcccacctaaccgcaaacctagcctatgtagcgccctggacgaactgtggcggtcagcacacaaacagccgcgtaaccgtgtaccaaagcaaacatgtcggcagcgatgcgcaggcatgtcggatcgtggcaaaaatagtgtatttactatttctgcttggtagcgccttaacaaaaaatgattgctttataaaattcagcctttaatgtannnagcctattggaattagaactgatttgatttcctaattaatatgatcatctcctcttatccattttgattggtcggccttgggtaagaccaatcaaaatggataagaggagatgaatatgacctttcaatttaagttttcaaaaatagatgatgcctttttaagtgttaaagaatgcgaattagaagaagcgcgtttagaattacagggtgctggctatgagttattagaactctggcattcgtgtgaaaaacactgtcacgaaatatgggtcaattccgttcaacaagaaaagataaggctcaatattaatccccaaaaagaagacgatgaaaccagtcctccaacagatgcatcacgttctgatatagtaagtgaattagtcgacctttggctagagatgcgtgcaatccgagaccattttactgagcagaaaacaaatacagaaacggactacgacgacgaccattatctaatgaaacgaactactacgccaatcgagcgattttggcaaaaagttcgcgaaacaaaggatcttaaagatacagaccctgccgaatggaatttcataataaataaagaaattgacgagagtgtttttgccttttttgaattgtcagaatccgatcgatcatccatcattcactaatagggggtaataaatatgaatattgaacaaaaagctgccgcacagcacattgatggcccccttctcgttcttgcaggtcctgggacaggcaaaacgacaacgttagttggacggtatcaatttttaattactcaaaacgtaaaccctgaaaaaataatatgctgcaccttttctaaaaaagcagcagatgaattgaaaattcgaatatctgaaaaaatagatgtcgacgcaaagcgcttacctattgccacatttcatgcgctttctctccgaatactaaaagcgattggtaaatccattaatgtttcaagtaattttgaaatttgggcaaagaattatgaacgtgaaaaagtaatacgcgaaatagcgaagcaagatgaactggcaaaattttatgatggtgttgacgtcgaagaccaagatgccaaaaaaatattagaatatattgatacagttcgagaagagcttcttgatccagaagacgcctctattcgagctgcagagattaatgacaaagcaaaaattgctcactgcgaagtgtatgcagcttatgaggaatttttaaatacagaaaataaaatagattacccgcgcatggcacaattagcctgtaaagctttaaataaagatgccgaaactggcgctaattatgtaaagagcttccaacatattttagtagacgaattccaggatataaatttagcgcagaagaccttagttgacgctttttttaaggctggggtgaaactgtgggcagttggcgacgactatcaggccatttacggatggcgtggaagcaaagttaaatacatgcttgattttgaaaaagagtactcaggcgcgaaaatacaattattaaagcaaaactatcgctctgggaaaaatattctcaagcttgccaataacctttcacaacactttctcgaagcatatcggaaggatctaaaccctacgagagatgttgatggtaaggtttatcttgatcaagtttgggatgaagaggaagaagcggatgcaattgtagatgaaattaccctaagaattgacgagggtgttccactttcagaaattgctgtaatttcacgtactaacagtaggcctcaaaaagttgcgtcagaactaattcgtagagggattccgatacaacttcgtggtgcgcgagcgccatttgaagagtttgaagttaagcaactggtatcagcggcagcgatcgcctccggcatttacctaaagcttaagtggcctagggttccncccgcactgtatagttttgcgaaaagtatcgaaaccgatccctggcaaaaaaaggtccgagcattagcgacctatatcacaaatcgaccacttaatgggttaagttccga

SEQ ID NO: 456 - DNA, 4000 bp, Escherichia coli
  misc_feature (7)..(12): n is a, c, g, or t
  misc_feature (15)..(15): n is a, c, g, or t
  misc_feature (26)..(28): n is a, c, g, or t
  misc_feature (37)..(39): n is a, c, g, or t
  misc_feature (44)..(44): n is a, c, g, or t
  misc_feature (51)..(51): n is a, c, g, or t
  misc_feature (54)..(54): n is a, c, g, or t
  misc_feature (56)..(57): n is a, c, g, or t
  misc_feature (59)..(59): n is a, c, g, or t
  misc_feature (65)..(66): n is a, c, g, or t
  misc_feature (73)..(76): n is a, c, g, or t
  misc_feature (80)..(80): n is a, c, g, or t
  misc_feature (89)..(89): n is a, c, g, or t
  misc_feature (92)..(92): n is a, c, g, or t
  misc_feature (96)..(99): n is a, c, g, or t
  misc_feature (101)..(101): n is a, c, g, or t
  misc_feature (103)..(104): n is a, c, g, or t
  misc_feature (107)..(107): n is a, c, g, or t
  misc_feature (114)..(114): n is a, c, g, or t
  misc_feature (122)..(123): n is a, c, g, or t
  misc_feature (126)..(126): n is a, c, g, or t
  misc_feature (130)..(131): n is a, c, g, or t
  misc_feature (133)..(133): n is a, c, g, or t
  misc_feature (135)..(135): n is a, c, g, or t
  misc_feature (137)..(137): n is a, c, g, or t
  misc_feature (140)..(140): n is a, c, g, or t
  misc_feature (142)..(142): n is a, c, g, or t
  misc_feature (144)..(144): n is a, c, g, or t
  misc_feature (147)..(148): n is a, c, g, or t
  misc_feature (151)..(151): n is a, c, g, or t
  misc_feature (153)..(154): n is a, c, g, or t
  misc_feature (157)..(157): n is a, c, g, or t
  misc_feature (163)..(163): n is a, c, g, or t
  misc_feature (165)..(167): n is a, c, g, or t
  misc_feature (170)..(171): n is a, c, g, or t
  misc_feature (173)..(173): n is a, c, g, or t
  misc_feature (179)..(179): n is a, c, g, or t
  misc_feature (183)..(185): n is a, c, g, or t
  misc_feature (187)..(195): n is a, c, g, or t
  misc_feature (199)..(203): n is a, c, g, or t
  misc_feature (205)..(205): n is a, c, g, or t
  misc_feature (207)..(209): n is a, c, g, or t
  misc_feature (213)..(215): n is a, c, g, or t
  misc_feature (220)..(223): n is a, c, g, or t
  misc_feature (225)..(227): n is a, c, g, or t
  misc_feature (229)..(230): n is a, c, g, or t
  misc_feature (232)..(232): n is a, c, g, or t
  misc_feature (234)..(235): n is a, c, g, or t
  misc_feature (237)..(242): n is a, c, g, or t
  misc_feature (245)..(245): n is a, c, g, or t
  misc_feature (248)..(250): n is a, c, g, or t
  misc_feature (252)..(254): n is a, c, g, or t
  misc_feature (256)..(259): n is a, c, g, or t
  misc_feature (261)..(263): n is a, c, g, or t
  misc_feature (265)..(266): n is a, c, g, or t
  misc_feature (268)..(271): n is a, c, g, or t
  misc_feature (273)..(275): n is a, c, g, or t
  misc_feature (283)..(286): n is a, c, g, or t
  misc_feature (288)..(289): n is a, c, g, or t
  misc_feature (292)..(293): n is a, c, g, or t
  misc_feature (295)..(297): n is a, c, g, or t
  misc_feature (299)..(300): n is a, c, g, or t
  misc_feature (302)..(302): n is a, c, g, or t
  misc_feature (307)..(310): n is a, c, g, or t
  misc_feature (313)..(313): n is a, c, g, or t
  misc_feature (315)..(317): n is a, c, g, or t
  misc_feature (319)..(320): n is a, c, g, or t
  misc_feature (322)..(322): n is a, c, g, or t
  misc_feature (324)..(326): n is a, c, g, or t
  misc_feature (328)..(333): n is a, c, g, or t
  misc_feature (335)..(335): n is a, c, g, or t
  misc_feature (337)..(337): n is a, c, g, or t
  misc_feature (340)..(345): n is a, c, g, or t
  misc_feature (349)..(350): n is a, c, g, or t
  misc_feature (354)..(358): n is a, c, g, or t
  misc_feature (360)..(360): n is a, c, g, or t
  misc_feature (363)..(366): n is a, c, g, or t
  misc_feature (368)..(368): n is a, c, g, or t
  misc_feature (370)..(371): n is a, c, g, or t
  misc_feature (373)..(373): n is a, c, g, or t
  misc_feature (376)..(376): n is a, c, g, or t
  misc_feature (378)..(379): n is a, c, g, or t
  misc_feature (384)..(384): n is a, c, g, or t
  misc_feature (386)..(386): n is a, c, g, or t
  misc_feature (388)..(388): n is a, c, g, or t
  misc_feature (391)..(398): n is a, c, g, or t
  misc_feature (400)..(402): n is a, c, g, or t
  misc_feature (405)..(405): n is a, c, g, or t
  misc_feature (407)..(409): n is a, c, g, or t
  misc_feature (412)..(414): n is a, c, g, or t
  misc_feature (417)..(426): n is a, c, g, or t
  misc_feature (428)..(428): n is a, c, g, or t
  misc_feature (430)..(430): n is a, c, g, or t
  misc_feature (434)..(436): n is a, c, g, or t
  misc_feature (438)..(449): n is a, c, g, or t
  misc_feature (451)..(455): n is a, c, g, or t
  misc_feature (458)..(460): n is a, c, g, or t
  misc_feature (462)..(465): n is a, c, g, or t
  misc_feature (468)..(469): n is a, c, g, or t
  misc_feature (471)..(474): n is a, c, g, or t
  misc_feature (476)..(480): n is a, c, g, or t
  misc_feature (483)..(484): n is a, c, g, or t
  misc_feature (486)..(486): n is a, c, g, or t
  misc_feature (513)..(513): n is a, c, g, or t
  misc_feature (515)..(515): n is a, c, g, or t
  misc_feature (527)..(527): n is a, c, g, or t
  misc_feature (552)..(552): n is a, c, g, or t
  misc_feature (720)..(720): n is a, c, g, or t
  misc_feature (816)..(816): n is a, c, g, or t
  misc_feature (849)..(849): n is a, c, g, or t
  misc_feature (852)..(852): n is a, c, g, or t
  misc_feature (855)..(855): n is a, c, g, or t
  misc_feature (1011)..(1011): n is a, c, g, or t
  misc_feature (1533)..(1533): n is a, c, g, or t
  misc_feature (1536)..(1536): n is a, c, g, or t
  misc_feature (1985)..(1985): n is a, c, g, or t
  misc_feature (2047)..(2047): n is a, c, g, or t
  misc_feature (2159)..(2159): n is a, c, g, or t
  misc_feature (2313)..(2313): n is a, c, g, or t
  misc_feature (2393)..(2393): n is a, c, g, or t
  misc_feature (2482)..(2482): n is a, c, g, or t
  misc_feature (2823)..(2823): n is a, c, g, or t
  misc_feature (2867)..(2867): n is a, c, g, or t
  misc_feature (2880)..(2883): n is a, c, g, or t
  misc_feature (2889)..(2889): n is a, c, g, or t
  misc_feature (2891)..(2891): n is a, c, g, or t
  misc_feature (2893)..(2895): n is a, c, g, or t
  misc_feature (2897)..(2905): n is a, c, g, or t
  misc_feature (2907)..(2908): n is a, c, g, or t
  misc_feature (2911)..(2914): n is a, c, g, or t
  misc_feature (2918)..(2919): n is a, c, g, or t
  misc_feature (2922)..(2928): n is a, c, g, or t
  misc_feature (2930)..(2933): n is a, c, g, or t
  misc_feature (2936)..(2937): n is a, c, g, or t
  misc_feature (2941)..(2944): n is a, c, g, or t
  misc_feature (2946)..(2949): n is a, c, g, or t
  misc_feature (2951)..(2969): n is a, c, g, or t
  misc_feature (2971)..(2988): n is a, c, g, or t
  misc_feature (2992)..(2999): n is a, c, g, or t
  misc_feature (3005)..(3010): n is a, c, g, or t
  misc_feature (3012)..(3014): n is a, c, g, or t
  misc_feature (3016)..(3019): n is a, c, g, or t
  misc_feature (3021)..(3029): n is a, c, g, or t
  misc_feature (3032)..(3037): n is a, c, g, or t
  misc_feature (3039)..(3043): n is a, c, g, or t
  misc_feature (3045)..(3046): n is a, c, g, or t
  misc_feature (3048)..(3049): n is a, c, g, or t
  misc_feature (3051)..(3064): n is a, c, g, or t
  misc_feature (3066)..(3076): n is a, c, g, or t
  misc_feature (3078)..(3091): n is a, c, g, or t
  misc_feature (3093)..(3101): n is a, c, g, or t
  misc_feature (3103)..(3109): n is a, c, g, or t
  misc_feature (3111)..(3123): n is a, c, g, or t
  misc_feature (3125)..(3125): n is a, c, g, or t
  misc_feature (3127)..(3140): n is a, c, g, or t
  misc_feature (3142)..(3146): n is a, c, g, or t
  misc_feature (3148)..(3148): n is a, c, g, or t
  misc_feature (3150)..(3150): n is a, c, g, or t
  misc_feature (3152)..(3154): n is a, c, g, or t
  misc_feature (3156)..(3157): n is a, c, g, or t
  misc_feature (3159)..(3160): n is a, c, g, or t
  misc_feature (3162)..(3167): n is a, c, g, or t
  misc_feature (3169)..(3181): n is a, c, g, or t
  misc_feature (3183)..(3202): n is a, c, g, or t
  misc_feature (3204)..(3223): n is a, c, g, or t
  misc_feature (3225)..(3229): n is a, c, g, or t
  misc_feature (3231)..(3367): n is a, c, g, or t
  misc_feature (3369)..(3375): n is a, c, g, or t
  misc_feature (3377)..(3423): n is a, c, g, or t
  misc_feature (3425)..(3457): n is a, c, g, or t
  misc_feature (3459)..(3487): n is a, c, g, or t
  misc_feature (3489)..(3628): n is a, c, g, or t
  misc_feature (3630)..(3653): n is a, c, g, or t
  misc_feature (3655)..(3657): n is a, c, g, or t
  misc_feature (3659)..(3666): n is a, c, g, or t
  misc_feature (3669)..(3698): n is a, c, g, or t
  misc_feature (3700)..(3703): n is a, c, g, or t
  misc_feature (3705)..(3722): n is a, c, g, or t
  misc_feature (3724)..(3728): n is a, c, g, or t
  misc_feature (3730)..(3735): n is a, c, g, or t
  misc_feature (3737)..(3743): n is a, c, g, or t
  misc_feature (3745)..(3760): n is a, c, g, or t
  misc_feature (3762)..(3764): n is a, c, g, or t
  misc_feature (3767)..(3782): n is a, c, g, or t
  misc_feature (3784)..(3798): n is a, c, g, or t
  misc_feature (3800)..(3816): n is a, c, g, or t
  misc_feature (3818)..(3820): n is a, c, g, or t
  misc_feature (3822)..(3831): n is a, c, g, or t
  misc_feature (3833)..(3842): n is a, c, g, or t
  misc_feature (3844)..(3844): n is a, c, g, or t
  misc_feature (3847)..(3852): n is a, c, g, or t
  misc_feature (3856)..(3857): n is a, c, g, or t
  misc_feature (3859)..(3861): n is a, c, g, or t
  misc_feature (3863)..(3865): n is a, c, g, or t
  misc_feature (3867)..(3876): n is a, c, g, or t
  misc_feature (3878)..(3882): n is a, c, g, or t
  misc_feature (3884)..(3917): n is a, c, g, or t
  misc_feature (3919)..(3929): n is a, c, g, or t
  misc_feature (3931)..(3949): n is a, c, g, or t
  misc_feature (3951)..(3957): n is a, c, g, or t
  misc_feature (3959)..(4000): n is a, c, g, or t
gttttannnnnnaancataatgactnnntgttgctgnnnctaantaagagnctnannangtactnnccgtccnnnnatantttttcttngtnaaannnncntnntcngtgtgtntctgtatnngtngaannantntnttntnantgnnttnannaantgagcntnnntcnntnagtganactnnntnnnnnnnnncccnnnnntntnnnttgnnnttagnnnngnnngnnanannannnnnntcnttnnntnnntnnnntnnntnncnnnncnnncctacctnnnncnngtnnannnannanaaatnnnnatnannnanntnannnannnnnncncnaannnnnntatnnatannnnntnccnnnnangnntnttntnnctctntntntgnnnnnnnntnnntcnannnaannnacnnnnnnnnnntntntttnnntnnnnnnnnnnnntnnnnnttnnntnnnngtnngnnnntnnnnntanngntacttttatcccaattcgtccatcatnanatccaaaccgtntctgatgatttgctggtgtggctgnttggacacacatacaaactcggtcaaggcaaaatcctcaggggctacttcatacgctcctaagttttccaattcgtccaaatccttatacaagcaggctttgagcagctgcatagggtaaatatctagtgggaatacctcctcatacatacctgttactacaaaggcncgttgctccccgttggtattggtgttgaggttgtattccttatctgggtgtagccaagagaaggtcaaagcacgggtaagggaaatcttgttaganattggttttgcccaacccaataggtcgtagtcnttnccntctggaatggctgtaatctgatcatcatagaagcctaagtaagtgttttcacacacctttcgaccggtaagcacatctccgctgatgatacgggtagcggcaggatcttttacccctgctcctactacactcttgatttgtgcccctgcaatagcngttacatagtgaggattttccatggaagcccctgtaagcgctactgtacgtgtgaggtttaggtgtcctgtaaggaaaagctcgcctatgactaccaagtcctgaggagcaaccacccatactacttctcccttgttgatagggctaattttcgcaatttgggtgctaacattacctgctgggtgtggtcctgagacgttgtgcaatacgacatccttaagactgcggaaaggagaaagagaactgtccttgaagacagatacatgcaccttaccagtggtaagtttggaaagggctgtaagagccacctgcaattccttttccttgcccttgagcacatagtcataatcaggggctagcggattggtcttgcaagccgagatgaaaatctccttaggctggctgtcagggctagcaatcacgtcgtacggacgttgcttaatgagcggccaagcacctgactcaagcaagtgttccttgatttgctctggtgagagtgagtttacctccttctttccaaantcntggaaagactgagtagcatcgggagtaattctgatttccagaattttacggcgttctccacggataatctccgtgatagtaccactaacgggagaagggaagagtaccctttcatctcttttgtcgtagaaaacggcgtctccggctttgagtgttgccccttcgcgtgcgatgagcttagggatgacgcggtggaattcagcaggcttaataccatacacagccgccagtggagcaggtttcgtaatggcatcagcttttcctttcagctgaatatccaatccttttcgaatacggatgtcgcttgacataggatataaattagttagtttcttaaaaagtcgtgcaaaagtattatttttttttgaattaattagtatggaaaccgacttttaacagccatgtttcgttatttatactctttataaattagctataatcagtagtcngttgtcagaagtcagttgtcagttctaataaccgatctctgttattgttttcttaaatcccncccatcacaactctttgaaaacaaatatattacccataaaagctacaaaaagatattgtattttcttttcctttcaaaaaaaaaacatatctttgccccgtaatttaaatanatttaagatgaaaaaaattcttttatcagctttagctgtatttgcatttggcgttgccaatgctcaagaacttacttcttctaaaggagaaaactacttaccaaaacaaggtgattggtctattggattcagtgctaacagtgcattgagcttngtaggaaatgctttcaatggaagcactggtaactctgttgcttttgataaaaacgaggcagcaaaacttcctgggttcgntaactcagttacttttgtaggtaagaactttactgaagataacaaggcagatcgttatactgctaacttgcttttctcttattctaaancaaaagatcaagatgcaactactgcattcggacttctagttggttatggtaaagaatggagaaaaggagttactcgtcttcaaggattctatggagttgatggacttttagggttcggtattcctgaaaaaaatgctttcagcttcttagtaggagcacaagcctttgctggagctgaatattttatcttccctaaagtaggtctaggtgctcaatacactttccctgtaactatcagctatgaaaaatcaggagaaggtgcttctgaaactagcaaatttggttttggtatcggtaactctgaagttaatggaggaactgcaaaatctggtttcggaacngcttctgtactcctaaacctttatttctaagaattagttttttntttatagaaattnnnnaaaccncncnnntnnnnnnnnngnnttnnnntttnnttnnnnnnntnnnnttnnaaannnntnnnnannnnnnnnnnnnnnnnnnntnnnnnnnnnnnnnnnnnnaaannnnnnnnatttannnnnntnnntnnnnannnnnnnnnttnnnnnntnnnnntnncnncnnnnnnnnnnnnnngnnnnnnnnnnntnnnnnnnnnnnnnntnnnnnnnnnannnnnnnannnnnnnnnnnnnanannnnnnnnnnnnnntnnnnnancntnnncnncnncnnnnnncnnnnnnnnnnnnngnnnnnnnnnnnnnnnnnnnntnnnnnnnnnnnnnnnnnnnncnnnnnannnnnnnnnnnnnnnnnnnnnnnnnnnnnnnnnnnnnnnnnnnnnnnnnnnnnnnnnnnnnnnnnnnnnnnnnnnnnnnnnnnnnnnnnnnnnnnnnnnnnnnnnnnnnnnnnnnnnnnnnnnnnnnnnnnnnnnnncnnnnnnntnnnnnnnnnnnnnnnnnnnnnnnnnnnnnnnnnnnnnnnnnnnnnnntnnnnnnnnnnnnnnnnnnnnnnnnnnnnnnnnngnnnnnnnnnnnnnnnnnnnnnnnnnnnnncnnnnnnnnnnnnnnnnnnnnnnnnnnnnnnnnnnnnnnnnnnnnnnnnnnnnnnnnnnnnnnnnnnnnnnnnnnnnnnnnnnnnnnnnnnnnnnnnnnnnnnnnnnnnnnnnnnnnnnnnnnnnnnnnnnnnnnnnnnnncnnnnnnnnnnnnnnnnnnnnnnnngnnngnnnnnnnnggnnnnnnnnnnnnnnnnnnnnnnnnnnnnnntnnnntnnnnnnnnnnnnnnnnnnannnnntnnnnnnannnnnnngnnnnnnnnnnnnnnnncnnnggnnnnnnnnnnnnnnnnannnnnnnnnnnnnnnannnnnnnnnnnnnnnnnannntnnnnnnnnnnannnnnnnnnnanaannnnnnaaannannnannnannnnnnnnnnannnnntnnnnnnnnnnnnnnnnnnnnnnnnnnnnnnnnnnannnnnnnnnnnannnnnnnnnnnnnnnnnnnannnnnnnannnnnnnnnnnnnnnnnnnnnnnnnnnnnnnnnnnnnnnnnn

SEQ ID NO: 457 - DNA, 4000 bp, Escherichia coli
  misc_feature (1)..(32): n is a, c, g, or t
  misc_feature (34)..(61): n is a, c, g, or t
  misc_feature (63)..(139): n is a, c, g, or t
  misc_feature (141)..(141): n is a, c, g, or t
  misc_feature (143)..(146): n is a, c, g, or t
  misc_feature (148)..(153): n is a, c, g, or t
  misc_feature (155)..(160): n is a, c, g, or t
  misc_feature (162)..(167): n is a, c, g, or t
  misc_feature (169)..(174): n is a, c, g, or t
  misc_feature (176)..(182): n is a, c, g, or t
  misc_feature (184)..(187): n is a, c, g, or t
  misc_feature (190)..(194): n is a, c, g, or t
  misc_feature (197)..(198): n is a, c, g, or t
  misc_feature (200)..(201): n is a, c, g, or t
  misc_feature (204)..(204): n is a, c, g, or t
  misc_feature (206)..(214): n is a, c, g, or t
  misc_feature (216)..(218): n is a, c, g, or t
  misc_feature (220)..(223): n is a, c, g, or t
  misc_feature (225)..(228): n is a, c, g, or t
  misc_feature (230)..(237): n is a, c, g, or t
  misc_feature (239)..(242): n is a, c, g, or t
  misc_feature (245)..(247): n is a, c, g, or t
  misc_feature (249)..(249): n is a, c, g, or t
  misc_feature (251)..(261): n is a, c, g, or t
  misc_feature (263)..(282): n is a, c, g, or t
  misc_feature (284)..(390): n is a, c, g, or t
  misc_feature (392)..(392): n is a, c, g, or t
  misc_feature (395)..(426): n is a, c, g, or t
  misc_feature (428)..(479): n is a, c, g, or t
  misc_feature (481)..(481): n is a, c, g, or t
  misc_feature (483)..(538): n is a, c, g, or t
  misc_feature (540)..(552): n is a, c, g, or t
  misc_feature (554)..(568): n is a, c, g, or t
  misc_feature (570)..(582): n is a, c, g, or t
  misc_feature (584)..(618): n is a, c, g, or t
  misc_feature (620)..(620): n is a, c, g, or t
  misc_feature (622)..(682): n is a, c, g, or t
  misc_feature (684)..(704): n is a, c, g, or t
  misc_feature (706)..(718): n is a, c, g, or t
  misc_feature (720)..(801): n is a, c, g, or t
  misc_feature (803)..(834): n is a, c, g, or t
  misc_feature (836)..(850): n is a, c, g, or t
  misc_feature (852)..(879): n is a, c, g, or t
  misc_feature (882)..(912): n is a, c, g, or t
  misc_feature (914)..(920): n is a, c, g, or t
  misc_feature (922)..(927): n is a, c, g, or t
  misc_feature (930)..(935): n is a, c, g, or t
  misc_feature (937)..(942): n is a, c, g, or t
  misc_feature (944)..(944): n is a, c, g, or t
  misc_feature (946)..(946): n is a, c, g, or t
  misc_feature (953)..(954): n is a, c, g, or t
  misc_feature (958)..(958): n is a, c, g, or t
  misc_feature (965)..(965): n is a, c, g, or t
  misc_feature (967)..(971): n is a, c, g, or t
  misc_feature (973)..(975): n is a, c, g, or t
  misc_feature (981)..(981): n is a, c, g, or t
  misc_feature (984)..(984): n is a, c, g, or t
  misc_feature (1001)..(1001): n is a, c, g, or t
  misc_feature (1037)..(1037): n is a, c, g, or t
  misc_feature (1076)..(1076): n is a, c, g, or t
  misc_feature (1079)..(1079): n is a, c, g, or t
  misc_feature (1494)..(1494): n is a, c, g, or t
  misc_feature (1497)..(1497): n is a, c, g, or t
  misc_feature (1618)..(1618): n is a, c, g, or t
  misc_feature (1706)..(1707): n is a, c, g, or t
  misc_feature (1815)..(1815): n is a, c, g, or t
  misc_feature (1971)..(1971): n is a, c, g, or t
  misc_feature (1983)..(1983): n is a, c, g, or t
  misc_feature (1992)..(1992): n is a, c, g, or t
  misc_feature (2004)..(2004): n is a, c, g, or t
  misc_feature (2393)..(2393): n is a, c, g, or t
  misc_feature (2465)..(2465): n is a, c, g, or t
  misc_feature (2513)..(2513): n is a, c, g, or t
  misc_feature (2756)..(2756): n is a, c, g, or t
  misc_feature (2762)..(2762): n is a, c, g, or t
  misc_feature (2802)..(2804): n is a, c, g, or t
  misc_feature (2810)..(2810): n is a, c, g, or t
  misc_feature (2812)..(2814): n is a, c, g, or t
  misc_feature (2818)..(2818): n is a, c, g, or t
  misc_feature (2820)..(2823): n is a, c, g, or t
  misc_feature (2826)..(2826): n is a, c, g, or t
  misc_feature (2829)..(2833): n is a, c, g, or t
  misc_feature (2835)..(2837): n is a, c, g, or t
  misc_feature (2839)..(2843): n is a, c, g, or t
  misc_feature (2845)..(2845): n is a, c, g, or t
  misc_feature (2848)..(2855): n is a, c, g, or t
  misc_feature (2857)..(2863): n is a, c, g, or t
  misc_feature (2865)..(2868): n is a, c, g, or t
  misc_feature (2870)..(2875): n is a, c, g, or t
  misc_feature (2878)..(2878): n is a, c, g, or t
  misc_feature (2880)..(2886): n is a, c, g, or t
  misc_feature (2888)..(2895): n is a, c, g, or t
  misc_feature (2897)..(2897): n is a, c, g, or t
  misc_feature (2902)..(2912): n is a, c, g, or t
  misc_feature (2915)..(2916): n is a, c, g, or t
  misc_feature (2918)..(2920): n is a, c, g, or t
  misc_feature (2922)..(2923): n is a, c, g, or t
  misc_feature (2926)..(2926): n is a, c, g, or t
  misc_feature (2928)..(2930): n is a, c, g, or t
  misc_feature (2933)..(2934): n is a, c, g, or t
  misc_feature (2936)..(2943): n is a, c, g, or t
  misc_feature (2945)..(2946): n is a, c, g, or t
  misc_feature (2948)..(2948): n is a, c, g, or t
  misc_feature (2950)..(2950): n is a, c, g, or t
  misc_feature (2954)..(2954): n is a, c, g, or t
  misc_feature (2956)..(2967): n is a, c, g, or t
  misc_feature (2970)..(2975): n is a, c, g, or t
  misc_feature (2977)..(2980): n is a, c, g, or t
  misc_feature (2983)..(2987): n is a, c, g, or t
  misc_feature (2989)..(2989): n is a, c, g, or t
  misc_feature (2992)..(2994): n is a, c, g, or t
  misc_feature (2997)..(2998): n is a, c, g, or t
  misc_feature (3000)..(3005): n is a, c, g, or t
  misc_feature (3007)..(3008): n is a, c, g, or t
  misc_feature (3010)..(3020): n is a, c, g, or t
  misc_feature (3022)..(3022): n is a, c, g, or t
  misc_feature (3024)..(3025): n is a, c, g, or t
  misc_feature (3027)..(3031): n is a, c, g, or t
  misc_feature (3034)..(3034): n is a, c, g, or t
  misc_feature (3038)..(3042): n is a, c, g, or t
  misc_feature (3045)..(3061): n is a, c, g, or t
  misc_feature (3063)..(3069): n is a, c, g, or t
  misc_feature (3071)..(3071): n is a, c, g, or t
  misc_feature (3078)..(3084): n is a, c, g, or t
  misc_feature (3087)..(3088): n is a, c, g, or t
  misc_feature (3090)..(3092): n is a, c, g, or t
  misc_feature (3094)..(3096): n is a, c, g, or t
  misc_feature (3098)..(3100): n is a, c, g, or t
  misc_feature (3102)..(3117): n is a, c, g, or t
  misc_feature (3119)..(3119): n is a, c, g, or t
  misc_feature (3122)..(3128): n is a, c, g, or t
  misc_feature (3130)..(3130): n is a, c, g, or t
  misc_feature (3133)..(3134): n is a, c, g, or t
  misc_feature (3137)..(3142): n is a, c, g, or t
  misc_feature (3144)..(3150): n is a, c, g, or t
  misc_feature (3152)..(3157): n is a, c, g, or t
  misc_feature (3159)..(3159): n is a, c, g, or t
  misc_feature (3162)..(3162): n is a, c, g, or t
  misc_feature (3165)..(3165): n is a, c, g, or t
  misc_feature (3167)..(3173): n is a, c, g, or t
  misc_feature (3176)..(3178): n is a, c, g, or t
  misc_feature (3180)..(3182): n is a, c, g, or t
  misc_feature (3186)..(3188): n is a, c, g, or t
  misc_feature (3190)..(3190): n is a, c, g, or t
  misc_feature (3192)..(3192): n is a, c, g, or t
  misc_feature (3195)..(3195): n is a, c, g, or t
  misc_feature (3198)..(3206): n is a, c, g, or t
  misc_feature (3208)..(3208): n is a, c, g, or t
  misc_feature (3210)..(3213): n is a, c, g, or t
  misc_feature (3215)..(3215): n is a, c, g, or t
  misc_feature (3217)..(3219): n is a, c, g, or t
  misc_feature (3221)..(3224): n is a, c, g, or t
  misc_feature (3226)..(3230): n is a, c, g, or t
  misc_feature (3232)..(3232): n is a, c, g, or t
  misc_feature (3234)..(3235): n is a, c, g, or t
  misc_feature (3238)..(3243): n is a, c, g, or t
  misc_feature (3245)..(3246): n is a, c, g, or t
  misc_feature (3249)..(3249): n is a, c, g, or t
  misc_feature (3251)..(3251): n is a, c, g, or t
  misc_feature (3253)..(3253): n is a, c, g, or t
  misc_feature (3256)..(3258): n is a, c, g, or t
  misc_feature (3260)..(3260): n is a, c, g, or t
  misc_feature (3262)..(3262): n is a, c, g, or t
  misc_feature (3264)..(3264): n is a, c, g, or t
  misc_feature (3267)..(3272): n is a, c, g, or t
  misc_feature (3276)..(3277): n is a, c, g, or t
  misc_feature (3279)..(3279): n is a, c, g, or t
  misc_feature (3283)..(3283): n is a, c, g, or t
  misc_feature (3285)..(3285): n is a, c, g, or t
  misc_feature (3287)..(3289): n is a, c, g, or t
  misc_feature (3293)..(3293): n is a, c, g, or t
  misc_feature (3295)..(3297): n is a, c, g, or t
  misc_feature (3299)..(3303): n is a, c, g, or t
  misc_feature (3307)..(3307): n is a, c, g, or t
  misc_feature (3309)..(3309): n is a, c, g, or t
  misc_feature (3313)..(3313): n is a, c, g, or t
  misc_feature (3315)..(3319): n is a, c, g, or t
  misc_feature (3322)..(3323): n is a, c, g, or t
  misc_feature (3327)..(3333): n is a, c, g, or t
  misc_feature (3335)..(3335): n is a, c, g, or t
  misc_feature (3337)..(3339): n is a, c, g, or t
  misc_feature (3341)..(3344): n is a, c, g, or t
  misc_feature (3346)..(3351): n is a, c, g, or t
  misc_feature (3354)..(3354): n is a, c, g, or t
  misc_feature (3356)..(3357): n is a, c, g, or t
  misc_feature (3360)..(3360): n is a, c, g, or t
  misc_feature (3362)..(3365): n is a, c, g, or t
  misc_feature (3367)..(3368): n is a, c, g, or t
  misc_feature (3370)..(3372): n is a, c, g, or t
  misc_feature (3379)..(3381): n is a, c, g, or t
  misc_feature (3383)..(3386): n is a, c, g, or t
  misc_feature (3389)..(3390): n is a, c, g, or t
  misc_feature (3392)..(3394): n is a, c, g, or t
  misc_feature (3397)..(3398): n is a, c, g, or t
  misc_feature (3400)..(3400): n is a, c, g, or t
  misc_feature (3402)..(3407): n is a, c, g, or t
  misc_feature (3410)..(3419): n is a, c, g, or t
  misc_feature (3421)..(3426): n is a, c, g, or t
  misc_feature (3428)..(3431): n is a, c, g, or t
  misc_feature (3433)..(3435): n is a, c, g, or t
  misc_feature (3438)..(3438): n is a, c, g, or t
  misc_feature (3440)..(3440): n is a, c, g, or t
  misc_feature (3442)..(3445): n is a, c, g, or t
  misc_feature (3447)..(3447): n is a, c, g, or t
  misc_feature (3450)..(3451): n is a, c, g, or t
  misc_feature (3453)..(3453): n is a, c, g, or t
  misc_feature (3455)..(3455): n is a, c, g, or t
  misc_feature (3457)..(3458): n is a, c, g, or t
  misc_feature (3460)..(3460): n is a, c, g, or t
  misc_feature (3463)..(3465): n is a, c, g, or t
  misc_feature (3467)..(3467): n is a, c, g, or t
  misc_feature (3470)..(3471): n is a, c, g, or t
  misc_feature (3474)..(3480): n is a, c, g, or t
  misc_feature (3482)..(3487): n is a, c, g, or t
  misc_feature (3489)..(3490): n is a, c, g, or t
  misc_feature (3492)..(3495): n is a, c, g, or t
  misc_feature (3497)..(3499): n is a, c, g, or t
  misc_feature (3502)..(3513): n is a, c, g, or t
  misc_feature (3515)..(3515): n is a, c, g, or t
  misc_feature (3517)..(3518): n is a, c, g, or t
  misc_feature (3520)..(3520): n is a, c, g, or t
  misc_feature (3522)..(3527): n is a, c, g, or t
  misc_feature (3529)..(3529): n is a, c, g, or t
  misc_feature (3531)..(3533): n is a, c, g, or t
  misc_feature (3537)..(3537): n is a, c, g, or t
  misc_feature (3539)..(3540): n is a, c, g, or t
  misc_feature (3542)..(3544): n is a, c, g, or t
  misc_feature (3547)..(3547): n is a, c, g, or t
  misc_feature (3549)..(3551): n is a, c, g, or t
  misc_feature (3553)..(3553): n is a, c, g, or t
  misc_feature (3555)..(3560): n is a, c, g, or t
  misc_feature (3562)..(3562): n is a, c, g, or t
  misc_feature (3564)..(3565): n is a, c, g, or t
  misc_feature (3567)..(3567): n is a, c, g, or t
  misc_feature (3569)..(3574): n is a, c, g, or t
  misc_feature (3578)..(3582): n is a, c, g, or t
  misc_feature (3588)..(3592): n is a, c, g, or t
  misc_feature (3594)..(3595): n is a, c, g, or t
  misc_feature (3598)..(3598): n is a, c, g, or t
  misc_feature (3600)..(3606): n is a, c, g, or t
  misc_feature (3610)..(3612): n is a, c, g, or t
  misc_feature (3614)..(3614): n is a, c, g, or t
  misc_feature (3617)..(3617): n is a, c, g, or t
  misc_feature (3621)..(3623): n is a, c, g, or t
  misc_feature (3627)..(3627): n is a, c, g, or t
  misc_feature (3630)..(3633): n is a, c, g, or t
  misc_feature (3635)..(3638): n is a, c, g, or t
  misc_feature (3641)..(3642): n is a, c, g, or t
  misc_feature (3644)..(3646): n is a, c, g, or t
  misc_feature (3648)..(3648): n is a, c, g, or t
  misc_feature (3650)..(3651): n is a, c, g, or t
  misc_feature (3654)..(3655): n is a, c, g, or t
  misc_feature (3657)..(3662): n is a, c, g, or t
  misc_feature (3664)..(3664): n is a, c, g, or t
  misc_feature (3666)..(3670): n is a, c, g, or t
  misc_feature (3672)..(3673): n is a, c, g, or t
  misc_feature (3675)..(3676): n is a, c, g, or t
  misc_feature (3678)..(3679): n is a, c, g, or t
  misc_feature (3681)..(3681): n is a, c, g, or t
  misc_feature (3683)..(3685): n is a, c, g, or t
  misc_feature (3687)..(3690): n is a, c, g, or t
  misc_feature (3692)..(3692): n is a, c, g, or t
  misc_feature (3694)..(3694): n is a, c, g, or t
  misc_feature (3696)..(3696): n is a, c, g, or t
  misc_feature (3698)..(3704): n is a, c, g, or t
  misc_feature (3707)..(3708): n is a, c, g, or t
  misc_feature (3711)..(3713): n is a, c, g, or t
  misc_feature (3717)..(3720): n is a, c, g, or t
  misc_feature (3722)..(3722): n is a, c, g, or t
  misc_feature (3726)..(3726): n is a, c, g, or t
  misc_feature (3728)..(3731): n is a, c, g, or t
  misc_feature (3733)..(3734): n is a, c, g, or t
  misc_feature (3736)..(3743): n is a, c, g, or t
  misc_feature (3745)..(3751): n is a, c, g, or t
  misc_feature (3755)..(3756): n is a, c, g, or t
  misc_feature (3758)..(3758): n is a, c, g, or t
  misc_feature (3760)..(3762): n is a, c, g, or t
  misc_feature (3764)..(3765): n is a, c, g, or t
  misc_feature (3768)..(3775): n is a, c, g, or t
  misc_feature (3777)..(3777): n is a, c, g, or t
  misc_feature (3780)..(3780): n is a, c, g, or t
  misc_feature (3784)..(3785): n is a, c, g, or t
  misc_feature (3788)..(3790): n is a, c, g, or t
  misc_feature (3793)..(3794): n is a, c, g, or t
  misc_feature (3796)..(3796): n is a, c, g, or t
  misc_feature (3798)..(3798): n is a, c, g, or t
  misc_feature (3800)..(3800): n is a, c, g, or t
  misc_feature (3805)..(3808): n is a, c, g, or t
  misc_feature (3811)..(3811): n is a, c, g, or t
  misc_feature (3814)..(3825): n is a, c, g, or t
  misc_feature (3827)..(3828): n is a, c, g, or t
  misc_feature (3830)..(3830): n is a, c, g, or t
  misc_feature (3832)..(3836): n is a, c, g, or t
  misc_feature (3838)..(3839): n is a, c, g, or t
  misc_feature (3841)..(3843): n is a, c, g, or t
  misc_feature (3846)..(3850): n is a, c, g, or t
  misc_feature (3853)..(3853): n is a, c, g, or t
  misc_feature (3856)..(3858): n is a, c, g, or t
  misc_feature (3860)..(3863): n is a, c, g, or t
  misc_feature (3865)..(3865): n is a, c, g, or t
  misc_feature (3867)..(3869): n is a, c, g, or t
  misc_feature (3871)..(3871): n is a, c, g, or t
  misc_feature (3873)..(3873): n is a, c, g, or t
  misc_feature (3878)..(3878): n is a, c, g, or t
  misc_feature (3880)..(3881): n is a, c, g, or t
  misc_feature (3883)..(3885): n is a, c, g, or t
  misc_feature (3888)..(3889): n is a, c, g, or t
  misc_feature (3892)..(3900): n is a, c, g, or t
  misc_feature (3902)..(3904): n is a, c, g, or t
  misc_feature (3909)..(3909): n is a, c, g, or t
  misc_feature (3911)..(3911): n is a, c, g, or t
  misc_feature (3913)..(3914): n is a, c, g, or t
  misc_feature (3916)..(3918): n is a, c, g, or t
  misc_feature (3921)..(3922): n is a, c, g, or t
  misc_feature (3924)..(3927): n is a, c, g, or t
  misc_feature (3929)..(3933): n is a, c, g, or t
  misc_feature (3935)..(3937): n is a, c, g, or t
  misc_feature (3939)..(3941): n is a, c, g, or t
  misc_feature (3943)..(3944): n is a, c, g, or t
  misc_feature (3946)..(3948): n is a, c, g, or t
  misc_feature (3950)..(3953): n is a, c, g, or t
  misc_feature (3955)..(3957): n is a, c, g, or t
  misc_feature (3959)..(3959): n is a, c, g, or t
  misc_feature (3961)..(3961): n is a, c, g, or t
  misc_feature (3963)..(3963): n is a, c, g, or t
  misc_feature (3966)..(3966): n is a, c, g, or t
  misc_feature (3971)..(3978): n is a, c, g, or t
  misc_feature (3981)..(3982): n is a, c, g, or t
  misc_feature (3984)..(3986): n is a, c, g, or t
  misc_feature (3988)..(3988): n is a, c, g, or t
  misc_feature (3990)..(3991): n is a, c, g, or t
  misc_feature (3993)..(3994): n is a, c, g, or t
  misc_feature (3996)..(3996): n is a, c, g, or t
  misc_feature (3998)..(3998): n is a, c, g, or t
  misc_feature (4000)..(4000): n is a, c, g, or t
nnnnnnnnnnnnnnnnnnnnnnnnnnnnnnnnannnnnnnnnnnnnnnnnnnnnnnnnnnnannnnnnnnnnnnnnnnnnnnnnnnnnnnnnnnnnnnnnnnnnnnnnnnnnnnnnnnnnnnnnnnnnnnnnnnnnnnnanannnnannnnnnannnnnnannnnnnannnnnnannnnnnnannnnaannnnnaannannaanannnnnnnnnannnannnnannnnannnnnnnnannnnaannnanannnnnnnnnnnannnnnnnnnnnnnnnnnnnnannnnnnnnnnnnnnnnnnnnnnnnnnnnnnnnnnnnnnnnnnnnnnnnnnnnnnnnnnnnnnnnnnnnnnnnnnnnnnnnnnnnnnnnnnnnnnnnnnnnnnnnnnnanaannnnnnnnnnnnnnnnnnnnnnnnnnnnnnnnannnnnnnnnnnnnnnnnnnnnnnnnnnnnnnnnnnnnnnnnnnnnnnnnnnnanannnnnnnnnnnnnnnnnnnnnnnnnnnnnnnnnnnnnnnnnnnnnnnnnnnnnnnnannnnnnnnnnnnnannnnnnnnnnnnnnnannnnnnnnnnnnnannnnnnnnnnnnnnnnnnnnnnnnnnnnnnnnnnnancnnnnnnnnnnnnnnnnnnnnnnnnnnnnnnnnnnnnnnnnnnnnnnnnnnnnnnnnnnnnnannnnnnnnnnnnnnnnnnnnnannnnnnnnnnnnnannnnnnnnnnnnnnnnnnnnnnnnnnnnnnnnnnnnnnnnnnnnnnnnnnnnnnnnnnnnnnnnnnnnnnnnnnnnnnnnnngnnnnnnnnnnnnnnnnnnnnnnnnnnnnnnnnannnnnnnnnnnnnnnannnnnnnnnnnnnnnnnnnnnnnnnnnnttnnnnnnnnnnnnnnnnnnnnnnnnnnnnnnntnnnnnnnannnnnnaannnnnnannnnnnancnactaacnnctancgactancnnnnnannnactaangantaatatagctttttagngcttcgatatattcttcaaaagctgaaagtcccttnggggtaagctgggcttcagtattagggtaattttctttnaangtttttttgatactgatatagcccgctgcttctaacttctgaatttgtaccgaaatattgcccgaagtggctttggtaacttctttaatacgagcaaagtcggctttttcttctgaaaccaatagcgaaatgatagccaaacgcaattgcgaatgcaaaatagggtttaaatcagcaaacattatttctctttttatattcgttatgaaattgaataccaggtactaagaataataaccccgccataaagctactgagcaaaggcagaaaaacttcctgactaaaagaaataaattgtacagcgtaaataattataaaagccaataggcaggtagctatccatagcttcattttcatttgcaatgccattgttagagttacaaacgtgaaaggcagatagataattaaaaaagcngtnagaaaagagtcgaagattgaccaagggattataaaggctattatagcattaatacctgctataaaccaaagccaatccgtccaatcattatagcttttttcagcttttttgcgctttgtanttttaattttcgtccataagctataaaagaacccaatgggcattaatatcaaccatacaaaccctgattgtttgggataatagtcggnnataagcatcacaaactgaataatgcctgcaagcataatgagcacactccaaaagataaggaagaaaccgttttcttcgtacttttgttttcgttgattgatgacagantgaatgattttcaagctgtcggctacttgtaattccatagttttaaaatatttaatgttataaattcgctgcaaatataagttagtttataatataaaccaaatttttagcaaactttttttgtaacctccttcttacctcctccaaaatgggaanaggaagtcatantattacacntaaaaatcagcnacttacaaaattattgttacatctatcacaaaaaagatagtccgttattttgtttttcgattttaaaaccctacttttgtcgccgttgaatataaatcataaatcgtatgtcagaacaagtaataaataaacccacccccatcaatgaggaagtagtgtgggataaaaccaaaactatcatcagtactactgatagatttggcaatatcactgacgtaaaccaaacgtttatagatgtttgtggttattcagcaagtgaattgttaggaaaaccccacaatattatccgtcaccctgatatgcctaaaatagtatttaaggtaacgtgggacaatattttggcagggcgcaactttcacgctattataaagaacttagccaaatcgggncggtattactgggtaattactgactttgaggtaggacgcaatattatgggcgaggtggtaactattatggcncgccgccgtgctgtgcccgagcacgtaatcactgaccatatagagccnctataccaaacgctcctaaaattggagaaaattggtggtatggagcttagcaaccgctatttcaaaggttttttagaaaaacaaggcaaatcgtacattgagtatgttatggatatacttgatgactctaaacgcgaaatacgcttcgagccagtgaatacacacactgataccgaaagtactttaggcgattacgaaatatctgatgatatctttagtgaagatcacaaagaagaaaatatnctacancgcaaaagtttctttgctaaattgttttcaacaaattaannnttaaanannntatnannnnaanagnnnnntnnnannnnnangannnnnnnntnnnnnnntnnnntnnnnnnttntnnnnnnntnnnnnnnntnttttnnnnnnnnnnnaanntnnntnntantnnnatnnannnnnnnnanngntnaaanannnnnnnnnnnnaannnnnntnnnnaannnnngnatnnncannannnnnnannannnnnnnnnnnanannannnnnagntatnnnnntannnnnnnnnnnnnnnnntnnnnnnnanttctttnnnnnnnttnntnnntnnntnnnannnnnnnnnnnnnnnnantannnnnnnangannatnnnnnnannnnnnncnnnnnnanttnatntnnnnnnnatnnntnnntttnnntntnaanttnnnnnnnnntnannnnanannngnnnncnnnnnanannagnnnnnncnntantntnttnnnangntnttnnnnnncaanntntttntntnnnacantnnntnnnnngttnanaaanannnnnctnntagnnnnnnnanannntnnnnannnnnntanannctngnnnntnntnnnttttatnnnannnnttnngnnntanngnannnnnnatnnnnnnnnnntnnnnnntnnnntnnngantncnnnnanacnntntntnncncannnantannttnnnnnnntnnnnnncnntnnnncnnnttnnnnnnnnnnnntntnntntnnnnnngntnnnacananntnnnttntnnncntnnnnnntntnnanannnnnngtannnnntttttnnnnngnnttngnnnnnnnattnnnanacnattnnncaanaannnnannnncannannntnannatnnannnnnntnannnnntnntnntnnanannntnnnnanantnannnnnnnganntannntttnnnngnaaanannnncnncnnnnnnnntnnnnnnngcannanannntnnttnnnnnnnntnttntttnnaannntcnntntntnatatnnnnttntannnnnnnnnnnngnntncnnnnngnngnnnaannnnnttnatnnngnnnntntnnntngnttttngnngnnnttnnttnnnnnnnnngnnngtaanananntnnnatnngnnnntnnnnngnnntnnntnntnnngnnnngnnncncnanatnttttnnnnnnnntanntnnntntnntnnanancn

SEQ ID NO: 458 - DNA, 4000 bp, Escherichia coli
  misc_feature (2)..(3): n is a, c, g, or t
  misc_feature (6)..(6): n is a, c, g, or t
  misc_feature (12)..(14): n is a, c, g, or t
  misc_feature (17)..(20): n is a, c, g, or t
  misc_feature (26)..(30): n is a, c, g, or t
  misc_feature (32)..(34): n is a, c, g, or t
  misc_feature (39)..(40): n is a, c, g, or t
  misc_feature (44)..(49): n is a, c, g, or t
  misc_feature (52)..(53): n is a, c, g, or t
  misc_feature (56)..(58): n is a, c, g, or t
  misc_feature (60)..(62): n is a, c, g, or t
  misc_feature (64)..(68): n is a, c, g, or t
  misc_feature (70)..(70): n is a, c, g, or t
  misc_feature (72)..(73): n is a, c, g, or t
  misc_feature (76)..(79): n is a, c, g, or t
  misc_feature (81)..(81): n is a, c, g, or t
  misc_feature (85)..(87): n is a, c, g, or t
  misc_feature (91)..(91): n is a, c, g, or t
  misc_feature (94)..(94): n is a, c, g, or t
  misc_feature (97)..(98): n is a, c, g, or t
  misc_feature (100)..(100): n is a, c, g, or t
  misc_feature (102)..(104): n is a, c, g, or t
  misc_feature (106)..(106): n is a, c, g, or t
  misc_feature (108)..(108): n is a, c, g, or t
  misc_feature (112)..(113): n is a, c, g, or t
  misc_feature (115)..(115): n is a, c, g, or t
  misc_feature (118)..(118): n is a, c, g, or t
  misc_feature (120)..(121): n is a, c, g, or t
  misc_feature (123)..(125): n is a, c, g, or t
  misc_feature (127)..(127): n is a, c, g, or t
  misc_feature (129)..(130): n is a, c, g, or t
  misc_feature (140)..(143): n is a, c, g, or t
  misc_feature (145)..(145): n is a, c, g, or t
  misc_feature (148)..(148): n is a, c, g, or t
  misc_feature (150)..(150): n is a, c, g, or t
  misc_feature (152)..(154): n is a, c, g, or t
  misc_feature (156)..(157): n is a, c, g, or t
  misc_feature (160)..(166): n is a, c, g, or t
  misc_feature (171)..(171): n is a, c, g, or t
  misc_feature (173)..(173): n is a, c, g, or t
  misc_feature (176)..(176): n is a, c, g, or t
  misc_feature (178)..(178): n is a, c, g, or t
  misc_feature (182)..(182): n is a, c, g, or t
  misc_feature (185)..(185): n is a, c, g, or t
  misc_feature (187)..(190): n is a, c, g, or t
  misc_feature (192)..(194): n is a, c, g, or t
  misc_feature (199)..(200): n is a, c, g, or t
  misc_feature (203)..(203): n is a, c, g, or t
  misc_feature (207)..(208): n is a, c, g, or t
  misc_feature (210)..(210): n is a, c, g, or t
  misc_feature (215)..(217): n is a, c, g, or t
  misc_feature (219)..(219): n is a, c, g, or t
  misc_feature (221)..(221): n is a, c, g, or t
  misc_feature (223)..(225): n is a, c, g, or t
  misc_feature (230)..(235): n is a, c, g, or t
  misc_feature (237)..(237): n is a, c, g, or t
  misc_feature (240)..(241): n is a, c, g, or t
  misc_feature (243)..(244): n is a, c, g, or t
  misc_feature (249)..(251): n is a, c, g, or t
  misc_feature (256)..(256): n is a, c, g, or t
  misc_feature (261)..(265): n is a, c, g, or t
  misc_feature (267)..(269): n is a, c, g, or t
  misc_feature (272)..(272): n is a, c, g, or t
  misc_feature (275)..(275): n is a, c, g, or t
  misc_feature (278)..(279): n is a, c, g, or t
  misc_feature (281)..(281): n is a, c, g, or t
  misc_feature (284)..(285): n is a, c, g, or t
  misc_feature (287)..(290): n is a, c, g, or t
  misc_feature (293)..(294): n is a, c, g, or t
  misc_feature (296)..(298): n is a, c, g, or t
  misc_feature (300)..(300): n is a, c, g, or t
  misc_feature (302)..(303): n is a, c, g, or t
  misc_feature (306)..(307): n is a, c, g, or t
  misc_feature (309)..(310): n is a, c, g, or t
  misc_feature (316)..(318): n is a, c, g, or t
  misc_feature (321)..(321): n is a, c, g, or t
  misc_feature (326)..(326): n is a, c, g, or t
  misc_feature (329)..(329): n is a, c, g, or t
  misc_feature (331)..(331): n is a, c, g, or t
  misc_feature (335)..(335): n is a, c, g, or t
  misc_feature (337)..(337): n is a, c, g, or t
  misc_feature (339)..(340): n is a, c, g, or t
  misc_feature (342)..(344): n is a, c, g, or t
  misc_feature (347)..(347): n is a, c, g, or t
  misc_feature (349)..(350): n is a, c, g, or t
  misc_feature (352)..(354): n is a, c, g, or t
  misc_feature (357)..(357): n is a, c, g, or t
  misc_feature (359)..(359): n is a, c, g, or t
  misc_feature (361)..(361): n is a, c, g, or t
  misc_feature (365)..(366): n is a, c, g, or t
  misc_feature (368)..(368): n is a, c, g, or t
  misc_feature (371)..(372): n is a, c, g, or t
  misc_feature (374)..(375): n is a, c, g, or t
  misc_feature (377)..(377): n is a, c, g, or t
  misc_feature (379)..(379): n is a, c, g, or t
  misc_feature (381)..(381): n is a, c, g, or t
  misc_feature (386)..(387): n is a, c, g, or t
  misc_feature (390)..(390): n is a, c, g, or t
  misc_feature (392)..(392): n is a, c, g, or t
  misc_feature (394)..(394): n is a, c, g, or t
  misc_feature (398)..(398): n is a, c, g, or t
  misc_feature (400)..(401): n is a, c, g, or t
  misc_feature (403)..(403): n is a, c, g, or t
  misc_feature (406)..(406): n is a, c, g, or t
  misc_feature (409)..(411): n is a, c, g, or t
  misc_feature (413)..(413): n is a, c, g, or t
  misc_feature (415)..(416): n is a, c, g, or t
  misc_feature (419)..(419): n is a, c, g, or t
  misc_feature (422)..(422): n is a, c, g, or t
  misc_feature (424)..(424): n is a, c, g, or t
  misc_feature (426)..(426): n is a, c, g, or t
  misc_feature (428)..(430): n is a, c, g, or t
  misc_feature (432)..(433): n is a, c, g, or t
  misc_feature (436)..(439): n is a, c, g, or t
  misc_feature (443)..(443): n is a, c, g, or t
  misc_feature (445)..(447): n is a, c, g, or t
  misc_feature (449)..(450): n is a, c, g, or t
  misc_feature (453)..(453): n is a, c, g, or t
  misc_feature (458)..(458): n is a, c, g, or t
  misc_feature (462)..(462): n is a, c, g, or t
  misc_feature (464)..(464): n is a, c, g, or t
  misc_feature (468)..(468): n is a, c, g, or t
  misc_feature (470)..(470): n is a, c, g, or t
  misc_feature (477)..(479): n is a, c, g, or t
  misc_feature (481)..(486): n is a, c, g, or t
  misc_feature (489)..(490): n is a, c, g, or t
  misc_feature (494)..(495): n is a, c, g, or t
  misc_feature (497)..(498): n is a, c, g, or t
  misc_feature (501)..(501): n is a, c, g, or t
  misc_feature (503)..(503): n is a, c, g, or t
  misc_feature (508)..(508): n is a, c, g, or t
  misc_feature (510)..(510): n is a, c, g, or t
  misc_feature (512)..(513): n is a, c, g, or t
  misc_feature (517)..(524): n is a, c, g, or t
  misc_feature (526)..(528): n is a, c, g, or t
  misc_feature (530)..(530): n is a, c, g, or t
  misc_feature (532)..(532): n is a, c, g, or t
  misc_feature (534)..(534): n is a, c, g, or t
  misc_feature (537)..(538): n is a, c, g, or t
  misc_feature (540)..(541): n is a, c, g, or t
  misc_feature (544)..(548): n is a, c, g, or t
  misc_feature (550)..(555): n is a, c, g, or t
  misc_feature (558)..(558): n is a, c, g, or t
  misc_feature (561)..(561): n is a, c, g, or t
  misc_feature (565)..(565): n is a, c, g, or t
  misc_feature (567)..(569): n is a, c, g, or t
  misc_feature (571)..(572): n is a, c, g, or t
  misc_feature (574)..(577): n is a, c, g, or t
  misc_feature (580)..(581): n is a, c, g, or t
  misc_feature (583)..(584): n is a, c, g, or t
  misc_feature (586)..(589): n is a, c, g, or t
  misc_feature (592)..(593): n is a, c, g, or t
  misc_feature (595)..(596): n is a, c, g, or t
  misc_feature (598)..(598): n is a, c, g, or t
  misc_feature (602)..(602): n is a, c, g, or t
  misc_feature (605)..(605): n is a, c, g, or t
  misc_feature (607)..(608): n is a, c, g, or t
  misc_feature (610)..(610): n is a, c, g, or t
  misc_feature (612)..(612): n is a, c, g, or t
  misc_feature (614)..(617): n is a, c, g, or t
  misc_feature (619)..(619): n is a, c, g, or t
  misc_feature (621)..(621): n is a, c, g, or t
  misc_feature (626)..(627): n is a, c, g, or t
  misc_feature (631)..(633): n is a, c, g, or t
  misc_feature (636)..(638): n is a, c, g, or t
  misc_feature (641)..(642): n is a, c, g, or t
  misc_feature (646)..(646): n is a, c, g, or t
  misc_feature (648)..(648): n is a, c, g, or t
  misc_feature (650)..(653): n is a, c, g, or t
  misc_feature (655)..(655): n is a, c, g, or t
  misc_feature (657)..(658): n is a, c, g, or t
  misc_feature (660)..(662): n is a, c, g, or t
  misc_feature (664)..(666): n is a, c, g, or t
  misc_feature (668)..(668): n is a, c, g, or t
  misc_feature (670)..(672): n is a, c, g, or t
  misc_feature (675)..(679): n is a, c, g, or t
  misc_feature (681)..(681): n is a, c, g, or t
  misc_feature (683)..(685): n is a, c, g, or t
  misc_feature (688)..(692): n is a, c, g, or t
  misc_feature (695)..(696): n is a, c, g, or t
  misc_feature (698)..(699): n is a, c, g, or t
  misc_feature (702)..(704): n is a, c, g, or t
  misc_feature (706)..(710): n is a, c, g, or t
  misc_feature (712)..(713): n is a, c, g, or t
  misc_feature (716)..(717): n is a, c, g, or t
  misc_feature (720)..(724): n is a, c, g, or t
  misc_feature (726)..(726): n is a, c, g, or t
  misc_feature (730)..(732): n is a, c, g, or t
  misc_feature (739)..(743): n is a, c, g, or t
  misc_feature (745)..(746): n is a, c, g, or t
  misc_feature (749)..(752): n is a, c, g, or t
  misc_feature (757)..(760): n is a, c, g, or t
  misc_feature (762)..(763): n is a, c, g, or t
  misc_feature (766)..(767): n is a, c, g, or t
  misc_feature (769)..(769): n is a, c, g, or t
  misc_feature (771)..(772): n is a, c, g, or t
  misc_feature (775)..(775): n is a, c, g, or t
  misc_feature (777)..(777): n is a, c, g, or t
  misc_feature (780)..(781): n is a, c, g, or t
  misc_feature (787)..(787): n is a, c, g, or t
  misc_feature (798)..(799): n is a, c, g, or t
  misc_feature (801)..(802): n is a, c, g, or t
  misc_feature (808)..(808): n is a, c, g, or t
  misc_feature (811)..(812): n is a, c, g, or t
  misc_feature (816)..(816): n is a, c, g, or t
  misc_feature (819)..(820): n is a, c, g, or t
  misc_feature (823)..(823): n is a, c, g, or t
  misc_feature (826)..(826): n is a, c, g, or t
  misc_feature (828)..(829): n is a, c, g, or t
  misc_feature (831)..(832): n is a, c, g, or t
  misc_feature (858)..(858): n is a, c, g, or t
  misc_feature (929)..(929): n is a, c, g, or t
  misc_feature (934)..(935): n is a, c, g, or t
  misc_feature (1967)..(1968): n is a, c, g, or t
  misc_feature (1973)..(1974): n is a, c, g, or t
  misc_feature (1977)..(1977): n is a, c, g, or t
  misc_feature (1982)..(1983): n is a, c, g, or t
  misc_feature (1985)..(1985): n is a, c, g, or t
  misc_feature (1991)..(1992): n is a, c, g, or t
  misc_feature (2004)..(2004): n is a, c, g, or t
  misc_feature (2009)..(2010): n is a, c, g, or t
  misc_feature (3007)..(3007): n is a, c, g, or t
  misc_feature (3009)..(3009): n is a, c, g, or t
  misc_feature (3012)..(3012): n is a, c, g, or t
  misc_feature (3014)..(3014): n is a, c, g, or t
  misc_feature (3016)..(3016): n is a, c, g, or t
  misc_feature (3023)..(3027): n is a, c, g, or t
  misc_feature (3033)..(3033): n is a, c, g, or t
  misc_feature (3035)..(3040): n is a, c, g, or t
  misc_feature (3042)..(3044): n is a, c, g, or t
  misc_feature (3047)..(3049): n is a, c, g, or t
  misc_feature (3054)..(3054): n is a, c, g, or t
  misc_feature (3057)..(3067): n is a, c, g, or t
  misc_feature (3069)..(3078): n is a, c, g, or t
  misc_feature (3080)..(3082): n is a, c, g, or t
  misc_feature (3084)..(3102): n is a, c, g, or t
  misc_feature (3104)..(3111): n is a, c, g, or t
  misc_feature (3113)..(3115): n is a, c, g, or t
  misc_feature (3118)..(3121): n is a, c, g, or t
  misc_feature (3123)..(3123): n is a, c, g, or t
  misc_feature (3125)..(3129): n is a, c, g, or t
  misc_feature (3131)..(3164): n is a, c, g, or t
  misc_feature (3166)..(3189): n is a, c, g, or t
  misc_feature (3191)..(3204): n is a, c, g, or t
  misc_feature (3206)..(3240): n is a, c, g, or t
  misc_feature (3242)..(3245): n is a, c, g, or t
  misc_feature (3247)..(3248): n is a, c, g, or t
  misc_feature (3250)..(3250): n is a, c, g, or t
  misc_feature (3252)..(3254): n is a, c, g, or t
  misc_feature (3256)..(3265): n is a, c, g, or t
  misc_feature (3267)..(3275): n is a, c, g, or t
  misc_feature (3277)..(3285): n is a, c, g, or t
  misc_feature (3287)..(3289): n is a, c, g, or t
  misc_feature (3291)..(3324): n is a, c, g, or t
  misc_feature (3326)..(3352): n is a, c, g, or t
  misc_feature (3354)..(3358): n is a, c, g, or t
  misc_feature (3360)..(3392): n is a, c, g, or t
  misc_feature (3394)..(3417): n is a, c, g, or t
  misc_feature (3420)..(3425): n is a, c, g, or t
  misc_feature (3427)..(3449): n is a, c, g, or t
  misc_feature (3451)..(3452): n is a, c, g, or t
  misc_feature (3454)..(3479): n is a, c, g, or t
  misc_feature (3481)..(3486): n is a, c, g, or t
  misc_feature (3488)..(3496): n is a, c, g, or t
  misc_feature (3500)..(3507): n is a, c, g, or t
  misc_feature (3509)..(3510): n is a, c, g, or t
  misc_feature (3515)..(3515): n is a, c, g, or t
  misc_feature (3517)..(3536): n is a, c, g, or t
  misc_feature (3538)..(3541): n is a, c, g, or t
  misc_feature (3543)..(3551): n is a, c, g, or t
  misc_feature (3553)..(3559): n is a, c, g, or t
  misc_feature (3561)..(3563): n is a, c, g, or t
  misc_feature (3565)..(3574): n is a, c, g, or t
  misc_feature (3577)..(3578): n is a, c, g, or t
  misc_feature (3580)..(3581): n is a, c, g, or t
  misc_feature (3583)..(3588): n is a, c, g, or t
  misc_feature (3590)..(3591): n is a, c, g, or t
  misc_feature (3593)..(3604): n is a, c, g, or t
  misc_feature (3606)..(3619): n is a, c, g, or t
  misc_feature (3621)..(3621): n is a, c, g, or t
  misc_feature (3623)..(3623): n is a, c, g, or t
  misc_feature (3625)..(3629): n is a, c, g, or t
  misc_feature (3631)..(3633): n is a, c, g, or t
  misc_feature (3635)..(3635): n is a, c, g, or t
  misc_feature (3638)..(3639): n is a, c, g, or t
  misc_feature (3642)..(3650): n is a, c, g, or t
  misc_feature (3653)..(3658): n is a, c, g, or t
  misc_feature (3660)..(3660): n is a, c, g, or t
  misc_feature (3662)..(3662): n is a, c, g, or t
  misc_feature (3664)..(3672): n is a, c, g, or t
  misc_feature (3675)..(3676): n is a, c, g, or t
  misc_feature (3679)..(3684): n is a, c, g, or t
  misc_feature (3686)..(3688): n is a, c, g, or t
  misc_feature (3690)..(3698): n is a, c, g, or t
  misc_feature (3701)..(3706): n is a, c, g, or t
  misc_feature (3708)..(3710): n is a, c, g, or t
  misc_feature (3712)..(3713): n is a, c, g, or t
  misc_feature (3715)..(3720): n is a, c, g, or t
  misc_feature (3722)..(3722): n is a, c, g, or t
  misc_feature (3724)..(3733): n is a, c, g, or t
  misc_feature (3735)..(3740): n is a, c, g, or t
  misc_feature (3743)..(3744): n is a, c, g, or t
  misc_feature (3746)..(3748): n is a, c, g, or t
  misc_feature (3750)..(3754): n is a, c, g, or t
  misc_feature (3756)..(3759): n is a, c, g, or t
  misc_feature (3761)..(3762): n is a, c, g, or t
  misc_feature (3764)..(3767): n is a, c, g, or t
  misc_feature (3769)..(3774): n is a, c, g, or t
  misc_feature (3777)..(3782): n is a, c, g, or t
  misc_feature (3784)..(3785): n is a, c, g, or t
  misc_feature (3787)..(3802): n is a, c, g, or t
  misc_feature (3804)..(3807): n is a, c, g, or t
  misc_feature (3809)..(3813): n is a, c, g, or t
  misc_feature (3815)..(3815): n is a, c, g, or t
  misc_feature (3817)..(3817): n is a, c, g, or t
  misc_feature (3820)..(3821): n is a, c, g, or t
  misc_feature (3823)..(3831): n is a, c, g, or t
  misc_feature (3833)..(3841): n is a, c, g, or t
  misc_feature (3843)..(3844): n is a, c, g, or t
  misc_feature (3846)..(3846): n is a, c, g, or t
  misc_feature (3848)..(3849): n is a, c, g, or t
  misc_feature (3851)..(3854): n is a, c, g, or t
  misc_feature (3857)..(3861): n is a, c, g, or t
  misc_feature (3863)..(3873): n is a, c, g, or t
  misc_feature (3876)..(3879): n is a, c, g, or t
  misc_feature (3881)..(3886): n is a, c, g, or t
  misc_feature (3888)..(3890): n is a, c, g, or t
  misc_feature (3892)..(3896): n is a, c, g, or t
  misc_feature (3898)..(3930): n is a, c, g, or t
  misc_feature (3932)..(3933): n is a, c, g, or t
  misc_feature (3935)..(3937): n is a, c, g, or t
  misc_feature (3941)..(3949): n is a, c, g, or t
  misc_feature (3951)..(3954): n is a, c, g, or t
  misc_feature (3956)..(3963): n is a, c, g, or t
  misc_feature (3966)..(3969): n is a, c, g, or t
  misc_feature (3971)..(3985): n is a, c, g, or t
  misc_feature (3987)..(3997): n is a, c, g, or t
  misc_feature (3999)..(4000): n is a, c, g, or t
gnnggnggtgtnnntgnnnnggcggnnnnngnnnatgcnnatgnnnnnnttnntgnnngnnncnnnnnanannggnnnntngcgnnngagngcnccnngngnnnananccgnntntgngnntnnncnanngcggacacgnnnncnccntncnnntnnttnnnnnnngtgangntgngngtgnccncnnnnannntcacnntgncacnngngccannncncncnnncacannnnnntnaanntnnacctnnncctcngcggnnnnngnnngcncantgnnanagnncnnnnccnncnnngngnngtnntnnatgtannngtntgtgntcntntccntntnngnnntananngnnnctntntnttgnntntgnngnngngngnggtgnnggngngnggtnanntnaangtnnntntnntgnggntntngnnntnngcnnnngcgngnnncnngcnccccncctncncatntncgcttgnnntnnnnnncanncccnncnnaananggggngncnntgtnnnnnnnngnnntngngntgnngnngannnnnannnnnntgngtntttntnnngnngnnnnagnncnncnnnntanntnngngcgncangnncncncnnnncngnggcannggcnnngtnnnggnngggngngnnnngngnnannncnnncncnnngtnnnnngngnnnagnnnnngcnncnnctnnntnnnnncnncanncannnnntntgcnnntgctttnnnnntnnggnnnngggtnnnngnnggnncngnnacngncanngcgggngcgggagccgnngnngtgggnatnngtgncannggnggngnngnnggcgtgggcgcgggtgcaggagccgntgcaggggcggcaacgggtgcaggagtgggggccgtctgcacaggtgcgggagcaacgggagcgttgccgnccggnntgttaaagttgagcgtgccctcattcggcacggtgatattgagtgcggttttgtcgatggctgcggcaagtttttcaactgcggcaaccaattccggcacatcaatcttgattttcatttccatcatcgttataatcctccttagtggtagttgttgtttcacaatcgcagcgctcaccggggtcaaggtttgcgccgcattttgggcatgtccagtagtaaggcatctttatccctccaatacgcttgtccagtgttcaaaagctgccatcactttgcgggagtagtcggtttggaatgttccagcatcccaaagtttctgtgctcccgtggggccggagttgtatgccatcaaagccaactccggctttccgtatttattcaagtgctgagaaataatgtagatacccgcctcaatgtttccatcataggtcataacatcaaaacctatttcagagagccattcatggttgatggagttaatctgcatgaggccatagtcaccggtgccgctgacggcatccgggtcaaagtgggtttccacctctgcaatggcgagtgccagggcatacggcacgccatactcctcacagcagtcctgcatggtttcttggaggtcatagcttaggagccgtccctcacttacgatgtcatcacgggtgcggctgacaggcggcgcagcggtcacgggcgtaggctccgcaaccgtcgtgactgttggcatcggtgtttctgccgcaacggttgggatggttggcttgtcctccttgcaggtgcatagccagacgaacacaacgcagcacacaatggtgatgagggcaacacggcgctgccgtctgattttacgggcacggcggcatctgcgtgaataacgccgggcctctatctcatgtgtggtcatgtcagccacctcttacttgtcggctctgctgaaaagttcctcaaccagctctcttgtggtgtaggatgcaagggcattttccggctccacaacataattagaggggaggaggaaagcgggacgggacccgnnggtanngtngcagnngntgttgnngacattgccatnggtgnncaagcccatgacccaggtttcatctccatccacgcagggggtgctccaaggggtaacagaccattcccatttttccggcttggggatgatgtcatggtacttgcggtactcatcaaatgtaagtggcgcaatgcagcaggtgtcaatgccatactgcttgctaccgttgactgcggtgaggtcaatggcgcgtttcaaaatctcaccatggttgccctgggtgagcgtgtccatgtaggcaccgttgaggtgttcacgcaggtcactcttggcaaaatcgttgtcagagccaaaagtgtgctcaatctgctcaagcaccatgagcagggtgccgtccttgcggtgctccagcacgatgcagggctcaccgtggtactttacggttgcacctgcttgaaaatcggataacattttcacggtttagtcctcctctctttcctcgttggcatcctcaatgtcaatgagattttctgcctgcacaatgatttcactcacaatttgcctaataggcagtgcagtcttggcgcgcaggcggcggatgactttttccgcctccggggtcaatctgacggtaccgatgcactcgtcagaagtacggttgcttttcagcacaatagggtttgcatttgctttcatagggttgtcctcctttggttgtatcaatgtgggcggttatgcctcggcagctttgcggcccctccgttcaatagatttttggacagtgagctgtgccaattccgcatcatagcggcggcgcatatcggggagccgtgtgccgtcatatccacgcttgagctctgtgtaaattgcagacacggacaagtcaaagtcctgtgcaatctctttgacagaggcaccgctttcccaaaggctctgaattttctggcgctctgaaatagaacggtaggcgtaggttgccatttgtttcacctcctcacggcataaaaaaattagactgcaagggtcttggatgaccctgcaatctaataataatggntnccntncnaaatttnnnnnaaaaantnnnnnnannnttnnnaaatnttnnnnnnnnnnnannnnnnnnnncnnngnnnnnnnnnnnnnnnnnnntnnnnnnnngnnnttnnnnanannnnngnnnnnnnnnnnnnnnnnnnnnnnnnnnnnnnnnngnnnnnnnnnnnnnnnnnnnnnnnntnnnnnnnnnnnnnnannnnnnnnnnnnnnnnnnnnnnnnnnnnnnnnnnncnnnngnntntnnngnnnnnnnnnntnnnnnnnnncnnnnnnnnncnnncnnnnnnnnnnnnnnnnnnnnnnnnnnnnnnnnnntnnnnnnnnnnnnnnnnnnnnnnnnnnntnnnnntnnnnnnnnnnnnnnnnnnnnnnnnnnnnnnnnngnnnnnnnnnnnnnnnnnnnnnnnnttnnnnnntnnnnnnnnnnnnnnnnnnnnnnncnncnnnnnnnnnnnnnnnnnnnnnnnnnncnnnnnngnnnnnnnnnattnnnnnnnngnngcttntnnnnnnnnnnnnnnnnnnnngnnnnannnnnnnnncnnnnnnntnnntnnnnnnnnnnggnngnngnnnnnngnncnnnnnnnnnnnnannnnnnnnnnnnnncnangnnnnncnnngntgnnccnnnnnnnnncannnnnncngncnnnnnnnnnttnnccnnnnnngnnncnnnnnnnnnttnnnnnngnnngnntnnnnnngntnnnnnnnnnngnnnnnntcnngnnntnnnnngnnnntnntnnnnannnnnnccnnnnnncnntnnnnnnnnnnnnnnnngnnnnannnnnananacnncnnnnnnnnngnnnnnnnnntnnananngnnnnttnnnnnannnnnnnnnnnttnnnngnnnnnntnnncnnnnncnnnnnnnnnnnnnnnnnnnnnnnnnnnnnnnnngnntnnncccnnnnnnnnntnnnncnnnnnnnnttnnnncnnnnnnnnnnnnnnngnnnnnnnnnnntnn

(The sequence listing continues in the following parts.)
